United States Patent Application Publication US 2004/0029129 A1 - sequence listing, part 14

SEQ ID NO: 36096 - DNA, 1551 bp, Streptococcus mutans
ttgaaatttacagaattacatttggcggaagacattctttctgctgttgcaaaagtcggctttgttgagccatcacctatccaagaattgactattcctcttgcccttgaaggaaaagatgttattggtcaagcacaaactgggacaggaaaaacagcagcctttggtctgccaaccctgaataagattgacgtgactaataacgttgttcaagcccttgttattgcgccaacgcgagaattggctgttcaaagtcaagaggagctctttcgttttgggcgtgaaaagaaagttaaagttcgttcggtttatggtggttcaagcattgaaaaacaaattaaggctcttaaatcaggagcccatattgttgttgggacaccgggacgtctgcttgatttgattaaacgcaaggcgcttaaattaaatcatgtggaaacccttattttggatgaagcagatgaaatgctcaacatgggctttttagaagatattgaagccattatttcacgtgtaccagaaacacgccaaaccttgctcttttcagcaaccatgccagatgccatcaaacgtattggcgtaaagttcatgaaagaaccagaacatgttaagattgctgccaaagaattaacaacagatttggtggatcaatattatatccgtgtcaaggaaaatgaaaaatttgatacgatgacccgtcttatggatgtggaacagccagaactttctatcgtttttggccgtactaagcgccgtgttgatgagttaacaagaggattaaaactgcgtggctatcgtgcggaagggattcatggggatctcgatcaagggaaacgtctgcgtgttcttcgggattttaaaaatgataaccttgacattttggtcgcgacagatgtggcggctcgtggtctcgatatttcgggcgtcactcatgtttataactatgatattccgcaagaccctgaaagttatgttcatcgcattggtcgtacaggtcgtgctggtaagcacggtcagtcaatcacttttgtggctcccaatgaaatgggctatcttcaaattattgaaaagctcactaaaaaacgcatgaaaggcatgaaacccgctacagcgcaagaagcctttcaagcaagcaaaaaagtggccctcaaaaagattgagcgtgactttgctgatgaaaagattcgttctaattttgataagtttaccaaagatgctgaaaaattggctgctgaattttcaccagaagaattagcacaatatatcttgactctaactgttcaagatccagaaatgctgcctaaggttgaaattgctcgcgaaaaacccttgccatttaaatttgctggtaaaggaaagggcggcaatcgtcgtcgtgaggatcgtcggggaggtcgcgacagtcgccgtaatcatcgtgacggtggccgtcgtgaatttaaacggacttctaacaaaaatcgcaaagattttgaaaataagagcaataaacgtcctcaccgtacttccagcgaaaagaaaagcggctttaccattcgcaataaaggtgacaga

SEQ ID NO: 36097 - DNA, 1218 bp, Streptococcus mutans
atgaagattggtaaaaaaattctaattatgctggttacaatatttctcacaagcttggtagctttaggagtttatgcaacgagtatttataacttttctttaggagaattttcaaaaacttttaaagattatggcacaggttcaggtaaagacgttattgctgatgaaaaaccttttagtatcctcttaatgggagttgacacgggctcttccgagaggacttccaaatgggaaggtaacagtgactctatgattttggtaacggttaatcccaaaactaaaaagacaaccatgaccagtttagaacgggatatcttggttaaattatctggatctaaaactaatgaccagactggttatgatgccaagcttaatgcagcctatgctgctggaggtgctaagatggctattatgacagttcaggatatgcttgatattaagattgataaatatgttcaaattaatatggaagggctggttcagttggttgatgctgtaggtggtattacggtaaccaatcattttgattttccaatttcaattgaagaacatgagcctgaatttacagcatcagttgagcccgggactcacaagattaatggggagcaggccctcgtttattcgcgaatgcgttatgatgatccagatggagactatggccgtcaaaagcgtcaacgtgaggtcatcagcaaggtcttaaagaaaattttagctttagacagtgtcagcaagtatcgtaaaattttatcagctgtcagcaagaatatgcagactaatattgaaatttccagcagtactattcctaaacttttggggtacagcgatgctctcaagagtattaggacttatcagctcaagggagaaggaacgactattgacggtggttcttatcagctagtaaccagcaaggaattgctaaaagctcaaaatcgtattaaaggacaattagggctgaaaaaatcaactgctgaaaatctgaaaacaacggctagtctttatgagaatttttatggaggcgatacgagtatttatgacagtagctccagtgcctcagattacagtagcagcggtaattattctggctcaagttcagattatggttctagttcttcttatggctccaattcgagttctggttcttccagtgattattctggacaaaatagttataatcaaggaaattaccaacaacctgctgcaggaacgggaattggtaat

SEQ ID NO: 36098 - DNA, 333 bp, Streptococcus mutans
atgattcaagcaacatttattcgccgtaagggcatactggaaagcgttgagctgactggtcatgctggatctggtgagtacggctttgatatcgtatgcgcagctgtttcaactttatcaatgaatttggttaatgctttggaagttttagcagactgtacagttagtttacaaatggatgagtttgatggcggttatatgaagattgatttatcgtatataaccaataaatcagatgagaaagttcaattgttatttgaagcttttcttctaggaataactaatcttgctgaaaattctccagaatttgtaacagctaagattatgacccaa

SEQ ID NO: 36099 - DNA, 291 bp, Streptococcus mutans
atgttaaaaatgaatcttgctaatttgcaacttttcgcccacaaaaaaggtggcggttctacatctaacggacgtgattcagaaagcaaacgtcttggtgctaaagcagctgatggccaaactgttacaggtggttcaatcctttaccgtcaacgcggaacacatatctacccaggtgctaacgtaggtcgtggtggagatgataccctttttgctaaggttgaaggtgttgttcgtttcgaacgtaaaggtcgcgataaaaaacaagtatctgtctacccaatcgcaaaa

SEQ ID NO: 36100 - DNA, 750 bp, Streptococcus mutans
gtgttttatacctacctgcgctctttgttagtttttttaatttgggctgctaatggtaatattcattaccatcatcgagataaattgttgcctgaagatgacaattatattttagttgcacctcaccgtacactatgggatcctatctttttagcttttgcagctcggcctaagcaatttatctttatggctaagaaggaattatttggcaatcgtgctttcggctggtggattcgcatgtgtggagcttttccgattgatcgtaaaaacccagggactgaggctgtccgttatcctgttaaaatgcttaggaaaagcgatcgttctttgattatgtttccaagtggaagtcgtcattcttctgatgttaaaggtggcgttgcagttattgccaaaacagcaaaagttaaaattatgcctgcagcctatgcggggccaagatccatcaaaggcttgcttaaacatgatcgtattgatgttacttttggcaatcccattgatatttcagatattaagcgcatgaatgacgatggcattgaagaagtggctcatcgtattgaaaaagaatttgaccaaatggatacagaagttgcaactttcaaagataatgagcgaccaagctggtggagcttgatttatcgtttgccagctatggttttggtggctattgttcttgctttcacttacctcttttcttggttcgctagttttgtctggaacccagaaaagcatcgtgataaaaaaataaaa

SEQ ID NO: 36101 - DNA, 780 bp, Streptococcus mutans
ttggcacaatcagataaagatttaaccttaacgcctttaaagggcaaaagtggtcaagcttatatcggaacttatccaaatggtgataagatttttgttaaaatcaataccactcccatcttagctgccttagctaaggagcagattgctcctcagcttttatgggcaaaacgcttaggtaatggcgatatgatgagtgctcaggaatggctggatggcagacttttaaccagagccgatatgaatagtaagcaaattatacaagttttgctgcaaatgcataagtcgaaacccttggttaatcagttacttcagttaaattataaagttgagacacctttggatttgcttctatcatgggaacgcagcgcgccttaccaaatttcagaaaatgcctatttgcaatcagttgttgctgaaatgaagcgcaacttacctgatttcaaaaaagactatgcaactattgttcatggagatgttagacacagcaattgggtgattacaaccagtggtttggtttatttagtagattgggattctgttcgagtgacagatcgcatgtatgatgtagctcatattttaagccattatattccacatacgcgttgggcagaatggctgagctattatggttataagcaaaatactaaggtttttcaaaagataaaatggtacgggcaactgtcttatttatcacaaattttaaaatattatgaaaatcgagacatggaaaatgtcaatcaggaaatctatgaattacgtaaatttagagaatccttt

SEQ ID NO: 36102 - DNA, 1191 bp, Streptococcus mutans
atgagccaagaaatgctagaagccttccgtattctggaagaggaaaaacacattaacaaagatgatattattgatgcggttaaagaatcattaaagtcagcttataaacgtcgctatgggcaggcagaaagtgctgagattgaatttgacgaaaagtcaggagactttaaagtcttcactgttcgtgaagttgttgaagaagtttttgacagccgccttgagatcagcttgaaggacgcccttgcgatcagtacagcctatgaacttggagataaaattcgttttgaagagtctcccaaggaatttggtcgcgtggctgcccagtcagctaaacaaacgatcatggaaaaaatgcgccgtcaaatgcgtgaagtcacttttaatgagtataaagagcatgaaagagaaatcatgacagggactgttgagcgttttgataatcgctttatctatgttaatttaggaacgatagaagcgcagctgtcacgtcaagatcaagttccgggtgaaacgtttgcttctcatgatcgcattgaagtttatgtttataaagtagaaaacaatcctaagggcgtcaatgtcttcgttagtcgcagtcatcctgaatttatcaagcgtattatggaacaggaaattcctgaagtttttgatggcactgttgaaattatgagcgtagcacgtgaagctggtgatcgaacgaaggttgcggttcgcagtcataatcctaatgttgatgctattggaactatagttggccgcaaaggtgccaacattaagaaagtgaccagtaaattccatcctaaacgttttgatcaaaaaactggactttgggttccaatggaagagaatgttgatgttattgagtgggttgatgatccagcagaattcatttataatgctgttgctcctgctgaggttgatcaagttctctttgatgaagaagatgacaaacatgcaacagttgttgtaccagacaataagctgtcacttgctattggccgtcgtggtcaaaatgtccgtttagccgctcatttgactggctatcgtattgatattaagtctgctagtgaatttgaagaaatggaagccgagtgggcagcacaagatgaaacccaagaggctacttatgaagaggctcctgctgaggaagtttctgaactctctcaagaatttgcagcagaagatgcaaaa

SEQ ID NO: 36103 - DNA, 1227 bp, Streptococcus mutans
atgctgacatttaaactaaaaagtcaaaataatcatttagcagatagtccttttgagcttatcattgaacgtttgcccccttgctgtcaagtaaaagtgagactagatcttgatcattattataatattaatgctccaatgaatctatcttctcaggctccttggcaggcagaagctttgttttattcagatgataagggaatattagatttatcggaatctaatccttatcataacttgtccattatggagctcttttttaaaagtcaaccgatagtttgtaaaaaggcaaaattaagtcagcagttagaaagcattcccttaaatcctttttatgatttgaaaattagtatttttaaaggtcactctttattgggggagacaagcgttagacgttattatcagctgccaagcatcagttgtttagatttgaacttttcaagagccaaaggacggtttttttatgataaaacgtcttctcaacaaccagcaatcatcgtgttaagcggcagtgatggcagaattgaaaaggcacaaaacattgcgcagttattagccagtcatggttttaccacattagctcttgcttattttggtttggaaggtcttgcctctcatttagagaaaattccgcttgaaattatccaagaagccattgattatttgaaaaagtcaccctatgcggatagtatccgccttggactttatgggcgttcaaaaggagcagaatttgctcttttggcggctagtcattatgctgattttaagtgtctagtgcttaattctccttcttatctttgtttggaaggtcttaagcaatggcgcaattctaagacctcttcgtggacttatcaaggacaagaactcccttatcatccttttttgtggaaagactttttccaacgtcttattttaaaaaaagatttaaagaatattaatcatcaggctgttattcctgttgagaaaattaatggttctttattactcttagtttccaagaaggatgaagtttgggacgcttacggttctgctataactattgttaaccgactacagcagaaaagatttaaatatccctatcaagtagaaagttatgaaaattgcggtcatatgatgacggtagcctatcagcccaatcaccgttataaaaaggttgcccttgaaaaaattatggctgatacgaatgattcttggcaaaagacacttgtattttttagaaatcgttta

SEQ ID NO: 36104 - DNA, 1026 bp, Streptococcus mutans
ttgaatacaagtgactttgattttaacctgcctgaagcattaattgcccaaactccccttaaaaagcgcgacagttccaaacttttagtcgttgatcatcagaagaaaacaatgaaagatacccattttgatcatattattgacgagctcaattcaggtgatgctttagttatgaatgatacacgtgtcctgcctgcccgtcttcatggtgagaaaacagtgacacacggtcatgtagaattgctgcttctaaaaaatattcagggagatcaatgggaggttttagcaaaaccggctaaacgtcttaaggtcggcagtcatatttcctttggagatggccgcttaaaagctatcatcaaagaagaattggatcatggcggacgcattgtggaattttcttacgagggtattttcctggaagtcttagaaagccttggagagatgcccttgccaccttatattcatgaaaaattagaagaccgtgaccgttatcagaccgtttatgctaaggaaaatggctctgctgctgccccaacagctggcctccattttacagaagagctcttaagcaaaatcgaagccaaaggcgttaaactagtctatttgactctgcatgtaggactaggaacttttcgtccagtctcagttgacaatgtggaagagcaccaaatgcattccgaattctacagcctatcaccagaggctgcccaaacactaaaagatgtcaaagcaaatggcggtcgtattgtggcagttgggacaacgtcaattcgtactttagaaactatcggtaataaatttgctgggcaaattgaagcagattctggttggaccaacatttttattaaaccgggctatcaatttaaaattgttgatgctttttcaactaattttcatcttccaaaatcaactctagtcatgctagtctcagcttttgcaggacgtgattttatccttgatgcttataagcatgcggttgataaacattatcgcttctttagctttggcgatgctatgtttgtaaaa

SEQ ID NO: 36105 - DNA, 2748 bp, Streptococcus mutans
ttgtcgaagaaaagattatacgaaattgccaaggaaattggcaaagaaagtaaagaaattgttgaaaaggcaaaatcattgggcctagaagttaaaagccatgcttcaagcgtggaagaaagtgatgctaaacgtatagtagaaagttttactgtctctgtagaacccaaggctgttactccaacttctaaagttgagaaagaagccaaagcacaagaaggatctgttgcagcggaacctaaagcagctgctacaaagcctgcagggcgtccaagaccgcaaaatcgtaattttaaagcagaacgagaagcgcgtgccaaagcagaggctgaacgtcgtcaaaataatggtgaacgtcgaaaccaaaataaaggacagaacaatcgtcaaaaagacaatcgtaatcatggttcccaagatcgtcgtaatgataaccgcaataatcgcaatcgtcaaaatgacaatcgtcgcgataatcgtaatcattttcaaaatcgacaagaagcatcaaaatcccagccgacaggaccgcgttttgatttcaaagcacgtgctgcagccttaaaagcagaacaaaatgcggaatattcgcgtcagagtgaaacacgttttcatgaagctcaagaagccaaacgtcaagccgctcaagctaaagaaaaagctaagaagctaaatcagaaagagcagccgacggttgaagctgcagcaactgcagcgccacaagctcagcctcagacagttgaacaagtgacacatccagcagctgtagatacacgtcgcaaaaaacaggctcgcccagataaatcacgtgatttttcacatgagaatgaagacggaccaaaacaaaataaacataagaaaaatcggaataaacaaaaccaagtgagaaatcaaaaaaatagtaattggaataagaaaaataaaaaatctaaaaataaccgtaatcataatgccaatctgaaacctgtgactgaacgcaaattccatgaactaccaaaggaatttgagtatacagaaggtatgacggttgctgaaattgcaaaacgaattaagcgtgagcctgccgaaattgtaaaaaaactctttatgatgggagttatggcaactcaaaaccaatctttggatgctgatacgattgaactcctaatggttgattatggcattgaagcacatcaaaaagtggaagttgatacagctgatattgaacgtttcttcgttgaagatgattatcttaatccgaaaaatatggttgaacgtgcgcccgttgtaacgattatggggcatgttgaccatggtaagacaacattgcttgatacattgcgtaattcccgtatagcgacaggtgaagctggaggaattacccaacatattggggcctatcaaattgaagaaggtggaaagaaaattactttccttgatacacccggacatgcagctttcacaagtatgcgggcacgcggcgcttcggtaactgatattaccattcttattgtagctgctgatgatggtgttatgccacaaacgattgaagctattaaccactccaaagctgctgatgttccaattattgttgctattaataaaattgataagccgggcgccaatccagaacgtgtcatcggtgagttagctgagtatggcgttatttcaactgcttggggcggcgattctgaatttgttgaaatttcagctaaattcggtcaaaatattgaagaacttttagaaactgttcttctggtagcagaaatccaagaactgaaagctgacccaactgttcgtgctattggtacagttatcgaagctcgccttgataaaggaaaaggtgcagtagcgacgcttttagtacaacaaggaacgctgcatgttcaagatccaatcgttgttgggaacacatttggacgtgtgcgtgctatgactaatgaccttggacgtcgtgttaaggttgctgctccatcaacgccagtctctatcactggtttgaatgaagccccaatggcaggtgaccattttgccgtttatgaggatgaaaaggctgcgcgtgctgctggggaagaaagagctaaacgtgctctgctgaaacaacgtcaattgactcatcgtgtcagtcttgacaatctctttgatacgctcaaagccggtgaggttaaatctgttaatgttattatcaaagcagatgtgcaaggttccgttgaagctcttgcagcctctcttttgaagattgacgttgaaggtgtgaaagttaatgtggtccactcagctgttggtgccatcaatgaatcagatatcaccttggcagaagcttctaatgctgttatcattggtttcaatgttcgcccaactccacaggcccgtcagcaagccgaagcagatgaagttgaaattcgtttgcattccattatttataaggtaattgaagaagtagaagatgccatgaaaggtatgcttgatccagagtttgaagaaaaaattattggtgaagcgcttattcgtgagaccttcaaagtttctaaagtgggaactattggcggcttcatggtaacaaatggtaaaattacgcgtgattcaagtgctcgtgttattcgtgatggtgtggttgtctttgacggtaagctcgctagtttgaaacattataaagatgatgttaaagaggttggtaatggtcaagaaggcggtctcatgattgaaaattacaatgacatcaaaattgatgatactattgaggcttacattatggaagaaattaaaaga

SEQ ID NO: 36106 - DNA, 1086 bp, Streptococcus mutans
atgggaaaaagacttttaatattagaagatggaacaatttttgaaggacaggcttttggagcagaccttgatgtaaccggtgagattgtctttaatactggtatgacaggttatcaggaatctatcactgatcagtcttacaatggtcagattttgacatttacctatccgcttgttggcaactatggaattaatcgtgatgattatgaaagtattaaacccacttgtaagggagttgtcgtttcagaaaatgcacgtcgggctaataattggcgcaagcagatgaccttggatgaatttttgaaatcaaaaaacattccaggtatttctgggattgatacacgagcactgaccaaaattattcgtcatcatggaacaatgaaggcaactctggctaatgagggtgactctattgagcatctacaagatcaattacgtgcgactgttcttccaacaaataatattgaacaggtatcaactaaaaccgcttatccagctccgggtgttgggaaaaatattgttttggttgatttcggactgaaacattctatcttacgtgaattttcaaaacgtaattgtaatgtaactgttgttccttataatacgacggctcaagagattttaaatttaaacccagatggtatcatgctgtcaaatggaccgggaaatcctcaagatgttccggaagctttagagatgattcgcggtgtacaaggtaaaattccaatttttggtatttgtatggggcatcaactttttagtttggcaaatggtgccagtacctacaagatgaaattcggtcatcgtggttttaatcatgcggtgcgtgaaattgcaacaggacgtattgattttaccagtcaaaatcatggttatgctgtttcgcgtgataatttaccagaggagcttattattacgcacgaagaaattaatgataaatcaattgaaggtgtacgtcatcgatactaccccgctttctctgttcagtatcatccagatgctgcgccgggaccacatgacgcttcttatctctttgatgaatttttagaattaattgatgcttttcaattggaaaaagctagcaag

SEQ ID NO: 36107 - DNA, 3177 bp, Streptococcus mutans
atgcctaaacgtacagatattaaaaaaattatggtaattggttctggtccaattatcattggacaggctgctgaatttgattatgcaggaacccaagcctgtcttgctttaaaagaagaaggctatagtgtcgttctggtcaattcaaacccagcgacaatcatgacagataaagaaattgcagataaggtctatattgaacctatcactattgaatttgtaactcgaattttaagaaaagaacgtcccgatgcaatactgccaactcttggtggacagacaggtcttaatatggcgatggaattatcaagagctgggattcttgatgagttgggtgttgaacttttaggaaccaagctgtctgctattgatcaggctgaagatcgcgatcttttcaagcaattgatggaagatttagaacagcctattccagaatctgatattgttaatagcgttgacgaagctgttgcatttgctgctaagattggctatccagtcattgttcgtccggcatttacgcttggcggcacaggcggcggtatgtgtgcagatgagaaagaacttcgtgaaattgctgaaaatggtctcaaactgtcacctgtaacgcaatgtctgattgagcgttctattgctggctttaaggaaattgaatatgaagttatgagagacagtgcagataatgctctggttgtctgtaacatggaaaattttgatccagttggtattcatacaggggattctatcgtttttgcgccaacgcagacactttcagatatcgaaaatcaaatgctgcgtgatgctagtttaaaaattattcgtgcccttaagattgaaggtggttgtaatgtacagctggctctggatccgcatagctttaaatactatgtcattgaggttaatccacgtgtctcacgttcatcagctctagcttctaaagcaactggctaccctatcgctaaattagctgccaaaatcgctgttggtttaactctggatgagatgattaatccagttacggggacaacttatgccatgtttgaaccagctttggactatgtagtggctaagattccgcgttttccatttgataaatttgaacatggtgaacgtcgtcttggaacacagatgaaggcgactggtgaagtcatggctattgggcgtaatattgaagaaagtcttctcaaagcttgccgttcccttgaaatcggtgtttaccataatgagatgccagagcttaccaatgttagtgacgacgctttggtagccaaaattgttaaggctcaagatgatcgtcttttctatctttctgaagccattcgtcgtggatattccattgaggaactgtcggatttaacaaaaattgatcttttctttcttgataaactcttgcatatctttgaaattgaaacagaattagcagccaaggttggtgatattgctattcttaaagaagctaagcacaatggttttgctgatcgaaaaattgctgatatctggcagatgacagcagacgctgttcgcaagcttcgtcttgacaacaagataattcctgtttataagatggttgatacttgtgcggctgaatttgaatctgcaacaccttatttctactcgacttacgaatgggaaaatgagtccatcaaatcagaaaaagaatccgtcattgttttgggttcaggtccgattcgtatcggacagggagttgaatttgattatgcgacagttcattctgtcaaagccattcaaaacgcaggttatgaagctattattatgaattccaatcctgagaccgtttcaacagatttttcagtttctgataaactttattttgaaccgctaacttttgaagatgttatgaatgtaattgagttggagcaacctaaaggtgtcattgttcagtttggcggacaaacagctatcaacttggcagaaccattatcgcatgctggtgtgacaattctgggtacgcaagtagctgatcttgaccgtgcagaagaccgtgatcttttcgagcaggctttaaaagatttaaatattcctcagccgccgggacaaacagcaacaaatgaagaagaggcggtcgcttcggctcgtaaaattggttttccagtgcttgttcgcccgtcttacgttcttgggggacgtgctatggaaattgttgaaagtgaaaacgatttacgctcttacatgcgaacagctgtaaaggccagtcctgatcatcctgtcttggttgattcttatttagtcggcagtgaatgtgaggtagatgccatttctgacggtaaggacgttcttattcccggcattatggaacatattgagcgtgccggtgtccactcaggagattctatggctgtctatccaccacaaactctttcaaaagaagttcaggcaaccattgcagattatacaaaacgcttggctatcggactaaactgtatcgggatgatgaatattcagtttgtcatcaaagacgaaaccgtttatgttattgaagttaatccgcgtgccagtcgaacagtaccgtttttatctaaagtgacagatataccaatggcacaaattgctactaaattgattttaggaagcagtctgactgaacttggctataaggatggcctttatccagaaagtcaaaatgttcatgttaaagctccagtcttttccttcaccaagttagctaaggttgacagtcttttaggacctgagatgaaatctacaggcgaagtcatggggactgattcaactcttgaaaaagcgctgtataaagcttttgaagcgtcttatttccaccttcctgcttttggtaatgtcatttttactattgctgatgatactaaagaagaagcattggcgttagcacgtcgcttctcaaatattggttacagtattttagccacggaaggtaccgctaaattctttgcagaaaacaatttagaagcagtccttgttaataaattgggtgaagatgatgacaatgacattcctgcctatgttcgatctggtaaagtacaagctattattaatacagttggcaacaaacgtacctttgatgaagatggtgcggctattcgcagctctgccattgaacatggtgtaccactttttactgcgcttgacacagcagatgccatggtaagggttcttgaaagccgaggttttattacacaagctata

SEQ ID NO: 36108 - DNA, 699 bp, Streptococcus mutans
atgaaaactattaaagtaaaaaataaaacagaaggtagtaaagttgcttttagaatgttagaagaagaaataacattcggtgctaagactctggggctagcgactggtagcacccctttagagctctataaagaaataagagaatctcatttagacttttcagatatggtatctattaatcttgatgaatatgttggtttgtcagccgatgataagcagtcttatgcttattttatgaagcaaaatctttttgctgctaaaccttttaaaaagtcttatttgccaaacggactggcagcagatttagcaaaagagacagagtattatgatcaaattcttgcccaatatcctattgatttacagattttagggattggccgcaatgctcacattggttttaatgagccagggacagcattttcaagtcaaacgcatctagttgatttaacaccgtctacaattgcagctaatagccgtttttttgaaaaagcagaagatgttccaaaacaagctatttctatgggactggcctctattatgtctgccaagatgattttactaatggcttttggtgaagaaaaagcagaggctgttgctgcaatggtaaaaggccctgtaacagaagaaataccagctagtatactgcaaacacatcctaaggttattttgattgttgatgaaaaagcaggagcaggaatt

SEQ ID NO: 36109 - DNA, 1299 bp, Streptococcus mutans
atgccaaaaagaaaagagaaaatgaccagaaagaagaaaggctggattattggcggtagttttgcagctattttgatagtattaggccttatttgggctagattacagcaaataagccaaacatcatcaaataatgttggttatcaaacagtcaaagtcaaagaaggaacgattgcctcttcaactttgctgtcaggaactgttaagtctgaatcggaacagtatgtctattatgatagtaacaagggaaccaatcctaaggttatggtgtctgcaggagatcaagttactgctggtcaacaattggttcagtatgataatagtactgcgcaagcagcttatgatcaagcagtcaggaatctagataaggttaaccgtcaaattacaaattataaaacttatggtacgctgccatcacaagatagttcttatgacagcggatccaacgtaggaaattctagcagtaattctggcagtggaaatagcaattcttttaatagtggctataatatgaataatacgaatgcgctgggaagttcaagtgccgctgctattaccccagtaaactctgtatcatcagatcagcagctgcaagatttgtatgatgcacaagccaatgcacaagatgaagttaataaggctcaaaaagctctagatgatacttcggttaatagtgaggtgacaggaacagttgctgaagttaataatgatgttgatccctctggtaaaaccagcaaagctcttgttcatattaccagtgaaggtaaattacaaatccaaggcaccttaactgaatatgacttggctaatatcaaagtgggccaagaagttagcattaaatctaaggtttatggtaataagaaatggtcaggaaaaatttcttatatttctaattatcctaatcaggatcaaagcagtcagtctcaagcggctgattcatctggaagcggctcttcttcaaattcagccgcttataactataaagttgatttgacaagtgatataggagacttaaaacaaggcttcacggtatctgtagaggtagtcaatggcaataagagtctagttattcctaattcagcactggttacaaaagacaataaaaactatgtctgggtttatgataaaacgaattctaaagttttgaaaaaagaggttgctgttggaaatgctgatgctaaatcgcaagaaatttcatctggtcttgataaaggacaaactattatttctaatccagataagaatttaaaagaaggcaagaagattgaaaaaccttctagtaaggctaatgaaaagagg

SEQ ID NO: 36110 - DNA, 693 bp, Streptococcus mutans
tgggacttttacagaatggaaagtggggagatctttgaataagcggacggtgtcattgctgactctgaactgcatagcgattacctttaccaaatctacttggctgcgtatcctgattattccggataggtaatggtgccagtcctttgggataaacagactaagaccattgtcaacaatgaaatctaccgaaatcatgcgtatgcttaacattgcctttaatgacatcacagacaatactgaggattactcccccaaccggactacaggctaacattgatgtcatgaatgattttatttatcctaatatcatggggattacaaggcaggctttgctacttctcaggaagtttatgaagaagaggcgcaaactctctttgctgcgctggataaacatgaaaatctccttagtcagaatgattggctggtgggcaaacgtttcaccgaagtggatatcggtctcttcacaacacttgtacattttgactctgtttattatagacatttcaaatgcaatctccgccacctcgttgactatctcaatcactggaatcacaccaagcgcatttacaatatctctagcattgctactacggttaactttaagcatattaaaaacattactacggcagccacaagaccatcaatcttacaagtatcgtttctgtcggaccagatttgggttggtatctt

SEQ ID NO: 36111 - DNA, 2226 bp, Streptococcus mutans
atgagtgaagaagtatttttgatagatggcatgacctgtgcctcttgtgccatcaatgttgaaaatgccgttaaaaaactagacggtattgaaagcgcagtagtcaatttgacaactgaaaaaatgacgatagattacgatgccgctaaggttagtgaagcagatgttactaaggcagttgctggtgcaggctatggcgctaaagtttatgacccaacgacggctgaaagtcaggaggatcgtgaagaacataagttagcaggtattaaaaaacgtcttttgtggacttctatttttaccattcccctcttttatattgctatgggaagtatggttggcttgcccttacctaactttttagcaccaagcagtgctccgctcacttatgcgatggttttgcttcttttgacaattccggttatcgtgttaagttggagcttctatgacaatggttttagatcgctttttaaaggtcatcctaatatggactcattagtgtccttagcaacaacagcggcgtttctttacagtctttatggaacttaccatgtttacttgggacatacacatcatgctcaccatctctattatgaatcggtagctgttattttaactctcattactttagggaaatactttgaaaccctatcgaaaggtcgaacctcagatgcaataaaaaaattaatgcatttgtctgctaaagaggctactctgatacgtgatggcgaggagattaaggttcctattgagcaagtgcaaatcggagataaaattttagtcaaacccggtgaaaaaatacctgtggatggtcgagtcctgtcagggcattctgctattgatgaatccatgttaacaggggaatctattcctattgaaaaaatggcggatagccctgtttatgccgggtcaatcaatggtcagggaagtctgacttttgaggctgaaaaagttggcaatgaaaccttgctttcacaaattattaaattggttgagaacgctcagcaaactaaggcacccattgccaagattgctgataaggtatctgctgtctttgtacctgttattataacgattgctattttgactggtctcttctggtattttgtcatgggacaagactttaccttttcaatgacaatcagtgtcgctgttcttgtcattgcctgcccttgtgctttgggtcttgcaacgccaacggctattatggttggtacaggtcgtgctgctgaaaatggaatcctttataaacgtggtgatgtcttggaattggcgcatcagattaatacaattgttttcgataaaacaggcactattactcaaggtaaaccagaagttgttcatcaattttcttatcatgatcgaactgatttagtgcaagtgacagcttccttagaagcattatctgaacatccccttagtcaggccattgttgattatgctaaaaaagaagggactcgtttacttgcagtggaagactttacttctctaacagggctaggactgaaaggctgtgttgctgatgaaactttgcttgttggtaatgaaaaattgatgcgtcaagaaaatatctctctagaacaggctcaagcagattttaaggcagcaacagctcagggacaaacacccatttttgttgccagtgatggtcaattgttaggactgattacgattgcggataaggtaaagaatgacagtgcagcagcaattaaagctttacagaatatgggggttgaagtggccatgctgacgggtgataatgaagaaactgcgcaggctattgccaaagaagtggggattacttttgttatcagtcaagttttgccgcaggaaaaaacacaggccattcttgatttgcaggcggaaggcaagaaagttgccatggttggagacggtattaatgacgctccggcacttgcgacagcagatattggcatttccatgggctctggaacagatattgccatggagtccgcggatattgtcttgatgaaacctgcaatgcttgatattattaaggcactgaaaattagtcgtgctactattattaatattaaagaaaatcttttctgggcatttatttataatgttctgtcagttcctattgctatgggagtactttatctctttggcggacctttgctggatccaatgattgctggtctagccatgagctttagctctgtttctgttgttctaaatgccctgcgtcttaaagttgtaaaatta

SEQ ID NO: 36112 - DNA, 714 bp, Streptococcus mutans
atgcgtttaggtaaattactcggtcaggctggttttggctcacgaggtcaggtgaaaaagttcattcgcagccaacaagtacgcgtggatgacgaacttgcaagaacaggcaatcaaaatgtggatcctaatttacagaccatcaccgtgtcaggtaagcagctgagctattctcctcatgtctattatattcttaataagcctgctggtttggtatcggtggtgcgagaccagcactatcagacggtgattgatcttattgctgtggttgatcgtagagaaggactctaccctgtcgggtgtctggatcgcgacaccgaagggttggttcttatcaccaacaacggtccgctgggttttcgtttgctccaccccaaataccatgtggacaagacctattatgttgaggtcaatggtgatctcggtattgatgcgattgctttttttgacaatggcatagcttttttagatggtaccgtttgtaagccagctaagttacagattatcagttctagttcagaagtcagtcgtgcctatattacgattaccgaagggaaatttcatcaagtcaaaaaaatgtttctggcttatggtgttaaagttacctacctcaaacgaatctcttttggaccttttgaattgggtgatttgccagttggagagtatcgggagctgacggccgaagagaagaacagccttagaaattatttgaat

SEQ ID NO: 36113 - DNA, 273 bp, Streptococcus mutans
atggcagtaaaaatccgtttgactcgtatgggttctaaaaagaaacctttctatcgtatcaacgttgcagattcacgtgcaccacgtgatggtcgcttcatcgaaacggttggaacatacaatccgcttgtaactgaaaatcaagtgactctcaaagaagatcgtattcttgagtggctaggcaatggtgctcaaccatcagatactgttcgtaacatcctttcaaaagctggaattatgcaaaaattccacgaagctaaatactcaaagaag

SEQ ID NO: 36114 - DNA, 966 bp, Streptococcus mutans
atgaaggcagtttatattcaaaaaacgggaggacccgcaacgattattgttggttcattacctgttcccaaagttagaccgaaatctgttttaataaaagttatagccgcttctattaattatgttgacctctttattcgttcaggtatttatcagacagatctgccgaatccttatattttgggtcgagatgctatcggccaagttgttgagattggaaaagatgtgattcagtttaaagtaggcgattgcgtttggactaatagtatgggctatgatggaaggcaaggtatcactagcgagtatgcattaattccagaagagcgcctttttcttactcccaagaatgctgactctttaaaattaattggtgcagtgcactcggcagcaacggcaactatcgtattacaagatatcatggaattgaagccaaaacaaaaactccttattgaaggagcagctggccatgtgggaagtaagttggtttatcttgctaatgaaatgggggcagaggtggtaacaaccgctagtttaaaggatttttcaagattaaaacaattgagcgacgctatctgttttgattatcgtgataagtcactctttaagaaactaaaaagcgcttatcctgatggtttcgaccacattattgacacttctggggaaattcccttacagtttaattgcgatttacttgccccaaaaggtgtcattagtttaattacagcaccgaaagacagtcaatttgatagcagacagttttatatgaactgtcagcaaatgaaagggtttgtgattagtcacgctagtttgaagcaactgaaaaaagcaggaagaattttaaatgatgcttttaggcaaggacaattactggaggaagacatggttatcaaaaaatttgacaaagccgcagaagcgcatgatttgatggaaactaaaaaagaaaatagaaaaatcatcttagttcct

SEQ ID NO: 36115 - DNA, 516 bp, Streptococcus mutans
atgaagtattttaatgttggaaagattgtcaatacgcaaggacttcgaggagaagttcgtgttttatctgtgactgattttgcagacgaacgctttaaaaaaggaagtcagctggctctttttgataaaaaagatcactttgccatgactgttgagattgccagccacagaaaacataaaaattttgatattgtcaaatttaaaggactctatcatatcaatgatgttgaaaaatatcgtgatttcaccctcaaagttactgaagatcatctggcagatttagaagatggtgaattctattatcatgaaatcattggacttgatgtttatgagaatgatatcttgattggacaggtcaaggaaattttacaacccggtgccaatgatgtttgggttgttaaacgcaaaggaaaaaaagatctgcttttgccttacattccttcggttattttaaaggttgatgtaccaaatggccgtattgatgtgactgttttagaaggattggacgatgaaaat

SEQ ID NO: 36116 - DNA, 1149 bp, Streptococcus mutans
gtgacgacatacattaaagcaaataagttttattatccttatgaaacaaaattgggtggttatttagaactagttgatgattcttttggaaaatggctgagcactgttccagaaggtgctcaagtacttgattattcaggatatgaaattgcgcctggacttgttgacacacatatccatggctttgcaggagccgatgtaatggataataaagaagaatccttagcgacaatgagtcgagaattgctctcggctggtgtgactagttttttaccaacagggctaacagcttcctttgaaactttaaataaagtctgtcaaacgatagccaaatttgcaggtaaggaaacgggtgctcgcattcaaggtctgttctttgaaggtccttatttcactgaaaagtataaaggtgcgcaaaatccttcttatatgcgaaatccctcaactagtgaattggatcagtggttagcaagttccaagggactcttaaagaagattgcccttgcacctgagcgtgaaggaacagctgaatttatctcttatgcatgcaagcgaggagttgttgtggctttaggacattctgatgcaacctatcaagaagctgttgaggcagttgaagctggtgcctctgtttgggtgcatgcttataatggtatgcgggggctcaatcatcgtgaaccgggtatggtcggagctgtttatgacattcctaatacttatgccgaattgatttgtgatggttaccatgtgcatacttgtgcttgtgacattcttctgcatcaaaagcgacctgatcatgtggttttgattacggattgtatgtcagctggcggtcagcctgatggaaattacatgttgggagaataccctgttactgttgaaaatggcactgctcgattgaaatcaaatggtgccttggcgggttctattttgcaattgaaagatggtgtcaaaaatattgttgattggggccttgtctctaaagccaatgccattatgatggcaagtcttattccagctatatctgttggtatagatgaagtttgcggtcaaataaaagaaggacacctagcagattttatcgtgttggataaagagatgaacttacgcgcaacttatttagcaggtaaaaaagtttatgaatgtcaa

SEQ ID NO: 36117 - DNA, 720 bp, Streptococcus mutans
atgaaaattgatattttgactctctttccagagatgtttgctcctttggaacattcaattgttggtaaggcacagacaaaggggcttttagaaattaactatcataattttcgtgaaaatgcagagaaggctcgccatgtagatgatgaaccttacggtggcggtcaagggatgcttttgcgcgctcagcctatttttgatacttttgataaaattgctgctaaaaaaccgcgtgtcatacttttagatccagcgggccagcaatttaatcagtcttatgcagaagatctggctcaagaaggtgaacttatttttatctgcggtcactatgaaggatatgatgagcgtattaaaactttagtgactgatgagatttctttaggggattttattttaacaggcggcgaattggctgctatgacaattattgatgcgacagtcaggctgattccagaagttatcggtaaagaagcgagtcatcaagatgatagtttttcgtcaggtctcttagaatatcctcagtatacacgtccttatgaatataggggaatgaaggtccccgatgttctcctgtctggacatcatgaaaatattcgcttatggcgtctagagcaaagcttacgtaagacatgggaacgtaggcctgatctgctagagcattatcagtttactcaggaagaaaagcaacttttggaaaaaataaagagtgagggatcaagc

SEQ ID NO: 36118 - DNA, 996 bp, Streptococcus mutans
ttgacatctgaaaaagagatttatgatataaccgttatcggtggcggaccggttggtctttttacagctttttatgctggtttgcgtggtatttctgtaaaagtgattgaaagtttatctgagcttggtggtcaaccagccattttatatccagaaaaggtgatttatgatatcccagcctttcctgctattactggagcagatttggtagataatctgattgaacaattggagcgctttaaggataaaacgactatttgtttaaaagaagaagttaaaacatttgaaaaagagaatgctatttttacaattacaacaaataaagggaatcatttttcgaaagccattattattgcttgtggaaatggtgcctttgcgccgcgtcgattgggcttggacgatgaggaacgttatgcagaccataatctcttttacaatgttcacaaactagaccaatttgctggtaaaaaggttgttatttgtggtggcggcgactctgctgttgactgggctaatgctctggataagattgctgaaagtgtcacattggtacaccgtcgtgatgcctttcgcgctcatgaacatagtgtagaagttctgaaaacttctcatgttaatatcatgacaccttacgtaccgcttgagttaaaaggagaaggtgatgaagcaaccagtcttgtgattcaaaaggtcaaatcagaagaaaccaaagagttgtcacttgattcgcttattgttagttttggattttcaacctccaacaaaaacctcaaaagttggaatattgattataagcgttcaagtattaatgtatctcctctttttgaaaccagtcagacaggggtttttgctattggagatgctgcagaatatgaaggcaaaattgatttaattgcaacaggatttggagaggcaccaacagcagttaaccaagccatcaaatacatttatcctgagcgtgataatcgtgtcgttcattccacatcattgataaaa

SEQ ID NO: 36119 - DNA, 909 bp, Streptococcus mutans
atgatttatacggtaacccttaatccttctattgattttatcgttcgtattgatagtgtaaaaatcggcagtgtcaatcgtatggatagtgacgataaatttgttggaggtaaagggattaatgttagtcgtattcttaagcgtttaggacaggataatacggcgacaggttttattggcggttttactggtaggtttgttgaggaaggattgattgctgaaggaatcaagactaactttgtccatgttaatcaagataccagaattaatgtcaaaattaaggctgatcaagaaactgaaattaatggtacaggccctgtcattacaaaagaacaagttttagctttagagaacatcttacagcaactttcacaagacgatacagttgtttttgcaggcagtgcaccgtccaatttaggaaaccaaatttatgaacgcttgattccgttggtgagacaaacaggagcgcaaattgtttgcgattttgaagggcaaactttattggatgctcttgactatcaaccgcttttggttaaaccaaataatcatgaacttgaagctattttcaaggtaaacttaaacggtattactgatgttgaaaagtatgcccgccaaattcttgctaaaggcgcacaaaacgtcattatttcaatggcaggagatggcgctttattagtaacatcagatgcgacttattttgctaaaccgattaagggacaggtcagaaattctgtcggtgctggtgattcaatggttgctggttttactggtgaatttgttaagtcagctaatcctcttgaagctctcaaatggggagtggcttgcggtacagcaaccgctttttcagatgatttagccagtattgattttataaaagaaacatatgaaaaagtagaggtagaaaaatta

SEQ ID NO: 36120 - DNA, 1965 bp, Streptococcus mutans
atgaagattcaggacttactgaacaaggatgtcatgttgcttgacttgcaggcaacaactaaagaagctgctattgatgagatggtttctaagttagtcgaacaaggtatcgttactgattttgatacttttaaggctgggatcatgaatcgtgaagttcagacttcaactggccttggtgatggtattgctatgcctcacagtaagaataaggctgtaaaggaagcaacggttctttttgccaaatcaaataaaggtgttgattacgaggctcttgatggtgaacctgttgatcttttctttatgattgcggctcctgatggtgctaatgatacgcatttagcagctttggctgaattatcacaataccttttaaaagacggctttgctgataagttgcgtcaggtaactaatcctgatgacgttatcaatctttttaatgcaacagaagaagaaaagaaagaagcgacacctgctgctccagtggctgatagccacgattttcttgttgctgttacagcctgtacaactggtattgctcacacttatatggcagaagaagcgctgaaaaagcaagccgctgaaatgggagttggcatcaaggttgaaaccaacggtgcctcaggtgttggcaataaattgactgctgatgatattaagcgtgctaaaggtgttattatcgctgctgacaaggcagttgaaatggatcgttttaatggtaaacctttgatttcgcgtccagttgctgagggaattaaaaaacctgaagaattaatcaatattattcttgatggtaaagctgaagcctatgttgctgacaactctgatcttagcagtgaagcatcatcaagtgaaaaagctggtcttggaagtgccttctataaacacttgatgagtggggtttcacaaatgcttccattcgttatcggtggcggtatcatgattgctttgtcattcttgattgaccaattcatgggggttcctaagtcttctcttagtcacttggggaattaccatgaaattgcagctattttcaatcaagtcggtaatgctgcttttggctttatgattccagtctttgctgcttatattgcttattcaattgctgaaaagccaggtttggtagctggttttgtagctggcagtatggcaacaacaggtcttgctttcaataaggttgctttctttgaatttggtgaaaaggctagtcaagctagtttaactggtataccttctggcttccttggcgctcttgcaggtggtttccttgcaggcggtgtcattcttgtcctcaagaaagcccttgcctttgtacctcgttctcttgaaggtataaaatccatccttctctatcctttgcttggtgttttggtaactggtttcctcatgctttttgtcaacattccaatggcagctatcaatacagccttatataatttcctcggcaacttatcaggtggttcagcagttcttttaggacttattgttggtggtatgatggcgattgatatgggcggaccttttaataaagcagcctatgtttttggaacaagtactttaacagcagcagctcttgctaagggtggttcagttgtcatggccagtgtcatggctggtggtatggtaccgccgcttgcagtttttgttgcgactcttctttttaaaaataaattcactcaagaagaacatgatgctggtttaacaaatattgttatgggcctttctttcattactgaaggtgccattccatttggtgcaggagacccagcacgtgccattccaagtttcattgttggttcagcggttactggtgccttggttggtttaagcggtattaaattaatggcgcctcatgggggtatctttgttattgctttgacaagcaatcctttgctttacctgctttatattgctgttggagcagtgattgctggtattctttttggaagtcttcgtaaagtaaga

SEQ ID NO: 36121 - DNA, 1860 bp, Streptococcus mutans
gtgaccatgtccagattgctggataaactaaagacagatattttagtggctgatggagctatggggactcttctctatgcagatggtttagaatcctgccatgaatattataatatcagtcatcccgagcgaattttggctattcatcaagcttatattgcagctggagcagacatcattcagaccaatacttatggtgctaaaagacatcgtttaaaaagttttggtcacgataaagaagttaaggcaatcaatcaggcagctgttcatctggcccgtcaggcagctggtgacaatacctttgttttaggaacaataggtgcttcacatggccttaaacattgtgaactgtccttggaagacattatttctcagactgtagaacaggctcggtttcttttggaaacgaagcaaattgatggtttgctcttagagacttactatgatatagaagaacttgaggctgctttaaaggccttgaggcctttaacagacttgccgatcattacgaatgttgcccttcatgaaccgggaattactgaaaatggtcgacctttagtggaagcttttagtaacttggtaatgttgggagccgatatcgttggtttgaactgccatttgggaccttatcatatgatccaatctttcaagcaagtaccactgtttgcgcagagttatttatcagcttatcctaatgccagtctgttatctttttccagtgatgataatgagaccccttaccactttagccagaatgcagactattttgagtattgtgctaaactttttgttgaagaaggggtccgcctcattggcggctgttgcggaacaactcctgaacatatcaaagctataaaacgtggtattcgaggacttaaaccaattgagcgaaaagtgacgacacctttgattagtcaagaagacttgatttatgaagtggagaaaaaagaaagtctggttgacaaagttaaaaaagggatcaccattattgctgaaattgatcctcctaaaaccttggccgttgacaaatttgttgatggtgtcaaagccttagacgaaaaaggtattgcggcgattaccttagcagataattctcttgctagaacgcgtatttgtaatctcagcatggcgtcaatgctaaaggatgagattgcaacacctttcttacttcatttgtcctgtcgcgatcataatatgattggactgcagtcacgccttttgggcatggatcttttgggatttgatcatattcttgccatcacaggagatccctcaaaaattggagatttcccaggagctaccagtgtttatgacgctaccagtttcaaattgctgtctttgattaagcaactcaatcagggtcatggttacagcggtgctagtcttaaaaaagcgacccattttaccgttgctgcggcttttaaccctaatgttaaaaacttaagcagaacaggaaggttaattgagaagaaggttgcagctggagcagattattttatcacacagcctgtttttagcgaaacagtcatacaagagttaagtgaagttactaaaccttatgaacagcccttttttgttggtattatgccgatcacttcttataataatgctgttttcttacataatgaagttccgggaatcagtttatcagaatcttttctggcaaaattagaagcggttaaggatgataaagaaacctgtcagaaagtagctttagctgaaagtaaaaaattgatagacgcaattctggctcattttaatggcatttatctcattactccttttttacgttatgatttgacagtagaattaattgattatattcaagtaaagacagcaactgttgctaaaaagagaact

SEQ ID NO: 36122 - DNA, 2616 bp, Streptococcus mutans
atgaaacaattaacatcagctcaagtccgccaaatgtggttagatttttggaaatcaaaggatcatgctatcgagccgtcggctaatctcgtccctgttaatgatcccacactgctgtggattaattcaggtgtcgcaacgctgaaaaaatattttgatggttctgttattcctgaaaacccacgcattaccaatgcgcaaaaggccatccgcactaatgatattgaaaatgttggaaaaacagctcgccatcatactatgtttgagatgctgggaaatttttccgttggagattacttccgtgatgatgctatcaaatggggctttgaacttttgactagtcctgaatggtttgacttaccaaaagataagctctatatgacctactatccagatgataaggattcttacaatcgctggattgaatgcggtgttgacccaagtcacctgattcctattgaagataacttctgggaaattggcgctgggccttcaggaccagacacagaaattttctttgatcgtggagaagattttgatccagaccatattggtgtgcgcctcttggccgaggatattgaaaacgatcgctacattgaaatttggaatatcgtgctttcgcaattcaatgctgatccagctgttcctcgttctgaatacaaggaattgcctcataaaaacattgatacgggtgctggcttagagcgcttggttgcggttatgcaaggggcaaaaactaattttgaaacggatcttttcatgccaatcatccgtgagattgaaaaactatctggtaaaacgtatgaccaagatggcgacaatatgagcttcaaggtcattgcagaccatattcgttctctctcatttgctattggtgatggtgcccttccgggaaatgaaggccgtggttatgtccttcgccgtctccttcgtcgtgcagttatgcacggccgtcgtttaggcatcaatgaacccttcttgtataaattggttccaactgttggtaagattatggaatcctactatccagaagtgcttgaaaaacaagattttattgaaaaaattgtcaaacgtgaagaagagacctttgcacggaccattgatgcgggctcaaacatgttagatcaacttttggctgatttgaaggctgctgataaagatacgcttgaaggaaaagatattttcagactttatgacacttatggcttcccagtagaattgaccgaagaattggcagaggatgcaggcttcaagatagatcatcaaggcttccaagctgctatgaaagaacaacaagaacgtgcgcgtgccaatgttgtcaaaggcggctccatgggtatgcaaaatgaaactctgtcaaacattaccgaaaaatctactttcaattatgaaaaagaagcacttgacagcagtctttctgttatcattgctgacaataagcgtatagaagcagtatcagaaggccaagttctgcttgttttttcggagacaccattctatgctgaaatgggtggacaagtagctgaccatgggcttatcaagaatgataagggagacactgttgctcgtgtgacagatgtgcaaaaagcgccaaatggtcaagcccttcatacagttgatgttttgggcagcttgtcagtagggacaacttatcatctagaaattgatcatgaacgtcgcaaccgggtcatgaaaaatcatacggctactcatcttcttcatgcggcgctgcacaatgtcattggcaatcacgccactcaggcaggttctctaaatgaagtggaattcttgcgctttgactttacccattttgaagcggtaacgccagaagagctccgtcaaattgaagaagaagtcaaccaacaaatctggaaggctattcctgtgacaaccattgaaacagaccttgataccgccaaggaaatgggtgccatggctctctttggtgaaaaatacggtaaaaatgtgcgtgtggtttctatcggcgactattctgttgaactttgtggtgggacccatcttaaaaatacttctgaaattggcatcttcaagattgtcaaagaagaaggtattggttcaggaactcgccgtatcctagctgtgaccagtaaggaagcctttgaagcctaccgccaagaagaagacatacttaaagaaattgccacaacgcttaaagcgcctcaaatgaatcaggtagccaacaaggtagcttcgctgcaagaccaattgcataaattgcaaaaggagaatgccgagctgaaagaaaaagcagccgcagtagccgcaggcgatatcttcaaagatgttaaagaagtgaatggtcttcgctatattgcgagccaagtagaagttgccgatgcgggtgcccttcgcacctttgctgataaatggaaacaaaaagattactccgacgttcttgttttagtggccagcattggtaaaaaggtcaatgttcttgttgccagcaagtctaaggatatccatgctggtaatctcatcaaggctttggcaccaatcgtttcaggtcgcggtggtggaaaaccagacatggccatggcaggtggctcagatgcctcagccatcaaagatttgattgccgcagtagcagagaatttg

SEQ ID NO: 36123 - DNA, 1608 bp, Streptococcus mutans
atgcaaaaacattggtggcacaaggcaactgtttatcaaatttatccaaaatcttttatggatacaaatggtgatggaattggtgatctcaaaggcattacgagtaaattggattatttgcaaaagttaggggttatggctatttggctatctccagtttatgatagccccatggatgacaatggctatgacattgcgaactatgaagcaattacggatatttttggcaatatggctgatatggataatttgctgacgcaggcaaaaatgcgcggcataaaaatcattatggatctagtggttaatcatacctcagatgaacacgcttggtttattgaagcacgtgagcatccagacagttctgaacgcgattattatatttggtgtgaccagccaaatgatttggaatctattttcggtggttctgcttggcagtatgatgataagtccgatcaatattatttgcatttttttagtaagaagcagccagatctaaactgggaaaacgcaaacttacgtcagaagatttatgatatgatgaatttctggattgataaaggtattggcggctttcggatggacgtcattgatatgattgggaaaattcctgctcagcatattgtcagtaacggaccaaaattgcatgcttatcttaaggagatgaatgccgctagttttggtcaacatgatctgctgactgtgggggaaacttggggagcaacgcctgagattgcgaagcaatattcaaatccagtcaatcacgaactctctatggtttttcaatttgaacatattggtcttcagcataaaccagaagctcctaaatgggattatgtgaaggaacttaatgttcctgctttaaaaacaatctttaataaatggcagactgagttggaattaggacaggggtggaattcgttattctggaataaccatgacctgcctcgtgttttatcaatctggggaaatacgggcaaatatcgtgagaagtctgctaaagcactggctattcttcttcaccttatgcgtgggacaccttatatttatcaaggtgaagagattgggatgaccaattatccctttaaagatttaaatgaacttgatgatattgaatcccttaattatgctaaggaagcttttacaaatggtaagtctatggaaactatcatggacagtattcgtatgattggccgtgataatgccagaacacctatgcaatgggatgcttctcaaaatgccggattttcaacagcggataaaacatggctgccagttaatccaaactataaagacatcaatgttcaagcagctctgaaaaattccaattctatcttttacacctatcaacaactcattcagcttcgaaaagaaaatgattggctagtagatgccgattttgaattgctccctacagcggacaaagtatttgcctatttacgaaaggtaagagaagaaaggtatcttatagtggtcaatgtttcagatcaggaagaagttctagagattgatgttgacaaacaagaaactctcattagcaatacaaatgaaagcgctgctcttgccaatcacaaactccagccttgggatgctttttgtattaagataaac

SEQ ID NO: 36124 - DNA, 1185 bp, Streptococcus mutans
ttgtgttctaaaaatgtcgtactttctattcgttttcactatttagttatgagtaacttatttcaaaactatacaagagcagatcttgagtttatcaaagcagaaggtaattatctctttgatacacaagggaaaaaataccttgatttttcaacaggcattggcgtgactaatctgggttttcatccgcaagttcaagttgccttgcaaaaacaggctgagcaaatttggcacacacccaatctttatcaaaatagtttgcaagaagaagtcgctgctaagttgatggctggtaaggattatttagctttcttttgtaatagcggtgcagaggccaatgaagcggctattaaaattgcccgtaaagcaacgggcaagcaagagattattacttttcagaattccttccatggcaggacctttggctccatgtcagcgacaggacaggataaaatcaaagtcggttttggtgacgctgtcccgcattttcactatgctgttttcaatgacttgaacagtgttaaagctttggtgacagaaaacacagctgctgttatgctggaactcgttcaaggagagtctggtgtgctgcctgctgagcaggacttcgtgacagccctagctgattactgtcagaagaatggtctgttgcttatcatagatgaggtacagacaggtatgggacggactggcaagctctatgccttccagcactatggcattgaaccggatatttttacattggcaaaaggtctagccaacggagtccctgttggtgccatgttggcaaaaaagcagtttggcagtgcctttggtcccggttcgcacggttcaacctttggcggcaataaattagccatggcagccagttcggccgttcttgatattatgactaaggcaggttttttagagcaggcttgggagaatgctcattatttacaagagcagctcacgtctgccttgcaggttgctgatacggtcactcaagtgcgcggactgggttatatgataggtattgaaacgacagctgaccttggtcagctggtcaaggctactcgcgaccgaggtttgatcgtcctgacagcaggaaccaatgttatcaggctcttaccgccgttgactctgaccaaggatgagatcgatcaaggcataatgattttacaggaagtgtttgaacagcataat

SEQ ID NO: 36125 - DNA, 957 bp, Streptococcus mutans
atgacaacttactatgaagcaataaattggaacgaaattgaagatgtcattgacaagtctacttgggaaaaattaaccgagcaattttggttggatacccgtattcctctgtcaaatgacttggatgactggcgtaagttatctgccgcagaaaaagacctcgttggtaaagtttttggcggtctaacattattagacaccatgcaatcccaatcaggtgtagaagctatccgcggcgatgttcgcacaccacacgaagaagctgtgttgaacaatatccaatttatggaatctgtccacgccaaatcttactcatcaatcttttcaacgcttaacactaagtctgagattgaagggatttttgaatggaccaataataatgaatacttgcaaaaaaaggctaagattattaatgagatctatgaaaatggaaatgctctccaaaagaaagttgcttctacttttcttgaaacttttcttttctactcaggtttctttacgccactctactacctcggtaacaataaactagccaatgtggctgaaatcattaagctcattattcgtgatgagtctgttcatggtacctacattggctacaaattccagcttggctttaatgaattgtctgaagaagaacaaagcgaatttcgtgattggatgtatgatttactctaccaactctatgagaatgaggaactttatacccaaacactctatgatccagtcggctggactgaggaagtcatgaccttcctgcgttataatgccaataaagcactcatgaatttgggacaggatcctctttttccagataccgccaatgatgtcaatccaattgtcatgaatggtatctcaacgggaacatcaaaccacgatttcttctcacaagtcggtaatggttacctgcttggttctgttgaagccatgcatgatgacgattatctcatgggaaaa

SEQ ID NO: 36126 - DNA, 2157 bp, Streptococcus mutans
atgagtttaaaaaatcttggcgatatctcttactttcgcctaaacaatgaaattaatcgtcctattaatggacaaattccacttcataaggataaggaagctttagaagctttctttaaagaaaatgtcaagccaaataccaagacatttgacagcattactgataaaattcagtttttagtggctaatgactatatcgaagctgaatttattgctaaatataagtcagaatttattgaacagctgtctcaggatcttcatgcttatgattttcagtttaaatcatttatggcggcttataaatttcatcaacaatatgctctaaaaaccaatgatggagaagaatacttagaaagcattgaagatcgcgtacttttcaatgccctttattttgctgatggcaatgagaatttagctcatgacttagccatggaaatgattgcccagcgttatcagcctgccacaccttcttttcttaatgccgggcgcagccgccgaggtgaattagtttcttgcttcctgattcaagtgactgatgatatgaattcaatcggacgttcgatcaactccgctttgcaattgtctcgtattgggggaggtgttgggatttccttaagcaacctgcgtgaagctggtgctcctatcaaaggatttgctggagctgcatctggtgttgttcctgttatgaagctgtttgaagatagtttttcttattctaaccaacttggacagcgtcaaggtgctggtgttgtttatttagatgtcttccatccagatatcatggcctttctttcaaccaagaaggaaaatgctgacgaaaaggttcgtgttaagacactttctttgggtgttaccattcctgataagttttatgaattggctcgcaggaacgaagacatgtacctctttagtccctattctattgaacgtgaatatggtgttccttataactatcttgatattactgaaaagtatgatgaattggtcgccaaccctaagattatcaaaacaaagattaaggctcgcgatttggaaactgaaatttctaaattacagcaggaatctggttatccttacgttgtcaatattgatacagctaaccgtgccaatccaattgatggcaaaattattatgtccaacttgtgttctgaaattcttcaggttcaaaagcctagccttattaacgatgcgcaagaatttgttaaaatgggaaccgatatttcatgtaatcttggttccacaaatgttgtcaatatgatgacttcacctgattttggtcgttctatcaaagccatgacacgtgctctgactttcgttacagattcatcacatattgatgctgtcccttctatcaaaaacggcaataagcaggcacatacttttggacttggtgctatgggactgcattcttatttggcacaaaatcatattgaatatggcagtcctgaatccattgagtttactgatatttactttatgctcatgaattactggactctggtcgaatccaataatatcgcccgcgaacgccaagaaacgtttgtcggttttgaaaaatcaaaatacgctgatggttcttattttgataaatatgtaactggtcagtttataccaaaatctgacaaaattaaagaacttttcaaaaatcatttcattccacaagctgaagattgggaagcccttcgtcaagcagttataaaagatggcctttatcatcaaaatcgtcttgccgttgccccaaatggttctatttcttacattaatgatgtttctgcatccattcaccctattacccgtcgaattgaagagcgtcaagaaaagaaaatcgggaaaatctattatccagcagctggactgtcaacagataccattccttactatacttctgcttacgacatggatatgcgtaaagtgattgacgtctatgccgcagctacgcaacacgttgaccaaggcatgtcactgacactctttatgcgcagtgatattccacaaggcatttatgaatggaaaacagagagcaaacaaaccacacgtgacttatctattctgcgcaattacgccttcaacaagggtatcaaatccatctactatatccgcaccttcactgatgatggtgatgaagttggtgctaatgaatgtgaaagctgtgtgatt

SEQ ID NO: 36127 - DNA, 1116 bp, Streptococcus mutans
atggcagaaacaaatggcttaaaggacatgattgcctgtgatacaagaattagtgccatcaaggataataaactctcgtatgcaggttatgatattgctgatttaatggacaataaggctcggtttgaagaggtcatttacctcctttggaatcttcatttaccaacagcaattgaactgaagcaatttgaagagaaattacgcaaaaattatgcgataagtgatgccattgaacaatgtattctcattcaatcgcgccagcacctacaccccatgagtgttttgcgttcaacggtaagtctattaggcgtttataatttaaaagctgaggaaagaagtgtagaagctacttatgaccaaagcattcagttgatggccaagataccgaccattattgcaacctttgcaagattgcgtcaggggctgtctcctatcgctcctagaaaggatcttggcttcgctgctaatttcctatatatgttaaatggccgccttccaagtgaattagagattttagctatgaatcgtgcgcttgttctacatgctgaacatgaactcaatgcctctacctttgcggctagggtttgtgcctcaactctatcagatatttactcttgtgtaacaacagctattggaaccttaaaaggtcccttgcacggtggtgccaatgagcgtgtatttgatatgctaagagagattcgtgaatacggtgatgttgacagttacttgcaagaaaaactcaactctaaagaaaaaatcatgggctttgggcatcgcgtttatcagacacaagatccacgtgaaaaatatttgcgcgaaatggcgagagaattgaccaagggaacagagcatgacatttggtatcaattatccaaaaaagttgaaatttgtatgaagcaaaagaaaaatctaattcctaatgttgatttttattcggctactgtttaccatgttttaggtattgatagttctatttttaccttaatttttgccatgagccgtgtttcgggttggattgcccatattcaagagcaacaaaaaaataacaaattaatccgtccgcgctctcactatactggtatgaggaagttacgctatattcctattgaaaggaga

SEQ ID NO: 36128 - DNA, 1194 bp, Streptococcus mutans
ttgaaaggagataagatggcagaaaaagtaagttttgaagaagggaaattacaggtgcctgataagcccgttattccttacattgaaggagatggtgttggtcaggatatttggaagaatgcgcaaatcgtttttgataaagccattgctaaagtttatggaggtcacaagcaggttatttggcgggaggtcttagctggtaaaaaagcttataatgaaacaggcaactggctgcctaatgagactttagaaattatcaagacgcatttacttgctattaaaggtccattggaaactcctgttggaggtggcattcgttccttaaatgttgccctgcgtcaagaattggatctctttgcttgcgtgcgtccagtgcgttatttcaaaggtgtccctagtccacttaagcatcctgaaaaaacggctattaccatttttcgagaaaatactgaagatatttacgcaggtatcgaatggaatgcgggtacagcagaagttcaaaaggtcatcaactttttacaagatgatatgcaggttaagaaaattcgttttccaaaaagcagcagtatagggattaaacctatttcaattgaaggcagccaacgtttgattcgtgcagctatcgaatatgctctggccaacaatctgaccaaggtaactttggttcataaaggaaatattcaaaaattcactgaaggtggctttagaaaatggggctatgaattagcaaaacgtgagtatgctgccgaacttgccagtggtcaattggtagttgatgatattattgctgacaatttcttgcaacaaattctgctcaagcctgagcgttttgatgtagttgccttaacgaatctcaatggagactatgccagcgatgccttagcagcacaagttggcggtattggtatttcgccaggagctaatattaactatcaaacgggacatgctatttttgaagcaacccatggaacggctccagatattgcaggtcaagacttggccaacccatcttctgttttattatcaggctgcatgctttttgactatattggttggtcaaaagtctcagatttaatcatgaaagctgttgaaaaagctattgcaaatggtcaagttaccattgattttgccaaggaactaggggttgaagcattgacaacccgtcagttttctgaagttctattgacttattta

SEQ ID NO: 36129 - DNA, 1602 bp, Streptococcus mutans
atgtcgttcaataaggaaagtcagcaaagacaagaattgcatcaaaaaatatgggctattgctgacaatgtacgtggtgctgtagatggttgggattttaagcaatatatcttagggattcttttttatcgttttatttctgaaaatatgtctgattattttgatcgtgctgaacatgaggccggtgatccagactttcgttatgctgatctcagtgatgaagaagctgaagaagattttaaacccgatacagtagaagaaaaaggcttttttattttgccttcacaactctttgaaaatatagtcaaaacagcctcaacaaatgaaaatttaaacacggacttagcaaagattttcaagaaaattgaagaatccgcaattggtaaagattcagaacatgcgattaagggactctttgatgatgtggatacaacctcaaatcgtttgggaggttctgttaaagaaaagaacaaacgattatcagatattttgacaggaatagctgggcttgattttggcacttttgaagaaaatgatattgatgcatttggtgatgcctatgagtatctgatttctaactatgcctctaatgcaggaaaaagtggcggagagttttttacaccgcaaactgtttcgaaacttcttgctcaacttgttatggttggaaaagagcatattaataaagtatatgatccaacttgtggttcgggttcactattacttcaaatgaagaaacaatttgaaacccatattttggaagaaggtttttttggtcaagagatcaatatgactaattataacttagcacgaatgaatatgtttcttcataatatcaactataataattttgatattcgccgtggcgataccttgttgaaccctcagcatctatacgaacgaccttttgatgccattgtttctaatcctccttattctatcaagtggattggggatgctgatccaaccttaattaatgatgagcgctttgcaccagctggtaaattagctcctaaatcaaaagctgattttgcctttattatgcacagtcttagccatttatccaataaaggtcgtgcagcaattgtttgctttcctggaattttttatcgcgggggtgctgagaagacaatccgtcaatacttgattgataataattttgttgaagctgttattgccttgcctgataatcttttttatggaacaagcattgcaacctatattttagttttggcaaaaaataaacctgaggataaaacactttttattgatgcttcttcagatgaaaaatctacggtttctggtaagaataaattttatgagacagtaaccaatggcaagatattaaacccgaaaaatatcgaagctattgttgaattatttaagaataaaaaagatgtcgattatgaggctaaacttgtcgataataatctgattgctgaagaaaatgattacaatttatctgtatcaacctatgtcgaaaagcgtgacacacgcgaaattatcaatattgatgaactcaacaaagaaattgctgaaacggttaagaagattgatcatctacgcagtgagattgataaaattgtggaggagctgagccatgac

SEQ ID NO: 36130 - DNA, 1518 bp, Streptococcus mutans
atgaccgatttaatgacaaccttccaaaatcgctttgctgactggacacagtccttgttagagcatttacaaatatctttattgtcacttttaatagccattatccttgctgttcctctggctatctttatcagtcatcgaaagagaatagcagagattattttacaaatttcagggattttccaaacgattccttctctggctcttttaggcttattcatcccttttatggggattggaacggtgccagccgtagcggctctggttatctatgccctttttccaattttgcaaaataccatcactggtctaacaactattgacccaagtttggtcgaagctggtcaagctttcggtatgaccaagtgggagcgactgaaaaaatttgaattagcgctggctatgccagttatcatttctggagtaaggacagcggctgttatgattattgggacagcgaccttggcagccttgattggagctggagggttgggttccttcattcttcttggaattgatcgtaacaacacttctctgattttaataggagctatttcttcagctcttttagctattctttttaatcttgctattaagtttttagaaaaagcttcgctgaaaaagattatgcttgccttttttatcatgttgattggtttgggcgcctcttatcttccaaatgtgattaaaaccagtcagagtcagaaagaaattgtcattgctggtaaaatgggacctgaaccagaagtcctgattaatatgtataaagaattaattgagcaagatagtcacctatcagtaaaagtcaaacctaattttggaaaaacaacctttctttatgaagccctaaaaaaaggtgatattgatatttacccagagtttactggaacaattacaagtagtcttctaaaaaatccacctaaaacgtccaataatcctcaaacagtttacgaagaagcacgtgatggtattttaaaacaggacaatcttgtctatctaaagcccatgaaatatcaaaatacctatgctgtagctgttaagaaatcatttgctaaagaaaaaggattaaagtctatttctgatttgaaaaaggttgaaaatacagcaaaagcaggatttactctcgaatttaatgaccgaaaagatggaaacaaaggattgaagagtctttatggacttaatttacaggtgagtacaatggaacctgctttgcgctatcaagcaattaagagtggtgatattgacatcactgacgcctattcaacagattcagaaatcaaggaatacgacttggttactctcaaggataacaaaaatcttttcccaccctatcagggagcacctttattcaaaaagaaattgttacaaaaacatcctgaactaaaaaagattctgaatcgcttagctggaaaaattacagaaaatcaaatgagcgacatgaattatcaggttaaagtcaaaggaaaatctgctaaaacagtagctcatcattatctcaaaaaaacaggtttgctgaaa

SEQ ID NO: 36131 - DNA, 1731 bp, Streptococcus mutans
atgacagaaatgcttaaaggaattgcagcatctgatggtgttgctgttgctaaggcatatctacttgttcaaccggacttaacatttgagactgtttcagtcacagatacacaagcagaagaggctcgtttggatgcagctctagaagcttctcaaaacgagctttctcttatccgccaaaaagcagtagatacccttggtgaagaagccgcagctgtatttgatgctcatttgatggttcttgctgacccagagatgattgggcagattaaagagacaattcgtacaaaagaagttaatgcagaaagtgctctcaaagaagtgacagatatgtttgttactttgtttgaaaatatggaagacaacccctatatgcaagagcgtgctgcagatattcgtgacgttgccaagcgtgttttggcacaccttctgggtgttgaattgccaaacccagcaacgattagtgaagaatctattgtaattgctcatgacttaacgccatctgatacggctcaattggatgctaactatgttaaagcttttgtgacgaatattggtggacgcacaagtcattctgctattatggcacgtacacttgaaatcgctgctgtacttggtacaaatgatattacagagcgtgtgaaaaatggtgatattgttgccgtcaatggaattactggtcaagtgattattaatccaactgaagatcaaattgcagagttcaaagcagctggtgagacttatgctaagcaaaaagcagaatgggctctccttaaggatgctgaaacggttactgctgatggtaagcactttgaattggcagccaatattggtacacctaaagacgttgagggtgtcaataacaatggtgctgaagcagttggcctctatcgtacagaatttctatacatggattcgcaagattttccaactgaagatgaacaatatgaagcttataaagctgttcttgaaggtatgaatggtaagccggttgttgtccgcacgatggatattggtggtgataaggaacttccttactttgatcttccaaaagaaatgaacccattccttggttttcgtgcacttcgtatttcaatctcagaaacaggtaatcagatgttccgcacacagttgcgtgcccttttgcgtgcttctgttcatggtcagttgcgtatcatgttcccaatggtagctttgctcaatgagttccgtaaagctaaaggtattctggaagaagaaaaggctaatcttaaagctgaaggtgttgctgtttcagatgatatccaagttggtatcatgattgaaattcctgcagctgcaatgctggctgaccaatttgctaaggaagttgatttcttctcaatcggtacaaatgaccttattcaatacaccatggctgctgaccgtatgaatgaacaagtatcatatctctaccaaccttataatccatccattcttcgcttggttgatcatgtggttaaggctgctcatgctgaaggtaaatgggctggtatgtgcggtgagatggctggcgatcagacagcagttccccttcttgttggtattggacttgatgagttctctatgtctgcaacatcggttctccgtacacgcagtcttatgaagaaattagatactgataaaatgcaagaacttgctcagcgtgctctgacagaatgtgcaacgatggaagaagttcttgagttagaaaaagaatatattgattttgac

SEQ ID NO: 36132 - DNA, 1425 bp, Streptococcus mutans
ttgacaaaacaatataaaaattatgtcaatggcgagtggaagctttcagaaaatgaaattaaaatctacgaaccggccagtggagctgaattgggttcagttccagcaatgagtactgaagaagtagattatgtttatgcttcagccaagaaagctcaaccagcttggcgatcactttcatacatagaacgtgctgcctaccttcataaggtagcagatattttgatgcgtgataaagaaaaaataggtgctgttctttccaaagaggttgctaaaggttataaatcagcagtcagcgaagttgttcgtactgcagaaatcattaattatgcagctgaagaaggccttcgtatggaaggtgaagtccttgaaggcggcagttttgaagcagccagcaagaaaaaaattgccgttgttcgtcgtgaaccagtaggtcttgtattagctatttcaccatttaactaccctgttaacttggcaggttcgaaaattgcaccggctcttattgcgggaaatgttattgcttttaaaccaccgacgcaaggatcaatctcagggctcttacttgctgaagcatttgctgaagctggacttcctgcaggtgtctttaataccattacaggtcgtggttctgaaattggagactatattgtagaacatcaagccgttaactttatcaatttcactggttcaacaggaattggggaacgtattggcaaaatggctggtatgcgtccgattatgcttgaactcggtggaaaagattcagccatcgttcttgaagatgcagaccttgaattgactgctaaaaatattattgcaggtgcttttggttattcaggtcaacgctgtacagcagttaaacgtgttcttgtgatggaaagtgttgctgatgaactggtcgaaaaaatccgtgaaaaagttcttgcattaacaattggtaatccagaagacgatgcagatattacaccgttgattgatacaaaatcagctgattatgtagaaggtcttattaatgatgccaatgataaaggagccgctgcccttactgaaatcaaacgtgaaggtaatcttatctgtccaatcctctttgataaggtaacgacagatatgcgtcttgcttgggaagaaccatttggtcctgttcttccgatcattcgtgtgacatctgtagaagaagccattgaaatttctaacaaatcggaatatggacttcaggcttctatctttacaaatgatttcccacgcgcttttggtattgctgagcagcttgaagttggtacagttcatatcaataataagacacagcgcggtacggacaacttcccattcttaggggctaaaaaatcaggtgcaggtattcaaggggtaaaatattctattgaagctatgacaactgttaaatccgtcgtatttgatatcaaa

SEQ ID NO: 36133 - DNA, 2813 bp, Streptococcus mutans
tatcagactgaaaatgaaatggaaaagaaactgatagaagatctggtccaaggccagcattacgaattattaacaattcacacagcagaagaattaatgattaatttgcgtgagcaaatagaaaagcttaataatgtaacgtttacaaatgatgaatggcagcgttttttagatgaatatttggatcgtcctaatgatgggatgattgaaaaaactcgtaaaattcaagagaatcatatttatgattttatttttgatgatgggcatattaaaaatattatattgattgataagaaaaatattcatcagaatcatttacaagttgtaagtcaaattaggcaaaaaggaagtcattctaaccgttatgatgtgacaattttagtcaatggtctgcccctagtacagattgaattaaaaaaacgtggtattccaatgaaggaggcctttgaacagattcatcgttatagcaaagaatcctttaacactcaacattcactttttcagtatattcaaatttttgttatttcaaatgggacgcggacacgttattttgccaatacaactgctcaaaataaaaatcattttgaatttacctgtgaatgggcagataaaaagaataaaattatttatgatttagaagattttgcacaaacttttttaaataagcaagttcttttatccgttttgacaaagtattgtgtttttgatactagtgatactcttttgatcatgcgtccctatcaaattgcagcaacagaagccattatgcgtcagatccatgttgcgcacgaaaataaactctatggtacaactgaagcaggaggatttatttggcatactactggttctggtaaaactctgacaagttttaaagctgcacgtttagcaacagaattagattatattgacaaggttttctttgttgttgaccgtaaagatttagattatcagaccatgaaggaatatcagaagtttcaaaaggattctgttaatggtagtaaaaatactaaagaattaaaaagagctattgagaagaatgatagtaaaattgttgtgacaacaattcagaaattaaatgaattcgtcaagaaaaatcctgaacatcctatctttgaaaagcaatgtgttttaatttatgatgagtgccatcgctctcaatttggagatactcaaagaaaggttaggtctagttttagagcacattatcagtttggttttacaggtacaccaatctttgaagataatactttaacaggtatgttgacaagtactatttttggtaagcagcttcattcctatattatcacagatgctattcgtgataacaaagtgttgaaatttaaggtggattataattatattaaaccagaactaaataaatttagagaagccgaagtaacatctggacaagaaaatgataaaaagaagcttaaaaaaattgaaaaagaactacttttacatccggagcgtatttcaacaatttcagaatatttacttaaagtatttgatgataaaacccatcgaaatgtgcattatactcataaacaaaaacaacttaaaggctttaatgctatgtttgcggtacaaaatgttaaagcggcgaaagcttattatgaagagatcaataagcaacaaagacaattgccagtagataaaagaatcaaaattgctactatttatagttatgtgcctaatgaagaacagttagcatacggggctatagattcagaaaactttgaaccaacgaaaatggatctttcttcaaaagaattcttagatttggctatatctgactacaataaacactttaaaacaaatttctcaacagaaggaaaggatttccaaaattattataaagatttaaccaaacgtgtaaaatccaaagaagtagatcttttgattgtggtaggaatgtttttaacaggctttgatgctcctactttgaatacactctttgtagataaaaatttacgatatcatgggcttattcaagcattttctcgtacaaatcgtattttaaataaagaaaagccatttgggaatattgtttgcttccgtgatttagaaaaagctactaatgatgctttgacactttatggtgaatcacacagtatttcggtagtacttgagaagagttacgaagaatatatgtctggttttacagataaagaaactggtattacagtaaaaggttatcaagaggtttgtcaggaaatacttgaaaaatttcctgatccaacagaaattactctagaatctgaaaaacgagaatttgttaaattgtttggggaagtccttaagttagagaatgttttaagaaattatgatgaatttacgccagaagagcatctcattacaccaggtcaaatgcaggacatgagaagtgtatatgtagatattcgagaagaagcatatggaaatggtcgaactggtaaaaatgaagaaactggtattgatttatccgatatagaatttgaaattgaacttttaaaaacggatgagattaaccttgattatattattagtcttatctctgcaaaagcacaagataatgattctaaggaaacattaaaacgggatattagtcgtgttattcgttcaagcattgatatgcgagctaaagaagaactagtgattggatttattaatgaaacacacttagaacaattaaaagataatcagacaatattagaagctttttatgcttatggtaatcagaagaaaaagaaagctatagaggatttagctgaagagcttacattaaagggagactatcgtcgatttattaatcgttctattgctcagggatatgt

SEQ ID NO: 36134 - DNA, 840 bp, Streptococcus mutans
atggaaactgtagtcttatcaaatggtgtgaaaatgcctatcttaggttttggtgtttttcaagtgcctgatctggaagaatgtgagcgtgtagtgactgaagctattaaggtgggctatcgtctccttgatacagcacaagtctatggcaatgaggaggccgttggaaatgcagtgcgcaaatcaggtctggctcgggaagaattcttcattacaaccaaggtctggatttctaatgcgggctatgaaaaagctaaagcttctctagatgaatcgctgcgcaaattgcagacagactatgtcgacttggtgctcattcatcaaccttttggcgattactatggtacttggagtgctctggaagcatactataaatccggcaaaatcaaagccatcggtgtcagtaatttttacccagatcgtttagtagatttggcaagctttaatgagattgtacctatggtcaaccaagtcgaaacccatgtttttaatcaacagattgaagctaaaaaggtcagtgaggaatacggtgttcagctggaatcttggggaccttttgcagaaggtaaaaataatttctttactaatccaactttaacagctattggtgaaaagtatgggaaatctgctgctcaggttggtctgcgctatcttatccagcgtggcgttgttgtcattccaaagacggtccatcaagagcgtatggtacaaaattttgatgtctttggcttcaatttgtccgacgatgatatggcagacattttgaaattggaccaaggtgaaagtctctttatcaaccattacgatcctgaaactgttaagtttctggcaaattataaa

SEQ ID NO: 36135 - DNA, 594 bp, Streptococcus mutans
atggttcaaacgctatatcttatgcgccatggagaaaccttatttaacacacaaaagcgcgttcaagggtggtgtgattctcccttgactgatctgggaattactcaagcaaaattagtgagagattattttcaagaaaaaggaattacttttgataaggtctattcctcaacacaggagcgggcgacagatactttgaaattgattacaaatcaatcttatcaacagttgaagggattgaaagaaatgaatttcgggatttttgaagctcaaccagaaagcttgctgcctcgttttagacctggttcgtcttcttttgaagacttactggttccttatggtggtgaagatattgctcaagtgggtaaacgtatttatgaaacaattcttacaactttgaaaaaacagtcagcccaaacgctgttgatggtcagtcatggtgcagcattatatggattgatacttgaattgaacattcaattgcctcaggatcttcgttttggaaattgtgctatttgcaagtaccagtatgagaatggtcatctgaacttgcttagtgttattgatcccttgaaaaatatttcttttgatatt

SEQ ID NO: 36136 - DNA, 765 bp, Streptococcus mutans
atgagtattaaagttattgttgcaggttttaaaggcagaatggggtcaacggctgttgatatgattaaaaatgatagcgagcttgaattggcagcacttttggatccttttgcagctgaaaaagaaattgatggagtgcctgtctttacggataagagtgaccttgttggccttgatgctgaggtttgggttgattttactatccctaaagtcgcttatgaaaatacacattttgcccttgaaaatggttttcgtccagttgtgggaacaacaggttttacgcaagagcagattgcagatttaatgactttgtctgctgataaaaaattgggcggtttgattgcaccaaattttgctattggagctgttttgctgatggaatttgctgctaaggcttctaagtatttccctgatcttgaaatcattgaattgcatcatgataagaaaaaggatgctccaagcggaacagcagttaaaacagctgagcttattcgagaagcacgtgcttataaaaaacagggggcagcagatgaagaagaaacgctagttggtgcacgcggtgctgaatttgatggttttagaattcatagtgttcgtttgccgggtcttgttgctcaccaagaggtcatctttggtgcccaaggagaaggtttgacgctgcgtcatgattcttatgatcggatttcttttatgagtggtgttaatttaggaatcaaagaagtggtacagcgagagcagctcgtttatggtttggaacatttacta

SEQ ID NO: 36137 - DNA, 183 bp, Streptococcus mutans
atgttagaacaagggcatgatgagccaactgggcaaacaaaaatcacatctgcttttaaccttccagccaagtatattttgcatacggttgatcctattattataggacaggttagtcagaaagccaaggacttgttggtttcctgctatcaatcttgtttagatttggtcattaaaaacaga

SEQ ID NO: 36138 - DNA, 1188 bp, Streptococcus mutans
ttgccttctgaatttcaggaggctttaccagtattagagaaaattaaggcagcaggatttgaagcttattttgttggcggcagtgttcgtgatgtccttttagggcatcctattcatgatgttgacattgccagcagctcttatcctgaagagacgaaaaaaatttttcctcggacggttgatattggcattgaacacggaactgttttggttttagagaatggtcatgactatgaagtgacaacttttcgtaccgaagatctttatgttgattatcgcagacccagtcaggtctcttttgtacgttctttagaagaggatctcaaacggcgtgactttactatcaatgcttttgcgcttgatgaaaaggctaatattattgataaatttaatggtctagtggacttggagcaaaagattttacgggcagtcggcaatgctgctgaacgtttcaatgaagatgccttgcgtattatgcgtggtttgcgctttgctgctcaattaaatttcgatattgagaaaaaaacgttcatagctatgagagaacatgcgcccttgctggaaaaaatttctgtagagcgctcttttattgagttcgacaagctcttacgggctccttattggcgtaagggaataaattgtttaattgccagtcaagcttatgattatctgcctttattgcaaagtactgcggataagtggcagcagctgttgacggatttgccagaggatttcactttttcaacctctgaacaagcttgggcggcagtactgttgtatttgaatgttgaaaatcctagatccttcttaaaaagttggaaaacctctaatgattttcaaaaaacggtggaaaaacttctagctatttatagattgcgcgaggatagacaaatcaaaaaaactgatgtttaccaatatagtgcaactttgttaacccttgttgaagaattgcgtcaagctcagggtttagcagttgattttgagcacattaaagagctggatgaagcgttaaccattcatgacaagcatgaaattgtggttaagggtggcgatttgatggcggcctttgatttgaaaccaggaccagacttaggaaaaatcttgaaccaaattgaaagttttattgttgctggaaatttagccaatgaacgacaagcaattttggattttgtcagaaaggaaatcgac

SEQ ID NO: 36139 - DNA, 1866 bp, Streptococcus mutans
atgagtgattttattgttgaacggttaagcaaaacagttggcgataagactgtctttcagaatatttcttttattatccatgataaggatcgtattggaatcattggtgtcaatgggactggaaagaccactcttcttgatgttatctctggtagattaggatttgatggcgacaactcacctttttctgctaaaaacgactataagatggcttatctaacgcaagaacctgtttttaatgagacgaagacaattcttgatacagtcttgtcatcagatttgcgggaaatgcagctcattcacacttatgaatcgttcatggccaattatgatgaagctaatcaggagcaattggaaaaggttatggcagaaatggatgctctagatgtctggtctattgaaagtgaagtcaaaactgttttgtctaaattagggatttctgatttatcgcaaaaagttggcaacctgtcaggcggcttgaagcggcgcgtgcaattagctcaggttttactaaatgatgcagacttgcttttgctggatgagccgaccaatcaccttgatattgataccattgcttggctggctaattttttaaaaaacagcaaaaaaacggttctttttattacgcatgatcgctatttcttggacagtattgccagccgtatttttgaattggatagggcgcatttgattgaatatcagggcaattatcaagattatgtgcgcctgcgtgcagaacaggatgaacgcgacgcggcagctttacataagaaaaagcagctctacaaacaagaactggcttggatgcgtaggcagccacaggcgcgtgcgacaaaacaagaagcgcgtatcaatcgttttaagaatttaaaatcagacttatctggtatggatacttcttctgatcttgaaatcaattttcaaaccagtcgtatcggaaaaaaggttatcaattttgaacaggtagactttgcttatcccgataaaacgattttgacacattttaatttactcattcaaaacaaagaccgaattggcattgttggcgaaaatggggttggaaaatcaactcttttacatttaatgaatggcgacttgcagccaaattctggaaagctggatattggtgagacggttcgtattggctacttctcccagcaaatcaaagatatggacgaaaacaagcgtgtgattaactatttgcaggaagtggcagatgaggttacaacagctgttgggataagcagtgtgactagtctcttagagcaatttctcttcccgcgctcaacacacggaacacttatttctaagttgtcaggcggtgagaagaaacgtctttatttactcaaaatcctaattgaaaagcccaatgtcttgctcttagatgagccgaccaacgaccttgatattgcgactttgacagttcttgagagtttcttgcaggatttttctggtcctgtcattacggttagtcatgaccgttattttctagacaaagtagccaataaaatcctcgcttttgaacataatgccatccgtgaattttttggcaattataccgattatttagatgagaaagcgtttgaaaaagacagttctgccatggtagtcaaaaaagaagcagcaaaggttgagaaagaaaagtcagagcgtaaacgtatgtcttattttgaaaagcaagaatgggcgacgattgaagatgatataacagctttagaggaaagaatcgaaaacattgaggcgaccatgcaggaacatgcttcagattatggtcagctggctggtttgcagcgtgatttagatactgccaatgagcagctccttgaaaaatatgagcgttatgaatacttgagcgaactggagaaa

SEQ ID NO: 36140 - DNA, 810 bp, Streptococcus mutans
atgagtgtgaaagttattgcaaccgatatggatggaaccttcttaaattctaaagggagttacgatcataaccgatttcagagaatcttaaaacaactgcaagaaagagatattcgctttgttgtcgcaagcagcaatccataccgtcaattgcgcgaacactttcctgattgtcatgagcagttaacttttgtcggtgaaaatggtgctaatattatttctaaaaatcaatccttgattgaagttttccagcaaagagaggatatcgccagtatcatttactttattgaagagaagtatcctcaagctgttattgccttatcgggagaaaagaaaggctatctaaaaaagggcgtttctgagaatattgtcaaaatgctttcacctttctttcctgttttagaacttgtgaactcgttttcccctcttcctgatgaacgcttttttaagttgaccctgcaggtcaaagaagaggagtcagctcagatcatgaaggctattgctgattataaaacaagtcagcgtttggtaggaacggccagcggttttggttatattgatattattacaaaaggactgcacaagggatgggctttacagcagttattgaaacgctggaattttactagtgatcatttaatggcttttggtgatggcggaaatgatattgaaatgctaaaactagctaagtattcttatgctatggctaatgcacctaaaaatgttaaggcagctgctaattatcaagctaagtcaaatgatgaatctggagtcttagacgttattgataattatctggcttctattgat

SEQ ID NO: 36141 - DNA, 1770 bp, Streptococcus mutans
atgaaaaagaaaactgtctttttacgcttatggtattatttgaaaacctataaaggttcactctttttggctatttttttaaaaatacttagcagtgtcatgaatgtccttgagccttttattttaggactggtaatgacagaattaacggctaacttaattgatatggctcgcggagttcaaggcgctcatctcaatatcagatatattaccatgattttatttctttattttttacgtggcttgctgtatagtattggctcttacggttctaattactttatgactaatgcagtgcaaaaaagcatttacgatttgcgtcatgatttgagtgaaaagattaataagattcccgtttcttattttgataaacatcaatttggcgatatgttaggacgtttcactaatgacgttgaaacagtctccaacgctttacagcagagctttctgcagattattaatgcttttttgacaattatccttgttgtggttatggtgctttacctcaatttgactctggcggcgattattcttgtttgtattccgctgacttatttcagttctcattttattttaaggaaatcacagccttattttaaaaaacaggctaatgctttaggggatatgaacagtttcgttcaggaaaacttaacgggctttaatgtcataaaactctatggacgtgaagaaatatctgctgaaacctttcgaactatcacagaaaatttacgagatgtcggctttaaagccagttttatttctggaataatgatgccagttcttaatgctatctcagacttagcttatttgattgttgcattagttggcggcctgcaggtcttagcagggagactgactattggtaatatgcaggcctttgttcaatacatttggcaaatcaatcagcctattcagaccatcacacaattatcaagtgttcttcaaagtgctaaatcttctctagaacgtatttttgaggttttggatgaaacagatgaagtcaatcaagtcaaggaaaagctggaacatgatttgacagggcaagtgacctttcataatgtcgcctttcaatatactgaagataagcctttaattcgacattttgatttagatgttaaaccgggtcagatgattgctgttgttggtccgaccggggcgggtaagacaactcttatcaatcttttgatgcgtttttatgatgttacccaaggagcgattacagtagataatcatgatatccgtaacctttcccgtcaggaatatcggaaacaatttgggatggttcttcaagatgcttggttatatgaagggacgatcaaagacaatttgcgctttggaaatttgcaggcaagtgatgaggaaattgtcgaagcagccaaggcagctaatgtcgatcattttatccgaacccttccagacggttataatatggaagtcaatcaagaatctaataatatttctttggggcaaaagcaattgttaaccatagcacgagcgctgctggctgatcccaaaattctgattctggatgaagcgacttcttcagttgatactcgtttggaacttctcattcaaaaagctatgagtaagcttatggaaggccgcactagctttgttattgctcatcgtctttcaactatccaagaagccgataagatccttgtccttaaggatggtcaaattattgaacaggggaaccatcaaagtctcttagctgacaagggcttctattatgatttgtatatgagtcagtttagcgctaaaaccaat

SEQ ID NO: 36142 - DNA, 738 bp, Streptococcus mutans
atgaaaaaagaacgtcaatctaggaaaaaacgaagttttttaaggacctttctgcctatccttttattagtgattggtttagcactaatcttcaatactccaattagaaatgccctaattgcttggaataccaatagatatcaggtttctaatgttagcaagaaagatattgaacacaacaaggctgcccattcttcctttgattttaaaaaggtggaatccatcagtactcaatcggtactggcagcacaaatggctgctcagaagcttcctgtaattggcggaattgccattccagacttaaaaatcaacttaccaatcttcaaaggattagataatgttggcttaacatatggtgctggaacgatgaaaaatgaccaagtcatgggagaaaataattatgctcttgctagccatcatgtttttggtatgaccggatcttcacagatgctcttttcacctttagaacgtgcaaaagaaggcatggaaatttatctgactgataaaaataaggtttatacttatgttattagtgaagtgaaaactgtcacacctgaacatgtagaagttattgacaatcggccgggacaaaatgaagttactttggtcacttgtacagatgcgggggcgactgccagaacaattgttcatggcacatataagggggaaaatgattttaataagacttccaaaaagataaaaaaagcttttaggcagtcctataatcaaatatcattt

SEQ ID NO: 36143 - DNA, 1218 bp, Streptococcus mutans
atgacttatgataatttattgaatcgctttttaacctatactagggttaatacaagaagtgatgaaagtagtgaaacaacaccaacaacacaaagtcaggttgattttgctttaaccattttaaaacccgaaatgaaaagtattgggcttcaaaatgttcattatttggaaaatggttatttggtaggaactttacctgcaaatggcaattttccttataaaatcggttttattgcacacatggatacagccgattttaatgctgaaggtgtcaatcctcagattattgataattataatggtgaaattattcaattaggacagactgattttgtcttggatccaaaggagtttcctaatttaaataactacttaggtcagactctgattaccacagacggaactactcttcttggtagtgatgataagtctggcattgctgagattatgacagctattgattatctagtcaaacatcctgaaattgaacatggcgaaattcgagttggatttggacctgatgaagaaattggtaggggtgctgatcagtttgatgttgaggattttgatgttgattttgcttataccgttgatggcggtcctttaggagaactgcaatatgagactttcagtgctgcagcagcagaaattgattttatgggacgcaatgttcatccgggtacagctaagaatcagatggttaatgcattgcaactggcaatggattttcatgggcaattgccacaggaggaccggcctgaaaagactgaaggatatcaagggttttaccatcttttgagtcttgaagggactgttgatgcggcacatgccagttatattattcgtgattttgatgatgaagcttttgtaagccgtaaagattttatgcagaaaattgctgacaagatgaatgcccatttaggagcagagcgcgtgcaattgcaaatttatgatcagtattataatatgcgaaaaattattaaaaaagatatgacctgcgtgaaactagctaaaaaagttatggaaaacctagcgattgaacctattattgaaccaattcgcggcggaacagatggttctaaaatttcctttatgggtctgccgacccccaatctttttgctggtggtgaaaatatgcatggtcgctttgaatttgtcagtttagaaacaatgcaaagggcagttgatgttatcataggaattgtctgtttcaaacaa

SEQ ID NO: 36144 - DNA, 2460 bp, Streptococcus mutans
atgcaagatagaaatttagtagatgtcaatttaacaagtgaaatgaagacgagttttattgactatgctatgagtgttattgttgctcgggctcttccagatgttcgcgatggattaaaacctgttcatcgtcgtattttatatggcatgaatgaattgggggttactcctgacaagccgcataaaaaatcagcgcgtattacaggtgatgtcatgggtaaataccatccgcatggagattcatctatttacgaagccatggttcggatggcacaatggtggtcttaccgtcacatgttggttgatggtcatggaaattttggttctatggacggagatggcgctgcagcgcagcgttatacagaagcgcgtatgagcaaaattgctatggaaatgcttcgtgatattaataaaaatacagttgattttgcagataactatgatggttctgaacgtgaacctttagttttaccgtcacgttttccaaatcttctggttaatggagcgacaggtattgctgttggaatggccactaatattccacctcataatttgggagaaacaattgatgcggtcaaattagttatggataatcctgacgtgacaacgcgtgacctaatggaagtactacccggccccgattttccaacaggagctcttgtcatgggaaaatcgggtatacatcgcgcctatgatacaggaaagggttctattgttttgcgtgctcgcactgagattgagcaaacgaagtcaggacgtgaacgcattgttgttactgaatttccttatatggtcaataaaactaaagtacatgagcatattgttcgcttagcacaagaaaaacgcattgaaggtatcactgctgttcgagatgaatccagccgtgaaggcgttcgttttattattgaagtccgccgtgatgctagtgctaatgttattttaaataatctttttaagttaacaagtctacaaactaattttagttttaacatgttagctattgagaagggtgtccctaaaattttgtccttgagacagattttagataattatattgaccatcaaaaagaagtcattgttagacgtactaagtttgataaggctaaagctgaaagccgggctcatatcttagaaggtttactgattgctcttgatcatctggatgaagttattaccattatccgcaatagtgagacagataccattgctcaagctgaattaatgagtcgttttgatttatccgaaagacaaagtcaagccattcttgatatgcgcctgcgtcgcttgaccggcttggaacgtgataaaattcagtcagaatataatgaccttttagcattgatcgctgatttagctgatattttggctaaaccagaacgtgttatcacaatcatcaaggatgaacttgaagatatcaaacgcaaatttgctgatcaacgccgaacagaattaatggttggtgaagtcctgtcactcgaagatgaagacttgattgaagaagaagatgttctgattactttatctaataagggttatattaaacgtcttggtcaagatgagtttcgtacacaaaaacgaggcggtcgtggtgtccaaggaacaggcgtcaatgatgatgactttgttcgtgaactggtatcaacaagtacgcatgatgccatgctcttctttactaatcaagggagagtttatcgtctcaaaggttatgaaattcctgaatacggccgaactgcaaagggcttacctatcgtcaatttactgaaattagatgatggtgaaacgattcaaaccataatcaatgtgaaatcagatgattttcatgataagtatttattctttacgactagacaaggagttgtcaaacggactagtgtgtctgcctttggcaatattcgtcaaaatggtctcaaagcgctgagtctgcgcgataatgatgaattgatcaacgttcttttgaccaatggtcaagaggatatcattattggaacacatttaggttattctgttcgtttccaagaatctgctgtccgcaatatgggacgtttggcaactggtgtgaaaggtgttaatctcaggaaaaatgattatgtcattggtgcagatcacatagcagatagtcgcaatgttttaaccattacagaaaaagggtatggtaagcaaacacctgccagtgaatacccgactaaaggacgtggtggtaaaggaattaaaactgccaatatcaccgctaaaaatggtcctctcgctggacttgtcactgtcaatgatgatgaagatatcatgattattacggatactggtgttatcattcgtacaagtgttgccgatatctctcagactgggcgttcagctatgggtgtcaaagtgatgcgcctagatgaaaatgctaagattgtaacctttgctttggtcaagtctgaagtaatagaaggcacttcactaaataataatgaaaatgag

SEQ ID NO: 36145 - DNA, 1347 bp, Streptococcus mutans
atgacaacaggtaaagagtatgttgctagtgtttttgaaaaagttaaagcacaaaatgctcatgaaccagaattcttacaagctgtagaggaagtatttgaatcacttattccagtgtttgataactatccaaaatatattgaagaaaatctgctggaacgattggtcgaaccagaacgtattgtttcgttccgtgttccttgggtagacgataaaggtcaagtccaagttaaccgcggttttcgtgtgcaattttcatcagctatcggaccttacaaaggcggccttcgtttccatccatcagtaaaccaatctattatcaaattccttggttttgaacaaatctttaagaattctcttactggccaaccaatcggtggtggtaaaggcggctcaaactttgatcctaaagggaagtcagataatgaaatcatgcgtttctgccaaagcttcatgactgaactcagcaaacatattggtgcagacacagatgttcctgctggggatattggtgttggcggacgtgaaattggctatctctacggtcaatataaacgcctccgcaatgaatacacgggtgtccttactggtaaaggtttgacttggggcggatcacttgcccgtacagaagcaactggttacggtgcagtttactttgcagaacaaatgctgaaagcgcgtggtcaagactttgcaggaaaaactgctattgtttcaggttcaggtaatgtagctatttatgctactgaaaaattgcagacacttggagctaaagttgtggctgtttctgattcatctggttatgtttacgatccagatggtattgatgttgctcttcttaaagagcttaaagaagtacagcgtgcgcgtatcatcaaatatgctgatgcacgtccaaatgcaagcttcacacctgcaggtggtgattcaatctggacaatcaaagcagatcttgctttcccatgtgctactcaaaatgaattgaatgaagcagatgctaaaacgcttgttgctaatggggttatcgctgtttctgaaggagctaatatgccttcaactcttgaagcaattgatgtctttcttaaggccggcgtctcgtttggtcctgccaaagcagccaatgctggcggtgtagccgtatcggctcttgaaatggcacaaaatagccaacgtacagcatggacattcgaagaagtagatcgtaaactttatgatattatgaagggtatctatgacaactctgcagcagcagctaagtcatttggccaagaaggcaacctcgtagttggtgccaacattgctggtttccttaaggttgcagatgctatgtcagcacaaggaattgta

SEQ ID NO: 36146 - DNA, 192 bp, Streptococcus mutans
atgaaagtagcaattatcccagaaaaatgtattgcctgtgggctttgtcaaacctattcaggcgtttttgattataatgatgatggtattgtcatttttacagacagcaaggaaaagattaaaacagttgctgatgatccaaatatccttatggctgttaaaaattgtccaacaaaagctcttacattaccg

SEQ ID NO: 36147 - DNA, 738 bp, Streptococcus mutans
atggctattggtatgctaaccctggagataacatcaagattaagtaaagaggttgatatgatgggtattagaattgctattgatggtcctgcttccagcggtaaaagtacagtagctaaaattatcgctaaaaagttaggttatgtttatttggatacaggtgccatgtatcgttcagcgacctatttagctttgcaaaatgatacagatctaacggacgagcgggccattgttaaacttttgaaggattatcctattagttttgggcgtcgtaaggatgatagtgaacaactcgtttttgttggtaatgttgaagttagtcatcctattcgtgagaatgaagtgaccaataatgtatcaaccgttgctgccttgcccttggtgcgtaaaacattggttgatttgcaacaacaattggccaaaaagggtggtatcgtaatggatgggcgtgatattgggacagttgttttacccgatgctgagctcaagatttttttaattgcttctgttgaagaaagagctgagcgacgttacagagaaaatcttgaaaaaggaattcaaacagattttaatacattaaaaaaagaaattgctgagcgtgactataaggatagtcataggaaaatttctccgttaaaacctgcagctgatgctatcacttttgacacaacgggcattgatattgcaggtgtcgttaactttattgaaaagaaagcacaaaatattattgacaggtct

SEQ ID NO: 36148 - DNA, 600 bp, Streptococcus mutans
gtggaatattatgtgtatacgggcttgatttgtcaggtccgtttttgtttttctcaaaaaaataatgaaggggtgaagaatatcgctaaaaaagatttgttcattaacaatgaaattcgtgtccgcgaagttcgccttattggtcttgatggtgagcaattgggaattaaaccattagcccaagcacaggctattgcagatgatgctaatgtcgacttggttttaattcagccgcaggctacaccgcctgttgctcgtattatggactatggtaagttcaaatttgagtatcaaaagaaacaaaaagaacaacgtaagaaacaaagcgttgttaccattaaagaagtccgtttaagtccagttattgataaaggtgactttgagacaaagcttcgtaatgggcgtaagttccttgaaaagggaaataaggttaaagtttctattcgttttaagggacgtatgattactcacaaggaaattggagcaaaagttttagctgattttgctgaggcaacgcaagatattgctattattgagcaaagggctaagatggatggccgtcaaatgttcatgcagcttgcaccaattccagataaaaaa

SEQ ID NO: 36149 - DNA, 444 bp, Streptococcus mutans
atgttcttagcgccaaaagaaattaaaaacgagacaggagaatcacttctttattgtcccaaacgcgttcttgtatctaaagaattcacctttaatgctgcccaccatctcttcaattatgaagggaaatgcaaagccttacatggacatacttatcatttacaagttgctgtcagtgcttttcttgatgaacgcggaatgacttatgattttagagagttgaaaaggatctaccaagaatatttagaaccaaaactagaccaccgctaccttaatgaaagtctgccctacatgaatacaactgctgaaaatatggtttattggatttacaaaacagtcgagaaagctttaactgacgagcgcggtttacaaatggaacatgttcgcctttatgaaacaccctcagcttatgctgaatttagaagagaatgggatttacaagca

SEQ ID NO: 36150 - DNA, 198 bp, Streptococcus mutans
atgccaaaacaaaaaacacaccgcgcatcagctaaacgttttaaacgtacaggttcaggtggattgaaacgcttccgtgcatatacctctcaccgcttccacggtaagaccaagaaacaacgtcgtcatcttcgtaaagcatcaatggtgcattcaggagatttcaaacgtattaagtcaatgcttactcgcttaaaa

SEQ ID NO: 36151 - DNA, 357 bp, Streptococcus mutans
atggctcgtgttaaaggtggcgttgtttcacgtaaacgtcgtaaacgtgttttaaaattagctaaaggatactatggcgcaaaacatatcttgttccgtactgcaaaagaacaagtgatgaattcatactattatgcttatcgtgaccgtcgtcaaagaaagcgtgatttccgtaaattatggattacacgtatcaatgcagcagcacgtatgaatggattgtcatattcacaattaatgcatggtttgaagttggctgaagtcgaagtgaatcgcaaaatgcttgcagatttagcggttaacgatgcagcagctttcacagttcttgcagatgcagctaaagaaaaacttgggaaa

SEQ ID NO: 36152 - DNA, 660 bp, Streptococcus mutans
atgaaaatcaatcaatatattgaccatactttattaaaaccagaaagtaggcaagatcagattgataaactgattcgagaagctaagacatataattttgccagtgtctgtatcaatccaacttgggtttcttatgcggctaaagctcttgaaggaacagacattaaagtttgtactgttattggttttcctttaggagcaacgactagtgctgtaaaagcctttgaaaccaaggatgctattagtcatggagctgacgaagttgatatggttatcaatattggtcaagctaaatctggtcattttgcttttgttgaagaagatattcgggcagttgttgaagccagtggtgacaaattggtgaaagttattattgaaacttgtctccttacagataaagaaaaaattaaagcttgtcaagctgcagtagcagcaggtgctgatttcgttaaaacatcaactggtttttcaactgctggagctaggttagatgatgttcgtcttatgcgtcaaacggtaggacctgatgttggagtaaaggcggcaggaggaacgcgatctttagaagatgcgcaagcttttattgaagcaggtgcaacacgtattgggacatctgctggagttactattatggaaggaaagcaaacaaacagtggttat

SEQ ID NO: 36153 - DNA, 594 bp, Streptococcus mutans
atgaataatatgtactatacagaaaatcccgatagtaaacacgatattagaaaaataaaggttgaattactgggacagtcttttcattttttaacagattcaggtgtttttagtaaaaacatgattgactatggcagtcagactcttttaaacagccttgattttgctgaggaaaaaacattattagatctcggctgtggctatggaccgcttggcattgccttggctaaggttcaaaaacttgacgttactatggttgatattaataaccgtgctcttgatttaacccgtcaaaatgctgaaaataatgaagtatctgctaatattttccaatctgatatttatgaaaatgtttttgatagttttgattatattattagcaatccgcccattagggctggtaagaaagttgtccacactattattgagggaagtattaatcatttaaaagaaaatggcagtttgactattgtcatccaaaaaaagcaaggtgctcctagtgctaaaaacaagatggaaaatgtttttggcaatgcgattgttttaaaaagggataagggatattatgttcttagaagtgtgaaagaaggagat

SEQ ID NO: 36154 - DNA, 2547 bp, Streptococcus mutans
atggaaactgtagagcaccttattgaaaagtttgtacctgaaaattataatattttccttgatattaaccgtcaggagaagtttttttcaggaaatgttgctattaacggagaagcgctagataatgttatttccttccatcagaaggatttaacgattcattcggtccttttagataataatgaattaacttatcatattgataatgaaaatgaggctgttcggattgaactgcctgagacaggcagtatgacccttgttcttgaattttcaggtaagattacagacaatatgacaggaatatatccttcttattatacggttgaaaatgttaaaaaagagattatttcaacacaatttgaaagtcactttgcccgtgaagtttttccaagtattgatgaaccggaagccaaggcaacctttgatttagctttgaaatttgatcaggaagaaggagacattgctctttcgaatatgccagagattaatgctaatcgtcgtcaagaaacaggtgtctggacctttgaaacaactccaagaatgtcttcttatctgctggcttttgccttaggtaatcttcatggtaagacggcctatacaaaaggtggaacagaagtaggtgtttttgcaacctgtgcccataatattgactcagttgattttgctttagatattgctgttcgtgttattgatttttatgaagattattatggtattaagtatcctattgcacaggcttaccatgttgccttaccggatttctcagcaggtgctatggagaactggggattaatcacttatcgtgaggtttatcttcttgttgatgaaaattctaccgttagcagccgccagcaggttgcacttgttgttgcccatgaactggcgcatcaatggtttggtaatctggtaactatgaagtggtgggatgacctttggctgaatgaaagttttgccaatatgatggaatatgttgctattgatgctattaaaccaaactggcatatttttgaagactttcagaccagcggtgttcctcatgctttgaagcgtgatgcaactgacggtgttcaatctgtccatgtcgcagttaatcatcctgatgaaatcaatacactttttgatgctgctattgtctatgctaaaggaagccgattgatgcatatgctgcgtcgctggttaggtgacaaagtttttgctgctggactgaaactttactttgaaaagcatcaatacaataacactgttgggcgtgatctgtggaatgctttatcaaccgcttctggtaaggatgttgctagtttcatggatgcttggcttgaacaaccgggctaccccttagtgacacttaaacttgaaggagatagcctgcaactatctcaaaaacaatttttcatcggagaatatgaggatcaagatcgtctttggccaattcctcttaacagcaattggtcaggtttaccggaaatattatcggaaaaaacgattgaaattcctaatttcagtcaattagctgctgtaaataaagaaaaaggaccattacgcttaaatacagataatacagctcattatatcagtaattatgaaggtcagctgttaaaatcaattttatctgattttgagaatcttgataaaacctccaagctgcaaattattcaggaacgtcgtcttctagcagaaagcggtcagatttcttatgctgaattagtaaaattgttaacacaattatctcacgaaacgtcttacatggtcgcttcagctagcgatcaattaattgctggtttaaaacgatttttagatgaagacagccaatcagaatcaatgtttaaagttcttgttcgtgatgtttatcgtacgaattatcaacgcctaggttttgaaaagtccgtggaggaaatggatgaggacgaaaaggttcgtcaaattactatttctaatatgatttatgctgatgatcctgatgccaatgaaaaagcacaagcgatttttgcaaattataaggaaaatattgaagccattccagccgctattcgtcttgacgttttaacgaatcaaataaagcatgccgaaaccgacgatttagtaagtctttatttagattcatacgttaaaacgaatgacagtaattttcgtaggcaattggccagtgctctggcaaatacgaaatcacaaataacacttgatcgtattctagctcaattgcctaatagagatgttattaaaccgcaagatttgtcattatggtatggacttttcttgagaaaatcatttgcacaagaaaccttttgggcttgggcgcgtgagaattgggcttggattaaagccacacttggtggtgatatgagttttgatagttttgtaattattccagcaaatgtctttaagacaccagaacgtctggcagaatacaaagctttctttgaacctcaattggatgatttatccatcagccgtaatattactatgggaattaaagaaatagcagctcgcataacgctaattgaaaaagaaaaagctgctgttgaacaaactattgtcaatacttttttg

SEQ ID NO: 36155 - DNA, 960 bp, Streptococcus mutans
atgaataaacttaagaagggaagttccaaagtgaccgtaaaatctgtaaaagtgaagtcttatgcaaatattgctatcattaaatattggggtaagacaaatactaaaaagatgattccggcaaccagtagtatttctttgactttggaaaatatgtatacggaaactagactgactcttttaagaaatgcagaagctgatgaattttacattgatcatattttacaaaatgaagcagagcaccgaaaaatcagtaaggttctggatttttttagaaaagagactcctttttttgttaaggtagagacttccaacaatatgccaacggcagctggtttatcttcaagttctagcggtttatcagctttggttaaggctgccaatatattctttgaaacaaatgcaactcaggaagaacttgcccaaatagccaaatttgcttcaggttcttcttcgcgttctttttttggacccttgacggcatgggataaagattcaggtgagatttatcctgtaccgtcagatttaaagttagctatgattatgttggttttgaacgataccagaaaacctatttcgagccgtcaaggtatgcagcgttgttcagagacctcaacaaattttgctgattggattgcccaatctgaaaaggattatgttgctatgttggactatttaaaagctgctgactttgaaaaagtcggcgatttaacagaagctaatgctttagctatgcatgcaacaacaagaaccgctaatcctcctttttcttatttaactaaagcttcctaccaagctatggaaagagtaaaagaactgcgacggcaaggtgaaaggtgttattttaccatggatgcaggtcctaatatcaaagttttgtgtctcgagaaagatttggagcgtctatctcgtatttttgcgcaagactatcagattattgtgtctaaaacaaaggaactt

SEQ ID NO: 36156 - DNA, 756 bp, Streptococcus mutans
atgacagaacctattttaaaagtaaacgatctttctgtttactatggtaaaaagaaggcccttcatagtgtatctattgatttttatcctaatgaaatcacttcgttaattgggccatcaggatctggtaagtcaactttgttacgtgctatcaatagaatgggtgatctaaatcccgaggtgacagttacaggttcgattatatataatggtcacaatatctacagccgtcgaacagatacagttgaattacgtaaggaaattggtatggttttccagcagcctaacccttttccaatgactatttatgaaaatgttgtttacggtcttcgtttaaaaggtgttaaagataagaaaattttggatgaagctgttgaaaaatctttggtaggtgcttccatttgggatgaggttaaagaccgtctacatgattcagcaattggtttatcaggaggacagcagcaacgtgtttgtattgctagagtgttagcaacaagccctaagattattttgttagatgaaccaacttcagccttagatcctatttcagcaggaaaaattgaggatacactttatggtttgaaagaaaaatatacaatgcttgtggtgacacgttcaatgcagcaagcttcacgtatttctaatcgtacgggatttttcttagctggtgatttggtagaatatggaaataccaaagaaatgtttatgaatccgcaaaagcaagaaaccgaagactatattacaggtaagtttgga

SEQ ID NO: 36157 - DNA, 996 bp, Streptococcus mutans
atggataatatcattcaagtaaaaacaggcggtaaactatatattgctggtgaatatgctatcttaactcccagtcagtcggccattattaaaaacatccccatttatatgacagctactatcaaatctgccaaagaaatttcaatttggtctgatatgtttgcttattgtgtgggtatggcggctgactctaattatagcctgatccaagagacaattacggttttagcaaattttttgggaaaagaaattgctgatttatcccctttttctttagaaattaatggagaattgggacgcgatgggaaaaaattcgggattggttctagtggtagtgttactattttaaccttaaaagcactctctcgtttctatcaattggatttatcgacagatacaatctttaagctggctgcctataccttaattaagcgtggtgataatggttccatgggagatttggcttgcattgcctatgataatttggtttattttacagcttttgaccgccaattagtaaggacttggatagtatctgatgacctaagaactgttttagagagggattggggttatcgcatttcagtcttatatcctaaaatcgcttgcgattttctcgttggctggaccaaacaaccctctatttcaaataagatggttaatcttgttaaatcttcaattacgccatcctttttaaaagtcagtcaggaaaatgtcgaaaaactttcccaaggcttgctaaatggtcaaaaagatgtgataaaagaaagtttagcaactagcagccagctcttagaaaatctcaatccagctatctatacagaacgtttacggcaattaaaagcagctgagaaaggtctagatgtcattgctaagagcagtggttctggtggcggtgattgtggaattgctctttcttttaaagacagggacagtcaccttttagtggaacgctggcaaaaagctggtattgaattgctttatcaagaaaaatta

SEQ ID NO: 36158 - DNA, 993 bp, Streptococcus mutans
atgacaaatagaaaagatgatcatataaaatatgccttagactatcgttcgccatataatagtttcgatgacatagaactcattcatcattctttaccagattatgatttagccgagattgatttgtctacacattttgctggtcaggattttgattttcctttttatatcaacgctatgacaggcggaagccaaaaagggaaagaagttaatgaaaaattagctcaggtagcggacacctgtggtcttctttttgtaacaggttcttacagcacagctcttaaaaatccagacgatacttcttatcaggtaaaaaaatccagacctcatttattactagcaaccaatatcggccttgacaaaccttatcaggctggcttacaggcagttagggatttacagcctttatttcttcaagttcatattaatcttatgcaagagctccttatgccagagggggaacgcgaatttaggtcttggaagaaacatttatctgactatgcgaagaaactacaacttccttttattttaaaagaagttggttttggtatggacgttaaaacaatccaaactgctattgacctaggggttaaaactgtcgatatttctggccgaggcggaactagttttgcttatatcgaaaatagacgtggcggaaatcgttcttatcttaatcaatggggacaaaccacagcgcaagttctattaaatgctcagccgcttatggataaggtagaaatcctggctagcggcgggattcgtcatccattggacataataaaagctttggtccttggagccaaagcggtcggtttatctcgaacgatgttagaattagttgaacagcattctgttcatgaagtcattgctattgtaaatggttggaaagaagatttgcgcctgatcatgtgcgcccttaactgtcaaacgattgcagaacttcgaaatgttgactatcttttatatgggcgcttaagagaaggacagagacaa

SEQ ID NO: 36159 - DNA, 654 bp, Streptococcus mutans
atgagtccaacacaaactctgaaactaagtaaacaattgagttttggcgaagaggttgctaacagtgtgacacatgctgttggtgcagctattatgcttgttctgctccctatttccgccatttacagttatcaacattacggaatagccgctgcaatcggaatgtccatttttgtcatcagtctctttttgatgtttttgtcatcaactgtttatcatgctatgacttatgattcaccacaaaaatatgttcttcgtattattgatcacagtatgatttatattgctattgcaggaagttatacaccagttgcactttcactggtcggaggttggttaggctaccttattattgttcttcagtggggcactactatttttggtattttatataagatttttgctaagaagattaatgacaaattcagtcttttcctttatttattgatgggatggctggttatctttattattccagctattgtcagcaagactggtctagctttttggcttttaatgttaggcggtggcttatcttatactgttggagctttcttctacgctaaaaagaaaccttattttcacatgatttggcatctctttattttactggcttctgctttgcaatatatcgctattgtctactatatgcta

SEQ ID NO: 36160 - DNA, 933 bp, Streptococcus mutans
atgaaaaatcaagaacttgctaaaaagctgacatctccttccaaaaattctcgtttggaaaaattcggaaagatgattacgcttttctgcttaatcttaattgttattattgtagcaatgattcttatttttgttgcccaaaagggattgtcaaccttttttgtgaataaaatcaatcctcttaaatttttgtttgggacagagtggcagccaaatgttaaaggagctgatggtaaaccattacttggggctttaccgatgatcttaggttcctttattgtaactattttatctgctattattgcgactccttttgctattggagcagcagtctttatgactgaaatttcacctaagtacggtgccaaaattttacagcctgtcgttgagcttttggtaggaattccttcagttgtttatggttttattggtttgcaaattgtggttccttttgtgagatctatttttggcggtactggttttgggattttatcaggggtttttgttctctttgttatgattttaccaacagtaacttttatgacagttgatagtttgaaggccgttccgaggcattataaggaagccagtcttgctatgggagctactcgctggcaaacgatttggcgtgtgattttaaatgctgctaagccaggtatttttacggccgttgtttttgggatggctcgagcttttggtgaagccttagctatccaaatggtagttggtaattcagctgttattccgacgtcattgaccacacctgcagcaactttgacatcagtcttaacaatgggaatcggtaatacggttatgggaaccgttcaaaataatgtcctttggtccttagccttagttcttctcattatgagtctggcctttaatatgctgatgagatttattacaagggaaggtaagaaaaattatgaacgc

SEQ ID NO: 36161 - DNA, 1224 bp, Streptococcus mutans
ttgcaagaacgcctgaaacatttagaaaaacatcagctgctaagcacagaagagttgaagaaactctgtcaaaatcaacaattacctttagagactgccaatcaaatggtcgaaaatgtcttaggaactttttcgctgcctttcgccctagcaccagattttctcattgatgggaaggaatatcaggttccttttgtaactgaagagccttctgttgttgcggcagctagttttgcagctaaaattatcaaacgttctggtggtttttctactaaaattcataatcgtcaaatgcttggccaagtggctctttatgatgtggatgactttgataaagcacacaaaaatatcttggacaagaaggccttactcctatctttagccaatgaggcacacccttctatcgttaagcgtggcggcggcgcttgcgatttgatgacagagattaaagggagttttctaattgtttatctgagtgttgacaccaaagaggccatgggagcaaatatagttaatactatgctggaaaccttagctgctcctttagaagaactatctggcggacaaagtctcatggctattctttctaactacgcaacagaagctttggtaacagcacaatgtcaggttaatcttcgtttcctcagtcgtgataagacaaaagccaaaaaattagctcgaaaaatggacttagccagtcaactagcccaaattgacgtttatcgagccagcacccacaataagggtatttttaatggcatcgatgctcttgtactagctacaggtaacgattggcgtgctattgaggctggtggacatgcttatgctagtagagatggacattatcgtggcctgcctacttggtcctatgatgacaaaaatgagatattaaagggcaagatatccctacctatgcccattgctactaaaggaggatctattgggttaaatccaacggttcaatgcgcttatgatttgcttggaaatccgactgctaaagaattagctgctatcattgctgctgtaggtctggctcaaaattttgccgcccttaaagccttgactagtacaggcatccaagctggacatatgaaacttcaggcaaagtccttagccttgcttgcaggcgctaaggaaaaagaagtctcaactcttgtttctcagcttcttaaagctaagcatatgaatttagaaactgcgcaaacacttttaaaaaatttaaga

SEQ ID NO: 36162 - DNA, 837 bp, Streptococcus mutans
atgtctaaggcagattttattttcaaaaaaaatataaaaaaaatcttaactgatggtgtctggagcgaacaggctcgtcctaaatataaaaatggcaagacagccaattctaaatatattacaggcgcttttgcagaatatgaccttgcaaaaggagaatttcctatcacaacccttcgtccgattgctatcaagtcagctatcaaggaagtattctggatctatcaggatcagaccaacgaattagccatcttaaatgataagtacggtgttaggtattggaatgattgggaagtcaagcaaacaggaaccatcggagaacgttatggtgccattgttaagaaacatgatattatgaataaaattctcaaacaattggaagaaaatccttggaatcgacgcaatgtcatctctctttgggattatgaagcctttgaaaaaacagaaggtctcctaccttgtgcctttcaaatcatgttcgatgttcgtcgtgtgaaaggcgaaatttatttagatgctaccttaacacagcgctccaacgatatgctggttgctcaccatatcaacgccatgcaatatgtcgctttgcagatgatgatcgccaaacactttggttggaaggttggtaaattcttctattttgtcaataatctccatatttatgataatcaatttgaacaagcagaggaattattgcggagagagccagtggtttgtcaaccgcatttggtattgaatgtcccaaataaaactaatttctttgatattaaacctgaagattttgaattattggattatgaaccggttaaaccacaattaaaatttgatttagctatt

SEQ ID NO: 36163 - DNA, 510 bp, Streptococcus mutans
atgaacaataagcgagaaaagaaaattgttgccatttgggcagaagatgacagacacttaattggagttaaaggcagtcttccttggcatttacccaaagagttgaaccattttaaagagatgaccatggggcaagctctattgatgggacgcgttacctttgatggtatgaaccgccgtgtgttacctggacgtgacaccttgattttaactcatgatccacagtttaaggcagaaggtgtaagcattgtccacagtgtcccagaagctctttcttggtacaggcagcaagacaaaagtttatttattgttggtggtgcatctatttataaagcttttgaaagttattatgataaaataataaaaacatcagttcatggacagtttgaaggagatacttattttcctctaagagatttttctagttttcaggaaatttctcaagctttttttgaaaaagatgaaaataacagtcatgactttactgttactgtacttgagaaaaaggaa

SEQ ID NO: 36164 - DNA, 918 bp, Streptococcus mutans
atggaaattataaaaatagacagtcataaagatattgagcaacaagaagattcggtcttggttttgggctattttgatgggcttcatagagggcataaggaactttttaatcaagctagggaaatagcccaaaagatgcaactgaaaatagttgtcttgacctttccagagtctcctcaattagctttcacgcgttttgagcccgatttactcaatcatattaattacccagaaaaacgctattgtaagtttgcagagtacggagttgactgtctttatttgacagattttacttcttcctttgcaaagatcagttctgatgattttatcaaaaactatattaaagctctgaaagctaaggctgttgttatggggtttgattataaattcagtcatagtaaagcaaattctgattatcttaagcatcattttgcggggcaagtcattaccgttcctgaagtacagtatgaggggaagaagattagttcaacgcgcgtgcgccagctcattaaacaaggtgatatgactcaagttaaccgtcttttaggctatgagttttcaacacgaggaatagtggtacacggtgatgccagaggacgtacaattggttttccaactgctaatcttgcaccgctggatcggacttatttaccagccgatggtgtttatgtggctgatgttattgtcggcaggaagcgttatcgttccatgaccagtattggtaaaaatatcacttttggaggaacggaattgcgtcttgaagctaatatatttgactttgacgatgatatttacggcgagacaattgaaattttctggctaaataaaattcgtgaaatggttaaatttaatagcgtcaatgatttggttgaacaattaaaatctgataaagaaattgcgataaattggggaaaatca

SEQ ID NO: 36165 - DNA, 840 bp, Streptococcus mutans
atgacctcgcacgacgcagtcttcaagcttcgtaaaatactaaaagaaaaaaaaattggacacgggggaaccttggatcctgatgttattggcgtccttcccattgcagttggcaaggccacacgggttctggaatacatgacagaagctggtaaggtctatgaaggtcaaataacgcttggtttttcaacaacaactgaagatgctagcggtgagcttctccaatggacaccagttgatgaaaccttgtctgtggagcttattgatcaggcgatgacatgttttatgggtcaaatcacacaagttccgcccatgtattcagccgtcaaagtcaatggaaaaaaattatacgaatatgcgcgtgcaggtcaggaagtagaacgtcctcagcgtcaagtcaggatttatgattttaaacggactagtgatttggtttttgaggatgaatgctgtcactttgattttagggtttcttgcagcaagggaacttatatcagaaccttggcggttgatttgggtcaaaaacttggctatgccagtcacatgtccttcctaaaacgaacagcatcagctggtttagatttaagtcaagctttaacattagctgaaattgctgaaaaagttgaagagaaagatttctcttttcttttgccaatagaatatggtgttcttgatttaccaagaatagacttaaatccaaaacaaaccaaagaagtttcttttggaagacgccttaaactgctccgtcaggaagaattgttagcagctttttttgaaaatcagctggttgccgttttggaaaaaagagatacctcttacaaacctaaaaaggtttttctt

SEQ ID NO: 36166 - DNA, 1230 bp, Streptococcus mutans
atggctggaaatagaaccaatgatgtcacagtgcattgttcattctgtggcaaaaatcaagatgaagttaaaaaaattattgcaggtaatggcgtttttatttgcaatgaatgtgttgaattatcacaagaaattatccgtgaagaactagcagaagaggtattggctgatctttcagaagttccaaaaccaaaagaattgttggcaatactagacagttatgttatcggtcaggaccgtgccaaacgtgctttagcagttgctgtctataatcattataagcgtatcagttttactgagagccaagacgaccaagatgttgacttacaaaaatcaaatattcttatgattggaccgacaggttctggaaaaactttcttagcacagactttggctaagagtctcaatgtgccctttgctattgctgatgcaacagccttgactgaagcgggttatgtaggtgaagatgttgaaaacattttgcttaaattgattcaggcagctgattataatgttgaacgcgcggagcgtggcatcatttatgttgatgaaattgataagattgctaaaaaaggcgaaaatgtttccatcacacgtgatgtatctggtgaaggtgtccaacaagctctgcttaagattattgaaggaacagtagctagtgtgccaccacaaggtggtcggaaacatccccaacaggaaatgattcaaattgatacgaaaaacatcctcttcatagttggtggcgcttttgatggtattgaagatatcgttaaacagcgtttgggtgagaaaattattggctttggtcaaaataataagaagattgatgatcaatcttcttatatgcaagaaattatttcagaagacattcaaaaatttggtcttattccagagtttattggtcgtttgccagttttagctgcgcttgagcaattaacggttgatgatttggttaagattttgacagaacctaaaaatgctttagttaaacaatatcagacgcttttatcttatgatggtgttgagcttgagtttgatcaagaggcgcttcaagcgattgctcaaaaggcgattgaacgtaagacaggcgcacgcggtcttcgctctattattgaagaaacgatgctggatctgatgtttgaaattccgagtcaagaggatgtcacttgcgttcgcattactaagaaagcggtagaagggaccgacaaacctattcttgagacagcttcc

SEQ ID NO: 36167 - DNA, 1374 bp, Streptococcus mutans
atggaaaaccacaattttgaaaatgaaggtcagtttaagcgaaaaatgaccagtcgtcatctctttatgttgtccttaggcggtgttattggaacagggcttttcttaagttcaggttatacaattgctcaagctggtcccttaggagcggtaatttcttatttagttggtgctattgttgtttaccttgtgatgctttctttgggtgaattagcagtagctatgcctgttacaggttcttttcatacctatgctaccaaattcatcagtcctggaactggttttaccattgcttggctttattggatttgttggacggttgctttagggacagagtttcttggtgcaggtatgttgatgggacggtgggttccttatgttcccacttgggtctttgcagcactttttgccttgcttatttttggtctcaatgctctcagtgttcgttcttttgctgaagcagaatccttcttttctagtataaaggttttagctattcttgtttttattattcttggttttggagccatgcttggtttggtttcttttaatggtaagcacgaagtatttctttttagtcatttgacagctcatggagctctgccaaagggacttccagcattaatgtcagtcatgctggcagttaattatgccttttctggaacagagctcatcgggattgcagcgggagaaacgaacaatcctaaagaagctgttcccaaggctattaaaacaacaattggtcgtttagtgattttctttgtattgacaattgttgtcttagcatcgtttttaccaatgaaagaagcaggtgtatccagtgctccttttgttgatgtttttgataagatgggcattccttttgctgctgatatcatgaatttcgttattttgacagctattttgtctgctggtaattcaggactttatgcttccagccgcatgctttggtctttggccaacgaaggtatgattagtccgagggttgttaaaatcaatgaacacggtgttcctatgagagctttgctcctatcgatggcaggtgctgttttatccttgttttcaagtatctatgcggcagataccgtttatttggctctgatgtcaatcgctggctttgctgttgttgtagtctggttgtccattcctatggcacaaattaattttcgtaaggaatggctgaaaagtcatgcccaagaagacttgttttataaaacgccttttactccaattctgccttacattacgattatgctattgttgatttcgattattggtattgcttgggatgcatcacaaagagcgggtctttatttcggtataccttttattctactttgttatctttattattattggcggcataagacattg

SEQ ID NO: 36168 - DNA, 906 bp, Streptococcus mutans
atgaacaattacatcattgaaaccaagcaattaagcaaggatttttcaggtgaggcagctgttaatcagctttcaattcatgttagaaaaaatgaaatttacggttttttaggacccaacggtgctggcaaaagcacggctatgaaaatgcttttagggctgctgcaaccaacgcatggctctattagactctttgacaaaaattttgacagcaatcaaattgcactgctttcaagtgtaggatctctcattgaagagccatcctactatgctaatttgaccggttatgaaaatctagagattattcaacgtttgcttaaattacccaaggaaaatattgataaggttttgaaaattgttaagctttacgagcaaaaagataagctggttaaaaactattcactagggatgaagcaacgtttaggcattgccttagccattataaaattccctaaattactgattttagatgagccaaccaacggactagatcctgctggtattcaggaaatccgtgaactgattaaatccttacctcaaaaatatgacatgaccgtcattatttccagtcacatcttgtcggagattgaacagatggctaccactgttggtattattaacaaagggaaactactttttgaaggacaacttactgagttggaagaagatgaaaaatacctttttgagaccagtgatgatgcactcgctgaacagctattgatgcgaaaaggttttgagctagaagaaaatcagagcatagtacttaaagattacaacaaaactaatatcgcagcggctgttaaagttttagtggcaaatgacattgatatttaccaagtccgcatggtgcgtaaatcactggaagaggtcttccttgatatgacaggacgagaaggaggtgtcttg

SEQ ID NO: 36169 - DNA, 2103 bp, Streptococcus mutans
atggcaaattttaatggacgcgatccttttggaaatatggacgatatttttaatcaattaatgggtaatatggggggatacaactctgaaaaccgtcgatatttaattaacggtcgtgaagtaagtcccgaagaattcgcacaatacagacaaacaggtaagcttcctggcaatccagaaatacagcaagctcaagctgctgctagaactccaaaagaagacagtattttgactaagcttggtaacaatttaaccgaagaagccagacaaggtaaccttgatcctgttattggacggaataaagaaattcaagaaactgctgagatcttagctcggcggactaaaaacaatcctgttctggtcggtgatgccggtgttggtaaaacagctgtcgttgaaggcttagcacaggctattgttaacggtgatgtccctgccagtattaaaaataaggaagttatttctattgatatttcaggattagaagctggtacacaataccgtggtgctttcgaagaaaatattcaaaacttggttaaagaagtcaaagaagctggcaatatcatcctcttctttgatgaaattcatcaaattttaggtgctggttcaactggtggtgacagtggttctaaaggtttggcagacattatcaaacctgctttatctcgcggtgaattgactgttatcggtgctactacgcaagatgaataccgcaataccattatgaaaaacgctgcattggcacgtcgtttcaacgaagtcaaagtaaatgcaccttctgctgaggatacttacgaaattttaaaaggtatttcagctctctacgaacaacatcataatgttattttgcctaaggaagttttaaaagctgctgttgacttatccgtacaatacatcccgcaacgcagtctgcctgataaggccattgaccttgttgatatgacagctgctcatctggctgctcaacatccagcaactgatgttaagacacttgaaaaagaaattcaaactgaaaaagataaacaacaagctgctgctgaaaaagaagattatgaggaagctcttaaatcaaaaactaaaattgataaactgcaagcacaaattgacaatcatactgaagggcaaaaggtcactgctactatcaacgatgtggctgaggcagttgaacgtttgacaggtatccctgtttcgcaaatgggaagcagtgacattgaacgtctaaaagaaatgaattctcgtctcaaaggcaaagttattggtcaagatgaagctgttgaagctgtttcacgcgctattcgccgtaaccgtgctggttttgatgaaggcaaccgtccaatcggcagtttcctttttgtcggacctactggtgttggtaaaacagaattggctaagcagttagccttggatatgtttggttctaaagactctattatccgtcttgatatgtcagagtacagtgatcgtacagctgtttccaaattgattggtactactgccggttatgtcggctatgatgataacagcaatacattgactgaacgtgttcgccgcaatccttattctatcgttttacttgatgagattgaaaaggctgactctcaagtcatcactcttctccttcaagtattggatgatggtcgtttgacagacggacaaggtaataccattaactttaagaataccgtgattattgcaacttctaatgctggttttggtaatgaagcattaactggtcaggaagataaggacatgaagatcatggatcgcattgccccttacttccgtcccgagtttttaaaccgtttcaatgcagttattgaattctctcacttaagcaaagaagacttggatgaaatcgttaatctcatgctatctgaagtgaataccacgcttgctaagaaaggaattgatcttgttgtcagtgacagcgccaaggcacatttgattgaagaaggttatgacgaagcaatgggtgttcgtccattacgccgagttatcgagcaagaaattcgtgataaagtaactgacttctatcttgatcatacagatgttaaacatctcaaagctgaaatgcaagatgacaaattgattattgaagaagct

SEQ ID NO: 36170 - DNA, 501 bp, Streptococcus mutans
atgagtgaagcaagtattgctaaaaaagcagaattagttgatgctgttgctgagaaaatgaaagcagctgtaagtatcgtcgttgttgattcacgtggtcttactgttgaacaagatactgttcttcgtcgtaacttgcgtgaaagtgctgttgaattcaaagttatcaagaattcaatcttacgtcgtgctgctgaaaaagctggtcttgaaggatttgatgatatctttactggaccatcagctgttgcattttcaaatgaagatgttgtggcaccagctaaaattattaacgattttgctaaagatgctgaagcacttgaaatcaaaggcggtgcaatcgaaggtgctgtttctacaaaagaagaaattcaagctctcgcagcacttccaaacagagaaggacttctttctatgctcttgtctgtacttcaagcgccagtccgcaacgttgcatatgctgtcaaagctgttgcagaaagcaaagacgaagacgccgct

SEQ ID NO: 36171 - DNA, 366 bp, Streptococcus mutans
atggcattgaacattgaaaacattattgctgaaattaaagaagcttcaatccttgagcttaacgatcttgtaaaagcgattgaagaagaatttggtgtaactgcagctgctcctgtagctgcggctggtgcagctggtggagaagaagcagctgctaaagattcatttgatatcgaattgactgctggtggtgacaagaaagttgctgttatcaaagttgttcgtgaaatcacaggcgaaggtcttaaagaagctaaaggtcttgttgataacgcaccatctgtacttaaagaaggtgttgcagcagcagaagctgaagaacttaaagctaaacttgaagaagctggagcaactgttactcttaaa

SEQ ID NO: 36172 - DNA, 864 bp, Streptococcus mutans
atgaaaattacagtacctgcaacatcagctaatattggacccggctttgactctgtcggtgttgctctttccaaatatctttctattgaagttttagaagaagctgcttcttggcatattagtcatgatttgggtgatattccaagtgatgagcataatttgttgcttgtaacagctttaaaagtggcaccagatctcagacctcatcgcttacgtatggttagtgacattcctctggcaagaggattaggatcgtcaagctctgttattgttgcaggtattgaattggctaatcaattagcagatctgaatttgacagacagtgaaaagttagacattgcaacggaaattgaaggacatccagacaatgtggcaccggctttatttggaaacctcgtgatttccagttatatcaatcaaaaagttaattatgttgttgctgattttcccaaaagctcttttattgcttttatccctaattatgagttaaagaccagtgacagccgtgatgttttaccaacagatttaacatataaggaagcggtggctgctagctcaattgctaatgttgctattgccggtcttttgactggtgatttaaagacagcgggtgaagctattatgaatgaccgctttcatgaacgttttcgtcaatccttggtaagggaatttgcacaaattaaggagatcggtaagcgaaacggtgcttatgccagctacctttctggtgcagggccgacggttattgtcttaacggatcaagataaggctgatcaaatcaaggcggacattgatgctttagagctaagtggtagtactcatttgcttcgtattgatgctaagggtgtaagggtcgagaaaaat

SEQ ID NO: 36173 - DNA, 2272 bp, Streptococcus mutans
atgaaccctttattacatggaatgaatgaaaaacaagcgcaagctgtgaaaacaacgggaaggtccgcttttgattatggcaggtgcagggtcgggtaagacacgtgttttaacccatcgcattgcttatttgattgatgagaagtttatcaatccttggaatattttagccattacctttaccaataaagctgcgcgtgaaatgaaagaacgtgcttttgctctaaatgctgcgacacaggagactttaattgcgacttttcattctatgtgcgtacggattttacgtcgtgatgcagatcatattggttacaaccgtaactttactattgttgatcccggtgaacaacgcacgcttatgaagcgtatttttaagaattttaatatagactctaaaaagtggaatgagcgtgctgtcttagctgccatttccaatgctaaaaacgatttacttgatgaaatcgcttatgaaaatagggcgggggattcatatacacagcttgtcgctaaatgctataaggcctaccaaagtgaactgcgtcaatcggaagctatggactttgatgacctcattatgctgaccttgcgtctttttgaccaaaatcctgatgttttggcttattatcagcagcgttaccagtatattcatgtggatgagtatcaagatactaaccatgcccagtatcagctggttaagcttttggcttcacgatttaaaaatatttgtgtggttggggatgctgatcagtctatttatggttggcgtggtgctgatatgcagaatatccttgattttgaaaaggattatcctgaggctaaggtagtgctcttggaggagaactatcgctcttccaagaagattttgcaagctgccaatgatgttattaaaaataatcgtaatcgccgagataagaaactctggacgcaaaatgatgatggagagcagatcgtttattatcgggcagatgatgaacaggatgaggctgtttttgtcgcctcaactattgctaatattgttcgtgaaatggggaaaaattttaaggatttcgcagttctttatcgtaccaatgcgcagtcacgtaccattgaagaggctctgcttaagtccaatattccctacactatggttggcgggactaagttttacagccgcaaggaaattcgtgatattatcgcttatttgaatgtaattgctaacactgccgacaatatctcctttgagcgtattgtcaatgaacccaagcgcggtgttggaccagggactctggaaaaaattcgtaactttgctaatctgcagggcatgagtctgttagaagcttctgaaaatatcatgctctcttccatcaagggaaaggctgtacaagcagtttatgagctggctaatatgataatagacttgcgttctaaactggatcattacagcattacagaagttgttgaagcagttctagacagttctggttaccttgaggttttagagattcaaaagactctggaaagtcagactcggattgaaaatatagaagagtttctttctgttaccaaaaattttgacgatacgactgatgatgttcctgaaaatgaaacaggtcttgaaaggttaagtcgctttcttaatgatttagctttgattgctgatacagatgaagctgaaagtgagtcagctgaagtcaccctgatgacgctgcatgctgctaagggactggaatttccaatagtcttccttattggacttgaagagggtgtatttcctttgtcgcgctccatggaagaagaaagcgaactggaagaagagcgccgtctggcttatgttggaatcacgcgagcggaacaaatgctttttatcaccaacgctaattctcgcacactttatggccgtactagctacaatcgcgaaagtcgctttattcaggaaatttcagaagatttgctggtgcatcagggattggcgcgtccagccagagcttcctttaaagttagttatcaagacagcaatgaaactaaatttggtcaaggaatgagtctggctcaggctttacaggctcgaaaagttgcttcacagcctaagaagtctcctttttcaaatagcaaggatgatcagaaagaacacattgattggcaaattggcgatactgctcatcataagaaatggggagatggcactgtcttagaagtttcgggcagtggaagtgctcaggaactgaaaattaaattcccagaaattggcttgaaaaaagttttggctagtgtagcaccccttgagaaaaaggag

SEQ ID NO: 36174 - DNA, 798 bp, Streptococcus mutans
atgaaaattggtaaatatgatgtagctggtaaagcagctattatggggattctcaatgtaaccccagattcattttcagatggcggacaatacgaaacaatcgatcaggctctaaaacaggttgaagccatgttggcagcaggagcggctatcattgatatcggcggagaatccacacgtcccggcgcagcatttgtttctgctgaggatgaaattaaacggattgttccaattgttgaagctattagcgaaaagtttaactgcctgattagcattgatacctataagactgagactgctcgagtagcccttgctgcgggagcgcacatcttaaatgatgtgtggtctggtctttatgatgggcaaatgtttcaattagcagctgaaactggagcgcctattattttgatgcacaatcagtgtgaagaagtttatggcaatgtgacagaagatgtttgccaattcttgctggaacgtgctgatttagcccaaaaaacaggagttaaaaaagaaaatatttggcttgatcctggttttggtttcgctaaaaatgtcgaacaaaacatggaacttctacgaggcttagcggaggtgactaagcttggttatcctgttttatttggtatttctagaaaacgtgttgttgatagtttgttaggcggtcataccaagccgcaagagcgagacatggcgacagcggctctttctggctatgccattagtaagggctgcaaaattgttagagtacataacgtggctgccaacaaagacattgtaaaggtcagcagccagttagca

SEQ ID NO: 36175 - DNA, 831 bp, Streptococcus mutans
atgacattcaaaaaagcagtaacagctcttattacttttctagcagtagtaactttgacagcctgtggtaaaaaaggagctgattcccaagataattggaaaaaatttgagtcgaaaaaatctgttactattggttttgataatacttttgttcccatgggatttaaagacaagaatggtaaaaatgttggctttgatattgacttagcaaatgctgtctttaatgaatacggtatcaaggtgaaatggcagccaatcaattgggatttgaaggaaacggagctgaaaaatggtaaaattgatttgatttggaatggctattccaaaactagggaacgtgcacgcaaggtatcctttaccaagccttatatgaaaaatgaccaagttcttgtcacgaagaagtcatctggtattacgagctttgctgatatgaaaggcaaagctttaggtgctcagtcaggttcatctggctatgatgctttcacagctaatcctaaaattttaaaagatattgttaaagataatgatgccagtcaatatgaaacctttacccaagccttcattgacttaaaaaatgatcgtattaatggtcttttaattgatcgtgtttatgccaattattaccttaagcaggaaaaggaacttgataactataatattatcaaaggaaaatatgccagtgaagatttttcagttggagtgcgcaaatctgataaaaccttgaagaagaaagtcaatcaagctttcaaaaagctttacaaaaatggtaaattccaagcaatctcccaaaaatggtttggtcaagatgttgcttcaaatgcgattaagagg

SEQ ID NO: 36176 - DNA, 527 bp, Streptococcus mutans
attgaaacgagagcgctcatgacacttgtttatttaagtctaggcagtaacataggagaacggcagacttatttgcagagagctttagaggaactggctcatctctctcatattactttacaggcagtgtcccctatctatgaaacagcggcctggggaaagacagatcaagctgattttttaaatattgtttgtcaactcgaaactgacttatcaccatacgatttactagaggcttgtcaaaaaattgaaaaacatttaaatcgtgtccgtcatgaacattggggtcccagaacaattgatattgatatcttattttatggaaatactattattaaagaggataacctcaaaatcccccatccctatttgcagaatcgtgcttttgttttggttcctcttaatgatattgccagtgaattagttcatccggttttaaaggaaacggtagctgttttgctggaaaaagtggacaaatcaggagttaaaatctggtaggaaatctatcagtttgggaaattatgaat

SEQ ID NO: 36177 - DNA, 1146 bp, Streptococcus mutans
atgaaaaaagcagtacattttggagcaggcaatattggccgtggttttattggacaaattttatttgaaaatggctttgctattgattttgtcgatgttaacgataaaattattaatgctcttaatgaacgtcattcttatgatattgaaattgcagaagatgggaaacgtcacattacagtttctaatgttgctggcattaataacaaggaaaatcctcaagcagtcattgatgctgtggctgaaacagagttgattacaaccgctattggccctaacattttgccttttattgcccaattaattgccaaaggtattgaaaaacgccgtgaaagtcagaatcaaacgccactggatatcattgcctgtgaaaatatgattggtggctctgcctttctctggcaggaagtgcagaaatacctcagcgctgatggtttagcttttgctaaagattatattggctttccaaatgctgctgttgaccgtattgttccagctcaggttcatgaagatcccctctttgttgtggttgagccattttcagaatgggtagtcgaaactgctgctatgaaaaatcctgatttaaaattgtcttcagttcactatgaagaaaatttggaaccattcattgaaagaaagcttttctctgttaattcaggtcatgcaacaacagcttatacaggtgcttattttggtgctaagacggtcctagaagcacttaaagaccaacaagttaaagagcaagtaaaggcagttttaggtgaaattcgccagcttttaatggctaaatggcaattcaaagagaatgatctgaaagtttatcatgatattattatcagtcgttttgaaaatccttatattgtagatgatgttactcgtgttgccagaacaccaattcgtaagttaggttatgatgaacgctttatccgtcccattcgtgagctgaaagatcgtggtttatcttatgaatatcttttgcaaacagtggcttatgttttccattacaaggattcaaatgatgaacaaagtgttcaacttaaactgcttctacaagaaaagtctttaaaagcagttgttaaagaagtaacaggattgacagatgccgctttgattgaagaaattgttaccagtgttgaatctttagat

SEQ ID NO: 36178 - DNA, 435 bp, Streptococcus mutans
atggaatttcaaaaagatttaattaaattgaaccaacattttcccgataaggaagctgctattcgtttttgtggacagctcttagctgatggtggttacgtagaaccagcttatattgacgccatgattcagcgcgataaagaactctctgtttatatgggaaatttcattgccattcctcatggaacggacgacgctaaaaaggatgttctcaaatcaggtatcacagttgttcaggtaccagacggtgttaattttggaacagaagacgatccgcaagttgcgacagttttatttggcatcgctggaattggtgatgaacatttgcaaatcattcaaaatatttcgattttctgtgcagatgttgataatgttgttaagttagctgatgctcaaacagaagatgaggttgtcaaacttttaagtcaagtcaat

SEQ ID NO: 36179 - DNA, 1503 bp, Streptococcus mutans
ttggcaattaacgcacaagaaattagcgctttaattaaaaagcaaattgaaaacttccagccaaattttgatgtcacagagactggtgttgttacttatatcggtgatggtattgctcgtgcttgcggacttgataatgctatgagcggtgaattgcttgagtttgacaatggaactttcggaatggcgcaaaaccttgagtctagtgatatcggtattattattcttggtgattttaatagtattcgtgaaggtgacacggttaagcgtactggtaaaattatggaagtaccagtcggccagtcgcttattggccgagtcgttaatccgcttggtcagcctgttgatggtctgggtgaaattgaaacgactgcgacacgtcctgtcgaagcggcagctcctggtgtcatgcagcgtcaatctgtttctgaacctttgcaaacaggaataaaggccattgatgctttggtaccaattggccgcggacagcgtgaattggttatcggagaccgtcaaaccggtaagacttcaattgccattgatgctattattaaccaaaagggacaagatatgatttgtatctatgttgctataggtcaaaaggagtctactgttcgcagtcaagtagaggttcttcgtaaatatggcgctcttgattatactattgtagtgacagcttcggcttcgcaaccttcacctttgctttacattgctccttatgcaggtgttgcaatggcagaagaatttatgtacaatggcaaacatgctttgattgtttatgatgacttatcaaaacaagcagtagcttatcgtgaactttctttgcttttgcgccgtccaccgggacgtgaagcctatcctggggatgtcttctatcttcatagccgtcttttggaacgttctgctaagctttctgatgagctgggcggcggctctattacagccttaccatttattgaaacgcaagcaggtgatatttcagcttatattgcaaccaacgttatttccatcactgacggtcaaattttccttcaagaaaatttgtttaactcaggaatccgtccagctattgatgccggatcttctgtatcacgtgttggtggttctgcccaaattaaggccatgaaaaaagttgcaggaactcttcgtctcgacttggcttcttatcgtgaacttgaagcctttacacagtttggttctgatcttgattcagcaacacaagctaagcttaatcgcggacgtcgtacagtagaagttcttaaacaaggtcttcacaaacctttggcagttgaaaaacaagtcttgattctttatgctttgacacatggctttttagacagtgttcctgttgatgatattttgactttccaagatgatatgtttgattacattgactcacacgacgctgatatctttgaaacgattcgcacaacgaaagatcttccagaagaagcagtgctggacaaagccattcagactttcaaagatcagtcacaatttagt

SEQ ID NO: 36180 - DNA, 534 bp, Streptococcus mutans
atggataaaaaaacgcaggctgtgactgagatctatgccaagagtcttgttgaagtcgctcttgaaagagattcagtccctattatctatgatgaagttagagcaattttgagtgttcttgatgatcagcaagtacaagattttttagcaagcaaggcaattgatctgtctgctaaatctgaagttgtaagactgtttcaagagtcttgttcgaactatatgaaacagtttcttgagattatcttacaaaatgaacgtcagcagcttctttatcttataatgaaagaagttttgaaagagctcagtcttaagacacatatctttgatattgaggtaacgacagctgtcgctctttcagatgatcaaaaagaacggttgacagcacttgttgaaaagaaatttgccctaaccaaacgaaatcttattgaaaaaattgatgatgaaatcattggtggttttattattaaagcaaataataaggtaattgacactagtattcgtagccaattacaagaattaaaaatgaatttgaaa

SEQ ID NO: 36181 - DNA, 1812 bp, Streptococcus mutans
atgtgtggtattgtaggtgttgtcggcaatcgtaatgcaaccgatatcctaatgcaaggattggaaaaattggaatatagaggttatgattcagcaggaatatatgttattaatcaacctgaaaatggacgtttaattaaatcagtaggacgaattgctgatttgcgagctaagattggtatcgatgttgctggttctacagggattggtcatacacgttgggcaacccatgggcaagcgacggaggaaaatgctcatccacatgcatcggctacaggtcgtcttgtcttggttcacaatggtgtcattgaaaattatctccaaattaaagaaaattatttggcaggacataacttgaaaggtgaaacagacacagaaattgcagttcatttgatcggtcaatttgtgacagatggtttgtctgtacttgaatctttcaagaaggccttgcatatcattgaaggttcttatgcctttgctttaattgattcgcaaaatccagatattatttatgtggctaaaaataaatcaccacttctaatcggtctaggtgaaggctataatatggtttgttcagatgctatggctatgattcgtgaaaccaatcaatttatggaaattcatgataaagaacttgttgttttaacaaaagatacggctcaagtatcagattatgatggcaatcctgttgaacgtcaagcatatacagcagaacttgatttatcagatattggtaaaggaacctatccttactacatgcttaaagaaattgatgaacagccaacagttatgcgtaaattgatttcaacttatgctaatgaaaatggtaagttaacagttgatcctgctattgtgaaatctgttcaagaagctgatcgcatctatattttagctgctggaacatcttataatgccggttttgcctcaaaatcaatgattgagaccttgaccgatacgcctgttgaattagggattgcatcggaatggggctataacatgccattattgagtaaaaagccaatgttcatcttgttaagtcagtctggagaaacagctgatagtcgtcaggtcttggttaaggctaatgccatgggagttccaagtttgacaatcacaaatgttcctggatcaaccttgtcacgtgaagcaacttataccatgttactacatgctggacctgaaattgctgtggcatcaaccaaggcttatacagcgcaaattgctgcccttgctttcctttcaaaagcagttggagaagccaatggtaaaaaagaagcgctagaatttgacttggtacatgaattatccattgtcgctcagtctattgaagctagtctttcggagcgagaagttattgaaaagaaggttgctaatcttttagcaacatcacgtaatgctttttatattggtcgtggtaatgactattatgtggctatggaagcatcactcaaattaaaagaaatttcatatattcaatgtgaaggctttgctgctggagaattaaaacatggaaccatttcccttattgaagagggcacacctgttcttgccttgatttcatctagtgagactgttgctgctcatacgcgcggaaatatccaagaagttgctgctcgaggtgccaatgtcttaactgttgttgaagaaggtttaaataaggaagaagatgatgtggttgtcaatcaagtccatccttatctttcaagtatttcaatggttattccaacgcaattgatcgcatactatgcctcacttcaacgtggtcttgatgttgataaaccacgtaatttggctaaagctgttactgttgaa

SEQ ID NO: 36182 - DNA, 495 bp, Streptococcus mutans
atgtcaacacttattaatggaacaagtctaggcaatttgcttatcgtgacaggatcttttatccttttattacttctggttaagaaatttgcttggtctcagctggcagctattttcaaagcacgagaagaaaaaattgcaaaggatattgatgatgctgaaaattcacgtcaaaatgctcaggttttagagaataaacgtcaagttgagcttaaccaagctaaggatgaagctgcccaaattattgataacgctaaggaaactggtaaagctcaagagtctaagattataacagaagctcatgaggaagccggtcgtctaaaagataaggccaatcaagatattgctacaagcaaggcagaagccctatcaagcgttaaggcagatgtggcagatcttagtgttcttttagccgaaaaaattatggcaaaaaatcttgataagacagctcaaggtgacttaattgatagctacttagacaaattaggagatgcc

SEQ ID NO: 36183 - DNA, 717 bp, Streptococcus mutans
ttggaaaaaacaataaatccaacggttaaattcttaggtattgagtttgacttaaccatcttgatgatgtctctcttagttgttcttattgcattcttatttgtcttttggacaagccgccatctgaaaataaagcctacgggcagacaaaatgttttagaatggatctatgattttgtccttggaattatcaagcctaatttaggttcttatactaaaaattacagcctatttgctttttgtctcttcctttttgtttttgttgctaacaatattggtttattaacaaagattcaagttaaagattataatttatggacttccccaacagcaaattttgcagttgattttggtctttctttaatggtggcggtaatctgtcactttgaaggtattcgtaagcatggcttgaaaacatacttaaaggattatttagaaccgacagcagctatgttgcctatgaatctcttagaagaactaacgaatattatttcactgtctcttcgtttatatggtaatatttatgctggtgaagttgttatggcgcttttggtacagtttgctgattttagcccgtatgcgacaccaatagcctttctgcttaacatggcttggattggattttctattttcatctcaggaatacaagcctatgtctttgttcttttaacgacgacttatattggtaaaaaggtcaatattgatactaaaggcaat

SEQ ID NO: 36184 - DNA, 1500 bp, Streptococcus mutans
atgaataaacgcgtaaaaattgttgcaactttaggtccagcggtagaaatccgtggtggtaaaaaatttggtgaagatggctattggggtgaaaagcttgatgttgaagcttcagcagcaaaaattgctgaattgattacagaaggagccaatgtttttcgttttaacttttcacatggtgaccatgctgagcaaggtgaacgtatggcgactgtacgtcgcgcggaagaattggcacgtcaaaaggttggattccttcttgatactaaaggacctgaaatgcgtacagaattgtttgcagatggtgtcaaagaatatgaatataagactggtgataaacttcgtatagcaactaaacaaggcattgaatcaactaaggatgtcattgctttaaatgttgcaggcggtcttgatatttatgatgatgttgctgtcggtcagactattcttattgatgatgggaaacttggccttacagtaaccgctaaagatattacaactcgcgagtttgaagtaaccgttgaaaatgatggcattattgctaaacaaaaaggtgtcaatattcctaatactaaaattcctttcccagcacttgctgagcgtgataatgcagatattcgctttggtttggaacaaggtcttaactttattgctatttcttttgttcgtactgctaaggatgttaatgaagttcgtcaaatttgtaaagaaacaggtaacgagcacgtaaaactttttgctaaaattgaaaatcaacaaggtattgataacattgatgaaatcattgatgcagctgacggtatcatgattgctcgcggtgacatgggtattgaagtgccgtttgaaatggttccagtttatcaaaaaatgattatcacgaaagttaatgcagcagggaagtcagctatcacagcaacaaatatgcttgaaacaatgactgacaaaccacgtgcaacacgttccgaagtctctgatgtctttaatgctgtcattgatggtactgatgcaacaatgctttctggtgaatcagctaatggtaagtatccagttgaagctgttcgtaccatggcaacaattgataagaatgctcaaacacttcttaatgaatatggccgtttgaattcagataatttgccacgtaccaacaagactgaggttgtcgcttcagctgttaaagatgcgactaaatcaatggatattaaattggttgttacaattacagaatctggtaacacagctcgtttaatttcaaaataccgtccggatgcagatatcttagctttaacatttgatgaaaaagtccaaaaatcattgatgattaactggggagttattccaatcttaacagaaaaacctgcatctactgatgatatgtttgaaattgcagaaaaagcagctcttaaatcaggtttggtagagtctggtgacaacatcgttattgttgctggtgtaccggttggatctggtggtaccaatactatgcgtgttcgtaccgttcaa

SEQ ID NO: 36185 - DNA, 1011 bp, Streptococcus mutans
atgaaacgtattgctgttttgaccagtggcggagacgctcctggtatgaatgctgccgttcgtgcagtcgttcgtaaagcaatttctgaaggaatggaagtttgcggaatcaatcgtggttatgctggtatggttgaaggagatatcttcccgcttgacgctaaaggtgtatcaaacatcctttctcgtggagggacatttctccagtccgcacgttaccctgaatttgcaaagcttgaggggcaattaaagggtatcgagcaactcaaaaagcatggcattgaaggagtcgttgttataggtggcgatggttcttatcatggtgcgatgcgcttgactgagcatggttttcctgctgtcggtcttccgggtacaattgataacgatatcgtaggaactgattatacaattggttttgatactgcagtaaacactgctacggatgcacttgataaaattcgtgatacctcatttagtcacggcagaacttttgttgttgaggttatgggacgtaatgcaggagatattgctctttggtctggtattgctgccggtgctgaccaaattattattcctgaagagccctatgatattaaagaggttgtcgccaatgtgaaaaatggctatcttagtaagtctaaaaaccaccatctcattgttcttgccgaaggcgttatgcatggtgaagagtttgctgctcagatgaaggaagcaggagataatagtgatcttcgtgttaccaaccttgggcatatcctgcgcggtggtgcaccaactcctcgtgatcgtgtgattgcttcatggatgggagcccatgccgttgaattgctcagggaaggaaaaggcggtcttgccattggtattcaaaatgaggagttggttgagcatccaattcttggatctgcggaagacggtgcactctttagtttaacagaacaaggcgagatcgttgtaaataatccgcataaagcacgtcttgattttgctgctttgaatcgtgatttgtccaac

SEQ ID NO: 36186 - DNA, 3102 bp, Streptococcus mutans
gtgtttgcacaattagatactaaaaccgtttatagttttatggatagcctgattgacttaaaatcttatattaagaaagctaaggagatgggctattcgcatattggtattatggatggagataatctctacggagcttttcattttataaaagaagctcaaaaagaaaaactagtccctattcttggtcttgaactggatttatttttatctgatgatttgacgaccgtatgttttattgctcaaaatacaattggctaccacaatctcttaaaaatttcgacagccaagatgacaggtcaacagcttttctctgatattgaagaatttatggatggtcttgctataattgttccttattttgaaggaattgatcaaatggattttcccttttctttttatattggcgtcagaaaagatactcctcagctggattttaaaagagacattttacctttacatacagtacgttattatgataatgatgatacagagaccttacaaatattacatgctattagagataatcttcctttaagggaagtgcctcctgtttctaaagatcagtatctgttttctcaggaagagatggaacaaatttttgaggaacgttttccacagagcttgttaaatttagaaaagttggttgccaatgtttcttatcagtttgatactgatttgaaattgcctcgttttagtcgagataaacctgctgttgtggaattaaaagaattagcgcaaaagggacttgtagaaaagaaacttttgagtgatgactatcaaaagcgattatctgatgaattggctgtcattcatcaaatgggctttgatgattattttttgattgtctgggacttactgcgctttggccgttcccagcattattatatgggaatgggacgtggttctgcagcagggagtcttgtggcttatgcccttgatattacaggtattgatcctgttaagaatgatttactttttgagcgttttcttaatgaggaacgctacagcatgccagatattgatattgatcttcctgatatttatcggagtcagtttttaaattatgtccgtgatcgttatggttcaacacattcagcacaaattgtgaccttttcgacctttggtgccagacaggcaattcgtgatgtttttaagcgttttggagcgactgaatatgaactcagtcaaatcactaaaaaaattagtttccgcgataatttgacaagtgtttatgacaaaaagattgcttttcgccaactcattaatagtaaaatcgaatatcagcgtgcgttcgaaattgcgaaaaaaattgaaggaaatcctcgtcaaacttccattcatgcggctggaattgtgatgagtgatgataatttaacagatcacattcctctcaaaacaggtgaagaaatgatgatcacgcaatatgatgctccagctgttgaagctaatggtcttttaaaaatggactttctcggactgcgtaatcttacttttattcaaaaaatgcaggaaaaagtagcacaagattatggtcatgccatagatatcagagctattgatttagaagataaagagaccttagcactttttgccgctggagataccaaaggcatttttcagtttgaagcagccggagctatcaatcttttgaaaagaattaaaccttctcgttttgaagaagttgttgcaactaccagtctcaatcgtcctggtgctagtgattatactgaaaattttattcgccgaaaatatgggcaagaagaagtggatttgattgattcatcaattgcttctattttaaaatcgacttatggtattatgctttatcaggaacaagtgatgcaaattgctcagatttttgctggttttacattagggaaagctgatttattacgccgtgctatgtcaaaaaaaaatactgttgaaatgcaaaaaatggaaaaagattttttgcagggtgctgatcagttaggacgagatctaaaagttgcccaaaacttgtttgcaagaatggctaagtttgctggttatggctttaatcgcagtcatgcctacgcatactcagctttagcattccaaatggcttatttcaaagtacactatccagcggtgttctttgatgtcatgttaaattactctagcggtgattatctcagcaatgctttagagactcattttaaattaggacctttgtccattaatacgattccttattctgataaaattagtcatggtcagatttacttgggtttaaaaaacatcaagggtttaaatcgtgattttgcctattggattattggaaaccgtcctttttctagtattgaagattttttaatcagaatacccgaaaagtatcagaaaactgagattatcactcctttaattcaagtaggcctttttgatcagtttgataaaaaccgccagaaaatcgttgtcaatctagaacacctttttacttttgtcaatgaattagggagtttgtttgctgattcttcctataattggatagaagcgcaagattataccaatgctgaaaaatatcagctggaacaagatatcattggtgcaggagttagtccgcatcctctaatagaaattgcaaagcactccagcagacatttaattgctctgactgacctcgttgaaggaaatgaagctaccatattagctcaaattgagtccattagaattattcgaacgaaatccagaggcgagcaaatggcttttctaagtgtgacagatactaagaagaaattgaatatcactctttttccagagacttatcaaaagtacaaaaatttcttaacagaaaaaacgatttattattttactgggaaaatacaggagcgtgataatcaattgcaaatgattttacatcaattagactctgcctcaacagaaaaatgctggattaagttacaaaatcatgattgtgatagagagatatcagaaattttagcagcttaccctggaaatattccagtagttttacattactcaaatactaaagaaactttccaaagcagccgctattttgtcgctaaggatccagaattgcaggaaaagttggcttattatgctctgaaaacgctttttcaa

SEQ ID NO: 36187 - DNA, 369 bp, Streptococcus mutans
atggcttggaaatttaatgagaaatcccctatttatcttcaaattgccaatcatatcaaaatgcaaattatcagtcaagaaatcaaacccggccaacaactagccacagttagagatttagcagaagaagctggcgtaaatcctaatactatgcaacgtgcttttacatcacttgaacaagaagggatggtcttttcagttagaacttcgggacgtttcgtgacaaaggaccagcagttaattgaagaagaaagacacaagttagctcaaacagaacttgaagactttatcaacaagatgacaacaattggctttagcaaagatcgtttaactactatactggaccaatatattaaaggagagacgaaa

SEQ ID NO: 36188 - DNA, 1041 bp, Streptococcus mutans
atggtaagaaaacaaaaacgtgcacgtttaatttacaatccaacttcaggtcaagaaatcatgaagaaaaatgtagcagaagttttagatatcttagagagctttggctacgaaacgagtgcctttcagactacgcccagagcagattctgctaaaaatgaagctgcacgtgccagtcaagcagggtttgatttagtcattgctgccggaggtgatggcactatcaatgaggttgtcagcgggattgcacctctgaaaagacgtcctaaagtggctattattccaacggggacgaccaatgattttgctcgtgctcttaaaatcccccgtggcaatcctgttgaagcaactaagctcattggcaagaaccagaccattcatatggatattggtagggcttataatgacaaatatttcattaatattgccgcagcaggcagtttgacagaattgacctatagtgtgcctagccagctaaagacgatgtttggttatcttgcctacttagtcaagggggcggagctcttaccacgtgttcgaaatgtccctgtcaaggtcttttatgatcatggcgtttttgaaggtgaagcttccatgatttttgtagctttaaccaattctgttggaggctttgaaacgattgctccagatgctaagttggatgatggtaagtttacgctcatcttagttaaaacggctaatctttttgaattaacagatcttattcgtcttgttttaacaggtgggcggcatattaatcacaaaaagatcgagtatattaaaaccagttaccttaaaattattcctcaagggaatcctcctaagcggatgatgattaaccttgatggagagtacggcggtgatgcaccgattgaattgcgcaatttaaaaaatcatattgaattctttgctaatacagatgaaatttcagatgatgcgattactcttgatacagaagaactggtgctagaagcaattgcccagaaatttgcgagagaagcagaaagtctggatgagatggataaaacaaaagagcaagat

SEQ ID NO: 36189 - DNA, 1956 bp, Streptococcus mutans
atgaaagaacgtatgaatgagctggttcagcttcttaatcaatatgccagagaatattatacaaaagataatcccagtgtttcagatgctgagtacgataaactctatcgtgaacttgtagaacttgaaaaagaatttccagaggatattcttcctaatagtccgacgcatcgtgtgggtgaccttgttttagatggttttgaaaagtatagacatgagtatcctttattttctttacaagatgctttttctcgtgaagaattagatgcttttgataggcgtattaaagcagaatttccgcaggctgactatttagcagaattgaaaattgatggtctttctatttctctaacctatgtcaatggccgtttacgagttggggctaccagaggagacgggacagttggtgaaaatatcacggagaaccttaagcgtgtgcgagatattccactgcatttacctgaaaatattgatttgacagtacgtggggaatgctatttgcctaaagcttcctttaaaactatcaatgctgagcgtagggaaaatggtgagactgaatttgcgaatccgcgaaatgcagcggcaggcactttgcgtcaattggatactaaggttgtggctaaacgaaaattggcgacctttatctatcaagaggctggtccgacagctgccagcagtcaggaagcagtactagaaagttttgccaagctcggttttacagtcaatcctcgtcatattatttcctcctcaatggatgctatttggcagtttattgaagatgttgctaaggaaagggctgaacttgcctatgatattgatggcgttgttatcaaagtgaacagtttggccttacaagaggcgctcggttttacagttaaagcacccagatgggccattgcctataaatttccagctgaagaaaaaacagcagaaattttatcggttgactggacagttggtcgaacaggggttgtgacaccaacagctaatttaacacctgttcagctggcaggaacaacggtcagccgagcaaccttacacaatgttgactatattgctgaaaaggatatccgaattggtgacatagttgttgtttataaggctggagatatcattccggcagttttacatgtcgttgaaaacaaacgtgaccagcaagtgccgctaccaattccaacagtctgtccgtcctgtcagagtgaactgatccattttgaggatgaggtggctcttcgctgtgttaatccacgctgtccagcccaattaaaggagaaattgattcattttgctagtcgtgatgctatgaatattataggattaggtccagctattgttgaaaaattatttacagcagaactcatttgcgatgtggctgatatctatcagttgactcctgagaaccttatgcagctcgaagggatcaaggaaaaatcagcaactaagctttataaggctattcaggcttccaaagccaattcagccgaaaaacttttatttggattgggtattcgtcatgtcggcagtaaggcgagcagacttcttatggaacgctttgagagtcttgagcagttagctgctgctgattttgatgatattgctgctattgatggtttgggaattgttattgcagagtctttaaaaacttactttgcaacagcaggcgcacagaaacttttgatagagttaaaaacagcaggtttgaacttgacttatctcggcaaaaaaacagcaagtgatgctgctttaactgggatgacaattgttttaactggtaaactagcaaacttgacccgcagccaagctaaagaaaaactacaaagtcttggtgctaatgtagctggaagtgtttctaaaaaaaccagtctggtcatagcggggagtgatgcaggttctaaattagaaaaggctaaaactttaggaattgaaattaaggatgaagcttggctagaaagtttg

SEQ ID NO: 36190 - DNA, 1197 bp, Streptococcus mutans
atgaatgaatttgaagatttgctaaacagtgttagtgaagtaaatccaggcgacgttgtgactgcagaagtcttaactgtagatggagaacaagcaaaccttgttattgacgggacaggtgttgaagctgtattgacacttcgcgaattgaccaatgatcgtaatgctgacattaatgactttgtcaaagctggtgataaagtcgaggtgcttgttcttcgccaagttgttggtaaagatactgatacagtaactttccttgtctctaaaaaacgcctagaagctcgcaaggcttgggacaaacttgttggtcgtgaaggtgacgttgtgactgttaagggcacacgtgctgttaagggtggactttctgttgaatttgaaggacttcgtggttttattccagcttcaatgattgatacccgttttgttcgcaatactgaaaaatttgttggtcagcaattcgaagcaaaaatcaaagaaattgatccttcagaaaatcgctttatcctttctcgtcgtgatgtggttgaagctgcagctgcaaaggcgcgtgaggaagtcttctcaagacttgctgttggtgatatcgtgactggtactgttgctcgtttgacaagttttggtgcttttattgaccttggtggtgttgacggacttgttcatattactgaattatcgcatgaacgtaatgtttcaccaaaatcagtcgtcactgttggtgaagaaattcaagtgaaggtgcttgctattgatgaagaagcaggccgagtttcactgtctcttaaagcaacaactcctggaccatgggatggtgttgaacaaaaacttgccgctggtgatgttatcgaaggcaaagtaaaacgcttgacagactttggcgcttttgttgaagttcttccaggtattgatggtttggttcatatttcacaaatttcgcacaaacgtgtcgaaaatccaaaggatgttctttcagtcggtcaagatgttactgttaaagttcttgatgttaatactgctgatgaacgtgtctcactttccatcaaagcgcttgaagaacgtccagctcaggatgaaagcaacggagaaaaacgtcaatctcgtcctcgtcgtcaaaaacgtcaagataaacgtgactatgaacttccagaaactcaaactggattctcaatggctgacttgtttggtgatattgaatta

SEQ ID NO: 36191 - DNA, 594 bp, Streptococcus mutans
atgaaattactagttgctgaagatcaatccatgctgcgagatgcgctctgccaattactgcttatggaagatgatgttgaagagatttatcaggcagctgatggtcaagaggcaattgagctacttggtaagcaaacagttgatgttgctattttagatattgaaatgccaatcaaaacaggtttggatgttttagagtggattcgtcagcaccaagatactaaggtcattattgtgacaacgttcaaacgttctggttatttcaaacgcgctttagcagcccatgttgatgcttatgtacttaaggatcgctctgccagtgaattaatggcaaccatttatactgtcctttcaggtcagcgggagtactcaccagagttagttgaagaggtaacctttgacagcaatccgcttagtgaacgggaacaagaagttttacaattggttgctaaaggagcctccaatcaaacaatagcagagcagctttttttgtccaatggaactatccgcaactatatgacagctatttttaacaagcttaacgccaacaatcgaacagatgcagtccgtattgcgcgtgagaatggttggttc

SEQ ID NO: 36192 - DNA, 1023 bp, Streptococcus mutans
atgacagtagatttagattggaaaaatttaggatttgaatatcacaaacttccatttcgctatatttcttactacaaagatgggaaatgggatgacggtaaactgacagaagatgcgactctccacatttctgaaagctcaccagctcttcattatgggcaagaagcttttgaaggtttgaaagcctaccgtacaaaagatggctctgttcagcttttccgtcctaatatgaatgctgagcgcttacaacgtacagctgatcgtctcttgatgccgcaagtgccaactgacaaattcattgatgctgccaaacaagtcgttcgtgccaatgaagagtatgttccaccatatggtacaggggcaacgctttatcttcgcccacttttgattggtgtcggcgatgtgatcggtgttcatccagctgatgaatatatctttaccatctttgctatgccggtaggtaactactttaaaggtggtttggctccgacgaattttcttattcaagatgattatgaccgcgctgcgccacatggcacaggagctgccaaagttggcgggaactacgcggcgagtcttttgccaggtaaggttgcccatgaacgccagttttcagatgttatttatcttgacccagcaacacatactaagattgaagaagtcggttcagctaacttctttggtatcactaaagataatgagtttattacacctcttagtccgtccattcttccttctgttaccaaatattctctgctttatttagctgaacatcgtttcggcatgaaagccattgaaggcgatgtctgcgtagatgaattagataaatttgttgaagcaggagcctgcggtacagcagctgttatctcaccaatcggaggtgtacagcacggtgatgatttccatgtcttttacagtgaaacggaagttggtcctgtaacgcataaattgtatgatgagttaacaggtatccaattcggcgatgttaaagcaccagagggctggatatataaagttgatgac

SEQ ID NO: 36193 - DNA, 699 bp, Streptococcus mutans
atgtccatcacacttccaatttttgtatttggcatgtactatttccaaaatcatctacgtttgcaagaaaaaatggaagcagagattgttgagcaaaaccgcaccatcaatatcctatctgctgaaaatgagcgcaatcggatcggccgtgatttacatgacacattggggcatacctttgccatgatgagtctcaagacggagctggcgcttaagcaaatgaaaaagggtcggtacgaagccgtgcaaaagcaactagaagagctcaatcaaatcagtcatgattccatgcatgaggtgcgcgaacttgtcaatcatctcaaatatcggacagtgtcggaggagctgactgaaatggagcgtctctttggtttatctgatatcagtctatctgttgacaatcagttggacttggacagcttatcccctgttactcagtctactatgaccatggttctgcgggagctggctaataatgtcatcaagcacagccaggctgatgactgtcagattacgatcaaacgtggggaggagattgaagtaactgttgaggataatggtgttggatttgatgaactgacaggtcaggaattgcactctattcgtgaacggcttggtctggtcaatggagaagttgaagttacctcttccaacaatccaacagtcgtcactatttacctaaatgaaggaggacgtcaa

SEQ ID NO: 36194 - DNA, 2418 bp, Streptococcus mutans
atgggagagcgtttcggtcgttactccaaatacatcattcaagaacgggctttgccagatattcgcgatggtctcaagcccgtacagcgccgtattctttattctatgaataaagatggcaatacatatgataaaggttaccgtaaatcagctaagtctgtcggtaatgttatggggaatttccacccgcacggggattcttcaatttatgatgccatggttcgtatgagtcaggattggaagaaccgcgaaaccctgattgaaatgcacgggaacaacggttctatggacggtgatccgccagcagccatgcgttatacagaagcgcgcctatcagagattgcagattatttgctccaagatattgacaagaatacggtagcttgggcttggaactttgatgataccgaaaaagaaccaactgttttgccagcggcctttcctaatctcttggtcaatggtgcaacagggatttctgcgggttatgcgaccgatattccaccgcacaatttagcagaagtaattgatacagttgtctatcttattgatcacccatcagctaagctcgataaactcatggaatttctacccggacccgattttccaacaggagccattattcaaggtaaagatgaaattcgcaaagcttacgaaacaggtaaaggacgcgttgttgttcgctctcgcactgaaattgaaaatcttaagggtgggaagaagcagattgtagcgacagagattccttatgaagtcaataaagcagctctagttaagaaaattgatgatgttcgtcttaacaataaggttcctggaattgccgaagttcgtgacgaatctgaccgtgagggcctgcgcattgctatcgagctcaagaaagatgctgatgagcaaacgattctaaattatctttttaaatacaccgatttgcaaatcaactataattttaatatggtggctatcgataattatacgccgcggcaagttggcattattccaatgttaacgagctatatcgcccatcgtaaagacattattgttgcacgttctaaatttgacaaggaaaaagccgaaaaacgtctccatattgttgaagggcttattcgtgttatttccatcctggacgaggtcattgcacttattcgggcttcggaaaataaagctgatgccaaggaaaatcttaagattagctatgacttttcagaagaacaggcagaggctattgtcaccttgcaactgtatcgtttgaccaataccgatattgttactttggaaaatgaagaagctgaattgcgtgaacgtattacaactctcaatgctattattggtgatgagcgcaccatgtataatgttatgaagcgtgaactgcgtgaagtcaaaaagaaatttggcaatccacgtttgagtgaattacaggctgagacacaaaccattgaaattgacacagccagtctgattgtggaagaagaaacctatgttagtgtcacacgcggcggttatattaaacgaacaagtccacgttctttcaatgcttcaacagttgaagaactcggtaagcgtgatgatgatgatgtcatcttcattcagaatgctaagaccacacaagaactgctgatttttactaatttaggcaatgttatttatcggccgattcatgaattagctgatatccgctggaaggaaatcggtgagcacctcagccaaaacattaccaattttgcaacggatgaagaaattctttatgttgatttagtggatcattttgaagaaggtacctattatgctgcaactcgtctggggcaaattaaacggtttgaacgtcgcgatttgacaccttggcggagttataagtctaaagcagccaaatatgctaaattaaaaggtgatgacgatcaagttatcagaatttcaccaattaaattagatgatgtgatgctaattactgctagaggctatgcgcttcgtttcaatattgaagaagtacctattgtcggtcctaaagcagcagggattaaggctattaacctcaaagagggggattctttggctactgcctttattgccaatacggatagtatttatattttgacacaaagaggcagtctcaaacggatgacaaccaatcttatcccagtgactagccgtgctaaacgtgggcttcaagtacttcgtgagcttaagagtaaacctcatcgtgtttttgcggcaggaccagtcttttccgaagcagcaggggagattgacctatttaccactgtaggtgaacaaggacaagaagaaattctagaaattcaatcgcaaagtttagaaaaatacgaagttaatctggctgaactcttgctatcagaacggactagcaacggttcctttatctcagatactatctctgatcaaggagtctatgcagcaaaaatcaaaatt

SEQ ID NO: 36195 - DNA, 603 bp, Streptococcus mutans
atgacacttgacaataaacttggcttgaccgactcgcttgacctcgccaaggctgaggagaaaatcagcaaggcgcgtgctaagcagctttttgaagcaaggctgcctgatggcaaggaagctggttgttttgcgaccttagcttttattcatcagtttctttttgaggagatttacgattttgctggtcaggttcgcacggtcaatttggctaaaggcaattttcgttttgcccctgtcatgtacttggcggcttccttggaacatattgatagcatgccacaggatagctttgagcagattgttgaaaaatatgtggagatgaacattgcccatccttttcgtgaaggtaatggtcgaagtatgagactttggctagaccatttgttaaaagagaagctgggtcaggtgattgattggtcgcaggtggataaggaagattacctgcttgccatggagcgcagccccatccgcgatactgaaatcaaacatgtcctcaagcaagccctcaccagccaaatcaatgaccgcgaactctacatgaaaggtatagattacagctattcctacgaaggctacaccctctatcacaccgatgatttg

SEQ ID NO: 36196 - DNA, 1947 bp, Streptococcus mutans
ttggctaaaaagaaaattaatattaataattataatgatgatgccattcaggttttagaaggtttggatgccgttcgtaaacgtccgggaatgtacattggttcaacagatgggacaggcctgcaccatttggtttgggaaatcgttgataatgctgttgatgaagctctgtctggttttggtaatcaaattgatgttatcattaacaaagatggcagtataacggtagctgaccatggacgagggatgccaacaggtaaacatgctatgggtattccgactgttgaggttatctttactgttcttcatgcgggcggtaagtttggacaaggcggctataagacttctggaggcttgcatggtgtgggttcttctgttgtcaatgcactgtccagttggttggaagttgaaattacacgcgatggtatagtttacaaacaacgttttgaagatggtggcaaaccagcaacaaccttggagaaggttggcaaggctcccaagtcaaaatcgggaaccaaggtcacctttatgccagatgccggcattttctccacgactaattttgtttataatactattgctgaaagacttaatgagtccgcttttctgcttaagaatgtgactttgaccctgacagatgaaagatcagaagagatagaacatgttgcctttcattatgaaaatggggttcaagactttgtagaatatcttaatgaagacaaggaaatcttgacaccagttatttattttgaaggggaagaagctgattttcaggtagaagttgctctgcaatacaatgatggtttctcagacaatattctctcttttgtcaataatgttcgtaccaaagatggcggaacgcacgaaactggactcaaatctgctatcaccaaggctatgaatgattatgccagaaagacaggtttgctcaaggaaaaagataagaatttggaagggtcagattaccgtgaaggtttatctgccgtcctttctatacttgttccagaagaacacctgcaatttgaagggcaaaccaaggataagttgggaagtcccttagcccgtcccatcgttgatggtttggtgttagagcaattgacctatttcttaatggaaaatggtgaattagcttccaatcttatccgcaaagctattaaagcgcgtgaagcgcgtgaagcagcccgtaaagccagagacgatagcagaaatggcaagaaaaataagaaagataaaggtcttctttcaggaaaactcacaccagcccaatctaaaaaccctaaaaaaaatgaactctatctggtcgaaggagattctgccggcgggtcagccaaacaaggacgcgatcggaagtttcaggctattctccctttacgtggtaaggtactcaataccgctaaggccaaaatggatgatattattaaaaacgaagaaatcaataccatgatttataccataggcgctggtgccggtcctgatttcaaggttgacgattctaattacgataaaatcattatcatgaccgatgccgataccgatggagcccatattcagaccctgctcttaacctttttctatcgttacatgagaccattggtggagacaggacatgtttacatcgccttaccacctctctacaagatgtctaaaggtaaaggagccaaagaagtcgtagaatacgcatggacagacggtgagttagaagatctccgcaaaaaatttggtaaaggagctatgctccagcgctacaagggtctgggggaaatgaatgccgaccagctctgggaaacaaccatgaatcctgaaaatcgtacccttatccgtgtgactattgaagatctggcacgtgccgaacgccgcgtcaacgtcctcatgggcgacaaggttccgccccgtcgcaaatggattgaagataacgttaagtttaccttggaggagagtggggtgttt

SEQ ID NO: 36197 - DNA, 636 bp, Streptococcus mutans
atgaaactaattcttttgataattgcagcctatcttctaggatctataccgacaggactttggattggcaaatatttttacggtaaaaatttacgagactatggcagcggcaatatgggaaccactaatacttttcgtgtcttaggcccaaaagctgggttattaacgtttacagttgactttttaaagggaacgctggcaactctgctgcccatgtggttaggagtaacccatatttctcccttgctgtttggtttttttgctattttaggacacactttccctatttttgctaattttaagggtggtaaggctgtggcaacttcagcaggtattttgttaggttttgctcctttctatcttattttccttttgttcattttcttctttactctttatctaaccagcatgatttccttatcaagtgtcattgctgccagtattgctattattaccgtattgatttttcctgctctacactttcttttaaaagactatgattttctgtttgtcttaattgttatttcagcaggcagtttgattatcatacgccatcgtgaaaatttggtacgtattaaaaataaaaccgaaagtttagttccttttggtctcaatattactaaacaaaaaacacat

SEQ ID NO: 36198 - DNA, 2109 bp, Streptococcus mutans
atgaaaaagaaagcaattattataccggtcttatcaactttgcttttatctggtgctattttaacagcacacgtttatgcagacgatttaacgacggaaccatctgctgatagcagtactcaatcaagcagtctttccttttctgaacagacggctgactcaggacaagagactagtcaggtctctgatgcaatttcttctgttgcagcagtaaaatctgctgatgattccaaatcagtttttgaagatagtcattctgatgaagtctcatcatcttcagcaagcagcggccctaaacctgctgttaattgcgtatcagatgaagcaacaaccaccattctccacaccaatgatatgcatgggcgtttcttagaagatagcagcaatggtgttattggcatgccaaaattagcaggaattgcagctgaatccagaaaaaaagggactaccttgctattggattccggagatgctatccaaggtctgccaattaccaataacagtaagggagaagatgcagtagctctcatgaatgctacgggttatgatgccatgacggtgggcaatcatgaatttgattttggcttagatcaattaaagactttggtcaagaaacttgattttccaattatcagttctaatatttatgtcaatggcgtccgtctttttcaagcttctacagttattgacaaaaataaaaacattgatggggatgaatatgttgttattggtgtcacgacacctgaaacagccactaaaacccatccgcgcaatgttctgggtgtgacttttactgatccgattactgaggttaacaatgttattgctcaaaccgaagcacaggctagatcgcaaggaaagacttataaaaattatattattttgggacatctaggggtagatacaacaaccaaggaagaatggcgcggagacagcctcgctcaagcactggctaagaatagtctgctggctggtaaaaatgtcattgtacttgatggtcattcgcatacagctaaaacgcaaacctatggcaatgtgacctataatcaaacaggaagttatctcaataatgttggtctgattaagctcaattccaaggagatcctaagcaatgcgttgatttctgatcaggatgccaagacagtagcagctgaccccaatgtgcagatgatggttgatcagattgagactaagtataaagctgacagttctaccattttaattgccaatagtccagttgaactcaatggcgatcgcatgaatgtgcgtgttcgtgagacaaatctggggaatgcagtggcagatgccttgcttgattatggacaaacgggcttttcacataagtccaatttagctgttactaatggcggtggtcttcgtgaaacaattgccaaggataagcctattaccaaaggagatattattgctgttttgccttttggtaatagcgttgcgcaagtcgccgcgacagggcagaatatcaaagatatgtttaccaaatctctaggttctattttacaagcagatgataaaggcaagtctgttcttgacgaaaatggtcagccattgcttgagccaagcggcggtttcttacaaattgctggtgctaaggtttactatgatactagcctagaaccgagaaaacgtatcctttatattgcaattttagacccagaaacaaagacctatcagcctctggatttgacaaaaatttactatctcgtcacgaatgactttttagcagcaggcggtgatggctataccatgttgggaggtagccgcgaagaaggtccatctatggacagtatcttcactgattatctatctcgtgctgatttgacgcaatatcgagtgattaaccctaattcgcgtagcatttccatatcatcaaccaaggactcagatggtgatggacagcctgattatttgcaattaattgctgataacaaggccactgttcctcaaaaggggtttgactctggtcaagacaagtcagaagttattaccttgtcttattcaaaaaattggagagcagaccaatccttactaatctctgctcttcatcagacagctccattagcagaaaaattttcttcctatcaggaaaaa

SEQ ID NO: 36199 - DNA, 1266 bp, Streptococcus mutans
atgttacttataaaaaatggccgtgttcttgatcctaagtctggtcttgatcgggtattagatgttttgcttgatggtaaaaaggtcgtcaagattgcagaaaatattgagtctgtggatgctcaggttatcgatgcagaaggtcttgttgtagcacctggtttggttgatgttcatgttcattttcgtgaacctggccaaacccataaggaagatattcatacaggagctttggcagcagcagctggcggagtaacgacagttgttatgatggctaataccacaccgactatttctgatgtggcaactctgacagaagttttagaaagtgccgctaaagaaaatattcatattaaaacagtagctaccattacgaagcattttgatggtcagcatttgactgattttgaaacacttttaaaagcaggagcagttggattttcggatgatggcattcctttgacaagttctaaggttgtcaaggaagctctggatttggccaagaagaatgacacttttattagtctgcatgaagaagatccagagttaaatggcattttaggttttaatgaaaaaattgccaaagaacattttaaaatctgtggagcaacaggtgttgcagaatacagtatgattgcgcgtgatgtcatgattgcttacgataggcaggctcatatccatattcagcatttatctaaggcagagtctgtcaaagtggttgcatttgcacaaaaattaggcgctcaagtaacagcagaagcagcaccgcagcatttttccaaaacagaaaatcttttgttggaaaagggagccaatgctaagatgaatcctcctcttcgtttggaggcggatcgtctggctgtgattgaagggctcaagtcaggtgttatttctgtcatcgcaacagaccacgctccccatcatgcggatgaaaaaaatgtagcagatgtgactaaggcgccatcaggaatgacgggcttggaaacttctttatcattaggcttgacttatttagtagaagcaggacatcttagtttgatggacttcttagccaaaatgaccatcaatccagcacagctttatgattttgatgttggctatttagcagaaaatggtcctgctgatcttgtgatatttgcggataaggaggaccgtctggtttctaatcattttgcctctaaggccgccaattcaccctttattggtgaaaccttaaagggtcaagtcaaatataccatctgttctggtgaagtgatttatcaagca

SEQ ID NO: 36200 - DNA, 2790 bp, Streptococcus mutans
atgagtagcacagaacaagaaacgatgcagggaatagaaaaacttgtatctgatgatgtttatgaagctgcacaaaccagttcaaatggacttgaggcttctcaagttcaaaagcggcaagagttatatggtctcaatcggttgaatgaagtcaagggagagcctgtttggctgaaatttattaaaaattttaccagtatgatggcactcttgctctgggcaggcggtgcagttgccttctttagcgggacaattgaattggggattgccatttggcttgttaatgttattaatggtcttttctcatttttccaagagtatcgggccagtcaggctactgaagccttgaaaaagatgctcccttcatacgccagagtcatccgtgatggtagggagagtaagattttagcagaagaactggttcccggagatgtcatgctgattgaggaaggagatgccatttcggcagatgggcgtattatcttttctactgatttgcaggtcaatcagtctgctttgacgggtgagtccaatcctgttcggaaaaataattatcctgttcttgattcagacacggaaaatttggaatttaaaaatatggtttttgctggaactagtgtatcaaatggcagtgccaaagttgtggtaacgaaaatcgcaatggcaaccgaatttggtaaaattgctgatttgacccaatcaatggaagatgaaaaaagtccgctgcaaaaggaattggacttattaactaagcagatttctttgattgcggtaactattggtatctttttcttgctggcttctgttttctttgttaaacaacctttagcccaagcctttatcttttctctgggaatgattgtcgcttttatcccagaaggacttttgccaacagttactttgtcccttgccatggccgttcagagaatggccaaggagcatgccttggttaagaaattatcttcagtagaaaccttgggtgcgacctcagtcatttgttctgataagacgggaaccttgacccaaaatgaaatgacagtcaaccatgtttggactttaaatcatgaatacgaagtgacaggtcaaggttatgcttctgatggacatttagaaagaaataatcaggaagttacagttgccaatgaagagggtttagagttcttactgagagcagcagcactttgttccaatgcacgtgttctagcacctagtgatggaaatcctcgttatacggttctaggagatccaacagaagcctgcttaaatgttgtggctgaaaaagcagggattgacttaactgaaaatgaaacttgggcacaaagagtgagagaattaccgtttgattccagccgtaagcgaatgacgactgtgcatcgactaaaacaacctgtaaatggttcgtccttcatttcaattaccaaaggagctcctaaagagacctctgagctttgtaacaaggtttatgagaatggtcagctgagagatttgactgatacagatcgggaagctattttagcggctaatgatgattatgcgcgtcaaggtttgcgtgttttagcagttgcctatcgtaatctagaagaagtagctgaccttcccaaagccttgtctgactatagtccagaagtcattgaagaggatatggtttttcaaggtttagtggttatggcagatcctccgcgtgaagaagtggcagcggctgttgagttatgccgtaaggcaagcattcgtattgtcatggttacaggagattatggtttaacagctgtcagcattgccaaacggattggtattgtccaaggggaaaatcctcgtgtggttactggcctagaattaaaagatatgtcagatgatgacttgaaacaggccttatcagatgaagttgtctttgcccgtgtagcgcccgaacaaaaatatcgtgttgttaccaatctgcaagctttgggacatgttgttgctgtaacaggtgatggtgtcaatgatgccccagccttgaaaaaagctgatattggagtggcaatggggattacagggacagatgttgctaaggaatctgcggatatgattttgacagatgacaattttgcttctattgtacgcgctgttgaagaggggcgtgctgtctataccaacattcggaaattcctgacttatatctttaatagtaatacctcggaggccgtgccttctgcagcttttcttttttccaaaggaggtattcctttacctttaaccgttatgcagattttagcgattgacctaggaacggatatgattcctgcccttggtttaggcgtcgaagaagctgaagatgggattatggaacgtccccctcggcgtccaacagaccgtctgctcaacaaaggtttattgataaaggcctttatttggtatggccttttagaagcagctattgctatgggagctttcttctttacttatgctattggcggcggtttaagtgggcatttggcgtcatcaggtcagctctatcagcaggcaacaacaatgactcttggtgctattatcttttgccagttgggaatggtgatgaatacacgtactgaaaaggcctctatctttaaagtgaaactcttttcaaataaggtcattaattttggtatgatgtttgaaattttcttattctgtcttttagcttacctaccatttttacatggtctcttcaacacggcggcaataggtgtgtggcattggctctatttgattctctgtccaattccagttttgtttattgaggaagctcgtaaggcttatatgagaagaaaacac

SEQ ID NO: 36201 - DNA, 1017 bp, Streptococcus mutans
atggttactattaaggatgttgcaaaagaggcaggtgtgaatccttctactgtcagtcgggttttaaaaaacagttcctccatttcgcaaaaaacgaaagatagggttcaacaggctatgacagatttaggttatgtgcctaatttagctgctcaaatgctggctagtggcttgactcactgtgtcggtgttgttttcccgcctttaacaagtccagatcgtttaagcgaaccttttttcatggaaatattggcagctattaataatgaagcaagccgtaataaattcacagtttcgattgcgaccagtaatactttgacggatctaaaagatcaggtacagctcatgtatcggcaagggcgagtggatggttttatcgtgctttactcagaaagaagggatcctgtacgtcaatatctgatcaaaaataaaattccttttgtcattgtcggtgctccagttgattataaagatgaaacgacctatgttgataatgataaccaattaatggctgagactgctgtgacttacctcaatcaaaaagggcataagcagattttatttgtcacaaatgatcaagaaagtgatgtttatattgagcgttttatcggctatcaaaagggaatgcaagcattaggtttacagtcatatgacagtgctctttttgattctaaacaagctagcacgctagaagcctttattaaaactgttcagaaaaaaaaaataacggctctccttattattggggatgtcgtttctcttcggattattcaatttttgtcttattatggtatagctgtaccagaagatatgtctattgtgtcttttaataattccagttatgccactattttgcatccttatttaacaacatttgatattaatgttaatcgtttaggaagagcgagtctgaattgtttgttggaaaaagtgcaaaagcgtcagtcaaaagatcagaaagtaatcgttccttttactttgaaaaaacgtgagagtgtccgtaatcttaaaaaaagc

SEQ ID NO: 36202 - DNA, 1245 bp, Streptococcus mutans
atgaaaacatggcaaaaaatcgtcgttggcggtgcaggccttatgcttgcaagcagtattcttgttgcctgtggatcaaaggattcaaaatcaagttcatctgatcccaaaaccattaaactttgggttccaacaggagccaagaaatcttatcaaagtattgttcacaaatttgaaaaggattctaactataaagtaaagattattgaatctgaagacccaaaagctcaggaaaagatcaaaaaagatcctagtactgctgcagatgttttctcgctgccgcatgatcagctgggccagttagttgactctggtgttatccaagagattcctcaaaaatattcaaaagaaataaataaaaatgaaacacagcaggctgcaacaggagctatgtacaaaggtaagacttatgcttttccttttggaatcgagtctcaagtactttactataataaatcaaaactctcagctgatgatgtcacatcatatgagactattaccagcaaggcaactttcggagcaaaattcaaacaagttaatgcctatgcgactgcaccacttttctattcagtaggtgatacactctttggtaaaaatggcgaagatgccaaaggaactaactggggaaatgatgctggtgtatctgttttgaaatggattgccagtcaaaaaggtaacgctggctttgtcaatcttgacgataacaatgtcatgtctaaatttggtgatggttctgtagcttcttttgaatcaggtccttgggattatgaagccgcacaaaaggcagttggcaaaaacaacctcggtgttacggtttatccaacaataaatattaatggtcaagaagttcaacagaaagctttcttaggtgttaaactctacgctgttaatcaagctccttctaaaggaaataccaaacgtattgctgctagttataaattagcttcttacttaacaagtgctgaaagccaagaaaatcaatttaagacaaaaggacgcaacatcatcccatctaataagaccgttcaaaactctgatacagtcaaaaatcatgaactcgcacaggctgttatccaaatgggatcttcttcagattatactgttgttatgcctaaactcaaccaaatgtcaacattctggacggaaagcgcagctattcttagtgatacttacaatggtaaaattaaagaaagtgattaccttgctaaattaaaacaatttgataaagatttagcagctgctaaa

SEQ ID NO: 36203 - DNA, 627 bp, Streptococcus mutans
atgacattagcaaaagacatcgctcgtgatttactagatatcaaggccgtatatcttaagccagaagaaccttttacttgggcatctggcattaaatcacccatttacacagacaatcgcatcacgctttcctatcctgaaacacgtactttgattgaaaatggttttgtggaaaccatcaaggaagcatttcctgaggtagaagttattgcaggaacagcaacagcagggattcctcatggtgctattattgcagataagatgaatttgccctttgcttatattcgcagcaaaccaaaagatcatggtgcaggtaatcaaattgaaggtcgtgtgactaagggacaaaaaatggtcatcattgaagatttgatttcaacaggtggctctgtactggatgccgtggcagctgcgcaacgtgaaggtgctgacgtgcttggtgtggttgccatttttacctacgaattaccaaaagcaacagccaattttgaaaaggctagtgtgaaattggtgactttgtcaaactacagcgaactgattaaagttgctaaggtacaaggctatattgatgcagacggtttaaccctgctcaagaaatttaaagaaaaccaagagacttggcaagac

SEQ ID NO: 36204 - DNA, 1257 bp, Streptococcus mutans
atgagaaaaattgtcattaatggtggtaagcccttaaagggggaggttgcggtctcaggagctaaaaacagtgttgtcgctctgattccagctattattttagcagatgatattgtcacacttgatggtgtgccagctatcagtgatgttgatagtttaattgacattatgactttaatgggagcaagtgttgagtgtgatggtgacagtcttaaaattgatccacgcggtgtaaaggatattcccatgccttatggcaagattaatagtttaagagcttcatattatttttacagtagtttgctgggacgttttggtcgggcggtcgttggtttgcccggtggctgcgatttgggacctcgtccgattgatttgcatctcaaggcctttaaagcaatgggagcaacggtttcctatgaaggagaggctatgcgcctttcaaccgaaggcaagccgcttaagggggctcatatttatatggatactgtcagtgttggagcaacgattaatacgatgatagctgctagtaaggcacaaggacgtaccgttattgagaatgctgcgcgtgagccagaaattattgatattgcaacgcttttaaataatatgggagcccatatccgcggggcaggaacggatatgattatcatagaaggtgttgaaaaacttcatggaacgcgtcatcaagtcattcctgaccgcattgaagctggttcttacattgctttggcagctgctgttggtgaaggaatcaaggttaccaatgtgctttatgaacatttggagagtttcatttcaaagctggaagaaatgggcgtgcgtatgactattgaagaagacagtgtttttgttgaaaagcaggacaaattaaaggcagtttccattaagacttcgccttatcccggttttgcgactgatctgcagcagcccataacaccgctattattaacagctgtaggccgcggaaagattcgtgatactatctatgaaaaacgggtcaatcatgtggctgaattggcacgtatgggagctaagatttctgtcttaggcggtcaaattatctatgaaggacccaatgaattaagtggagctcctgttaaagcaaccgatttacgtgcgggagcagcacttgttacggcaggattaatggcaaaaggtcaaacggttattacgaatattgaatttatcttgcgcggttattctgacattattcaaaaattgaatcgtctaggtgcggatatcgaaattgttgaagaa

SEQ ID NO: 36205 - DNA, 1191 bp, Streptococcus mutans
atgtcagaacgtaaactttttacatctgaatcggtatcagaaggacatcctgataagattgccgatcagatttcagatgctattttagatgctgttttggtacaggatccagacgcccatgtagctgctgagacagctgtttatacaggttcagttcatgtttttggagaaatctctacgacagcctatgtggatattaatcgtgtggtgcgtgataccattgctgagatcggctatacggatactgcttatggcttttcggcagaaacagttggagtgcatccgtcattggtggagcaatcgcctgatattgctcaaggtgttaatgaagctcttgaggttcgtggccatcatgagcaagatgatctggatttgatcggtgcaggagatcaaggtctcatgtttggctttgccgttgatgagacgcctgaactgatgcctttgccgatttctttagcccatcgtttggttagaaaattggcagagctgagaaagtctggagaaattgcctatcttcgtcctgatgctaagagtcaggtaacggttgagtatgatgaaaatgataagcccgttcgtgtggatacggttgttatttcaacacagcatgatcccgaagcaacgaatgagcaaattcatcgggatgtgattgaaaaagtcattaaagctgttattccagctgagtatcttgatgctaagaccaagtatctcatcaatccgacaggccgttttgttatcggcggtcctcagggagattctggcttaacaggccgtaagattattgtcgatacttatggtggttatgcccgccatggcggcggtgctttttctggtaaggatgccactaaggttgaccgttcagcttcttatgcggcgcgttatattgctaaaaacattgtagctgcaggtttggctaagaaagcagaagtgcaattagcttatgctattggggttgctcagcctgtttctgttcgtgtggatacctttggaacagcgcttgttgcagaaagtaaactggaacaagcagtacgtcagatttttgatttgcgtccagcaggtattattaagatgcttgatctgaaacgtcctatctatcgtcaaacagcagcttacggtcatgttgggcgtacggatatcgacttaccttgggaaaaattagataaagttgaggagctgaaaaaggctgtccaagca

SEQ ID NO: 36206 - DNA, 3747 bp, Streptococcus mutans
atgactcaaatttttaaaaagttaactcccataaatgatgcagatattgaacaagcacatattgatgctattaattttgcaattgaagataaagatgttttaaatgttgctgtatctggtaattatggttcaggtaagagtagctttattgagacatataaagaaaagttcaataataaaaagaagaagtttctacatgtttctttagctcatttcaattctgaagatggaaatacagagagacagcagagtaattctgggacagataaagcagctccaaaagataatattttggaaggaaaaatagttaatcaattacttcatcagattgatgctgataaaatccctctaactatttttaagtcaaaacaacatcccaagaagagacaaattttgggatggtttattctactgactattttgatactttcaatgctagctttatggacctttccaaacttatcttgggacagttggattaagcaggtattagttatccttttaatcataagtatttcagtattgatttaccaactaatgaaacttcagttttatcgtaaactatttaaatcaataactttcaaaggtgcttctgtctcgggagagattgagatatttggcaagtctgatgcttcatattttgataaatatctggatgatgttctttatttatttgataactgtcaaagtgatattattgttttcgaggatatcgatagatttgagactaatctgattttttcaaaacttaaagaaattaatactctagtaaataataaaagaaaggctagaggtgaagataataaactcctctttatgtaccttgttaaagatgagatgttcatttctaaagagcggactaaattttttgattttatcattccggttattccagcgattacagcatcaaattcaagggaaaaattcagtgaaatactagctgatttagggtgtgaagaagattttgaaggtagttttttgcagaaaatttcaatctatattgatgacttacgtctagtaaccaatatctgcaatgaatatgtactatataaaaataatctaacgggagaagagagtgcaaataaacttaaactatcaaacgaaaagctatttgcaatgatagtttacaaaaatgttttcccaaaagatttttctgaactgcaagtcgggtctggatttattcatagattttttcaagagaaagataagcttagggaagaacagctacatgatataaatcaacagatttcagaaattgaacagaagattttaagtgcaggaaatgaagcactaaacaatgaattggaattatattcttcaattttaaaagttcccaataatcgtgctgttttaaaagttaacaataaatttgaatacgaatttgaaaatcgacttggttttatcgctgagttgctaaaggaggatgccgaaatagtgtcttatgaaaattactcttctgcttatagtggttataatgtaagaaatgagacaaaggaaacgatttttgagattctagactctgaacaggctaattttgaatctcgactagaaaatataaaaaataagagtttgatcgaatcatttaataatgagatagatgcttttcagaagaaaaaacaagaaattcaacaccaaaaattagcaaatttaattacacgagaaaaaataaatagcattgctaatgaagaggagtttgaatacataaaatataatcctcagttttccatgattacatttttaatcaggaatggtcatattgatgaaagttaccctgactatatcacttatttctatccaaatagcttgaacagagaggacaaagaatttatcatggctgttcaaggtgaagagaaacttccttgggattatcatctaacaaatattacagaaatttataataatagattagatacaagtgattttgaacaagaaaagattttaaattacagtcttttagaatacacaatgacaagaaagggaattttagatcaagaagaaagattaagactttattttgttgaaaatagattatcgtttcttctttctttcttccagcaagttcctattgaaggtcagataaatactgttttggatattttaaagtataatcccaaccttttggaattattagtagtatccgatgatattcttgataaagataggtatgctgtatttcaacggatattgttttttgttgatttaacacaagagatcttgtctgacaaatatcaaaaattagtttctgattttatctctcataattggttgcaactttgggaagagtatctgtctacagaattaagagatgagatgaaagtcaaaaggaatttaacttatcttactgttaaaattgataggtttgattttatacaggaacaagaatatggttcgataggtaaaactgtgtatgagaacagcctctatcaactaaactctagtaatatcaagaatttgttgttatatttagattataatcttgacaatgatgatattaaacatcgaaactttagtattatcaactctgacaacaaattcgctcatttgctggattatgtcaaagaaaatatgggagactatgttaaagttattgttgaacagtccgaaggtgaaattaaggataagttagagtatatttattatgttcttaatcatgaagacatttcagatgagactaaaacaaagtacttgacttgtgttgatgacaatattttatctttatcagaaattgatgatatgccaatgactgatgaggctattaagcttaataaagcagtctttgatactaaaaatgtactaaactactttgccaaatatggtacatggaatgaacttttgataaacttcgttaattctaaagataatttcaactttgataataaaatttttgaagaagaatcaaaagaggaacaagaaaagtttttcttagaaactgctaagtgtagtgaattaaataataattattatgaagctattatgtcatctattagttggaaatttactgtttttccgactgaaaagattagtgacaaaaaaatagatatactcattgaaactaagtcaattgaatttagcagcgctatactttcaaatttaagagatagttatcctgcaagtgttattaaatatattctaaaatatttggatgactatagtgataacatagataatgtctataatgaaaacgaaattttagaagttttggatcaggatattccacttgaaaaagccaaaatattagttgacaagtttaatagcactatcagtataaaggataaaaaatacaattcagcattgctagcctatatcattgaaaataaatttaatgttgaagatttaccaatgcttctggagaagtatcaaatcttcgatactaccgttcaggaagttattttacagaaagcaaaatcagatatagaaattattttggacaatgcatatcctatagataaaaatttactttcattgttaataaaagatgatgatattgatttagatgatagacgtctgctttacagtaggaatattccacatgatagtgtagaagaagtgctggaagatttgtgtttccttagtttatttgaagagtatcagcaaataataagtgaacatagaagtataaatgttcctgctactgaatataatcaaaatttacttaaattcttgcaggataaagaatgttttaaatcatttgatatagatccaaatgatgaggaaaattataagattggttttaaagagaaattgaag

SEQ ID NO: 36207 - DNA, 1674 bp, Streptococcus mutans
atgtaccaagcgctttatcgaaaatatcgaagtcagacttttgatgaaatggtagggcaggaagttgtggcaaagaccttaaaacaggctgttgcttcaaagaagattagtcatgcctatcttttttctggaccaaggggaacaggaaaaaccagtgctgctaagattttcgccaaagccatgaactgtcctcatcaagcagacggggaaccttgcaataactgtgatatttgccatgatattaccaacggaagtctggaagatgtgatagaaattgatgctgcttctaacaatggtgttgatgagatccgtgaaattcgtgataagtcaacctatgctcctagccgtgccacttacaaggtttatatcattgacgaagtacacatgctctcaacaggggctttcaatgcccttttgaaaactttggaagaaccaacagaaaatgttgtctttattttggcaacaactgaattacataaaattccagctactatcctttcacgtgttcaacgttttgagttcaaagctatcaaaaccaaggccataaaagagcatttggcagacattctcaaaaaagaaggccttagctttgatgaagaagctttaagtttgattgccagacgtgctgaagggggtatgcgtgatgccctgtccattttggatcaggctcttagcttaacgaatgataatgatgtttcgctagaaatagctgaagaaatcactggcagtatcagcttaagagcactagatcagtatgtggctgaccttttggcacatgaaactcagcaggcactcagtgatttagatactatttttaacaatggcaagagtatgagccgttttgcgacagatcttttaaattatctgcgtgaccttctggttgtccaagcgggcggagaaaacacgcatcatggagaagcatttgacaaaaatcttaccttatcacaagagactatttttcaaatgattgacgttgtgaccaaaagtctaccggaaatcaaaaacggaacacatcccaagatttatgcggaaatgatgaccattcgcctatctgaaaatgaccagaaagttcattcagttcaagatttaccggataatgttgctcaagaaattgaagcgctcaaatcggagattaaagaactcaaaaaaagcttgcaatctctggaaaaaggcaagcctttcaaagtgaccaaggttcaaaagacttccttccgctataaagtggataaggacaaggtcatgaccattatgcgagaaaccgtggcagatagtcaaaaatcgcgtgagtatttagaagccctcaaaggttcttggaatgaaattttagacagcatttcacctcaagaccgagcccttttaatggggtctgagcctgttcttgctaacagcgaaaatgctatcttggcctttgatgctgcctttaatgccgaacaagctatgaaacgctcagatctcaatgctatgtttggcaatatcatgagtcaggcttctggcttttccccaaaaattatggctgtgccaagagctgagtttgatgccatccgtagcgaatttgctcatagcctaaaggcagacaaagatgattctcaagaagaaacaacagaagcaacaaaagagtttatccccgaaggctttgacttcttagcggataaaattgtccttgaagaagagcca

SEQ ID NO: 36208 - DNA, 1767 bp, Streptococcus mutans
atgtattattcaaatggtaactatgaagcctttgctcatccacaaaaacctgaaaatgttgatgggaaatcagcttatattgttggaagcggcttagcggctctttctacagcagtttttcttattcgtgacggacaaatggctggagaacgcattcatattcttgaagaattatctcttcctggtggcagtatggatggtattcgtaatgaacgtttaggttacatcattcgcggtggtcgggaaatggagcctcactttgaagtcttatgggatttatttcgctctatcccttctctggaaaatcccaaacactctattttagatgaattctactggcttaataaaaaggatccaagttttgctaaaacacgtgccatctatgagcgtggaaaggcaataccagatgacggtcagttgaccttatctcaaaaagcagttaaggaaatttttgatcttgttctaacaccggaaagtcatctgcaggatgttcagattgatcaagtctttagtgaagatttcttcaactctaacttctggctttattggagtaccatgtttgcttttgaaccatgggccagtgctatggaaatgcgccgttacctcatgcgattcattcagcatgttgggactttgaaaaatctctcatccttaaaattcacacaatacaatcaatatgaatcattgatcttaccactagtagcttttctcaaagaccataatgtcaattttagctatcagactgttgtcactaatattttagtcaatcgttctggcagtgataagcttgctactaaaattgaaatgactgttaatggtcaagaaaaaagtattgctttaagtagagatgatcttgtttttgtcaccaatggctccattacagaaagtagtacttacggtaacaataatcatccagctccattaacgcacgatcttggtgccagttggcagctgtggaagaatttagctgcacaagatagtgattttggatgtcccgaaaaattctgtgaaaatatccctgatgctaattggaccatgtctgctacaataacttttacagatcaacgcattgctaaatacattgaacagattaaccaaaaggatccttatagtggctctattgtaaccagcggacctaccagcattaaagattctagttggttgcttggctattctatcagtcgacaaccacattttaaagaacaaaagaaaaatgagcttgttatctggctctatgctctctatactgatcgcaaaggagattatgtcgctaaacggcctgatgaatgtacagggattgaaatgtgtgaagaatggctttatcatataggagttcctgaaaatactattcatgaactagcctgttcggcctcgacgatcccttgccatatgccttatataacaacgtatttcatgccgcgaacaactaacgatcgcccacttgttgtgccaaaacatagtaagaatttagcttttataggaaactatgctgaaacaccgcgagatacggtttttacaacagaatattctgtcagaactgctatggaagctgtttacactttacttgaagttgatcgtggtgtccctgaagtgtttgcttcaacttttgatattcgcatgctacttaatgcgctttactatctcaatggtcaaaaatctttaatagaaattgattttccttgggtggaaaaagcagcccttaaagaagctctcaaaaaggttaaaggaacatacatagaagaattattgaaagattatcatctgatt

SEQ ID NO: 36209 - DNA, 1947 bp, Streptococcus mutans
atgattaagattactttcccagatggcgctgtgcgcgagtttgaaattggtacaacaacgtctgaaattgctgagtctatcagcaagtctcttgcaaagaaagctttggctggtaaatttaacggtcagcttattgataccacacgcgctatcacgcaagatggcagcattgaaattgtgacacctgaccacgaagatgctttagacatcttgcgccactcggcagctcacttgtttgcgcaagcagctcgccgccttttcccagatattcacttgggtgtcggtccagctattcaagatggtttctactacgatacggacaatgaagcagggcaaatttccaacgaagatcttcctcgtattgaagaggaaatgaagaaaattgtcaaagaaaacttcccatcagtccgtgaagaagtcactaaggatgaggcacgcgaaattttcaaaaatgacccttacaaactcgaattgatcgaagaacactcagaagatgcaggtggtttaacaatttaccgtcaaggcgaatacgttgacctctgccgcggaccgcacgtgccgtcaaccggccgtatccaagtctttcatctacttaacgtggctggtgcttactggcgcggtgacagtaacaatgctatgatgcagcgtatctatggtaccgcttggtttgataagaaagatctcaaatcttacctcaaacgccttgaagaagctaaagaacgcgatcatcgtaaattaggtaaagaattagatcttttcatgatttctcaagaagttggtcaaggtttgccgttctggctaccagatggtgcaacaatccgtcgcatcattgagcgttacatcactgataaggaagtcgcttcgggctatcaacatgtctacacaccgccaattgcctctgttgacctttacaagacctcaggtcactgggatcattaccgtgaagatatgtttccaactatggacatgggagatggtgaatcctttgttttgcgtccgatgaactgtcctcatcacattgaagtttataagaatcatgtgcattcttatcgtgaattgccaattcgtattgcggaacttgggatgatgcaccgttatgaaaaatcaggtgctttatcgggacttcagcgtgtgcgtgaaatgacactaaatgatggtcacacttttgttgctcttgatcaagtggaagatgagtttaagcgtaccctccaattaattattgatgtctatgaagacttcaatttaacagattatagtttccgtttatcttatcgtgaccctaatgatacccataaatatttcgatgacgatgaaatgtgggaaaaatcgcagaccatgctgaaagctgctatggatgatatgggcttagattattacgaagcagaaggcgaagcagctttttacggaccaaaattggatatccaagtcaagactgctcttggcaatgatgaaactttgtcaacgattcaattggacttcttgctgccagagcgctttgaattaacctatattggtgctgatggcgaagaacatcgaccagtcatgattcaccgcggtatcgtttcaaccatggaacgcttcacagcttaccttattgaaacctataaaggagcttttccaacttggttagctccgcatcaagtaactgtcattccaatctcaaacgaagctcacattgactatgcttgggaagttgctaaagaactgcgtgaccatggtattcgcgctgatgtagatgaccgtaatgaaaaaatgcagtataagattcgtcaaagtcagactaagaaagtaccttaccaactcattgttggtgataaggaagtggaaaacggtaccgttaatgtccgacgttatggcagcaagcaaacgcatacggaaagtatcgcagagtttagagagaacattttagctgatatcaagcgtaaatcacgcccagacaacgctaaa

SEQ ID NO: 36210 - DNA, 1332 bp, Streptococcus mutans
atgcgtgtaggtctttttacagacacctatttaccacagatttcaggtgttgcaacgagtatcaaaaccctaaaggaagaattagaaaaacaaggacacgaggtttatatctttacaacgactgataaacatgttaaacgttatgaagatccaaccattattcgcttacccagtgttccttttatttcttttaccgatcgtcgaattgtttatcggggactctttgaatcttataaaattgctaaaacttataaattagatatcattcatacgcagacagaatttagtctgggaatattgggcaaaatggttggcaaggccttacggatccctgttattcatacttaccatacccagtatgaagattatgttcgctatattgctaatggcaagcttatccgtccaagtatggtaaaatatattgttcgtggttttctcaatgatttagatggggttatttgtcccagccgtattgccttaaatttattagatggttattctgtcaagattcccaagcgaattattccaacaggcattgacttgagagaatacgagcgaccagacattagtcaagaagatattgccaaacttagagaaaaatgggctattgctagtgatgaaactgtcttattgagtctgtcaagggtttcatatgaaaaaaatattcaagctctgcttgctaatatgccaaaaatcttatctaacaatcctaaagtgaagttgcttattgtcggagatggcccctatcttgaagagttgaaagaacaggctcaagatttagccgtcatggacaatgttatttttacaggaatggtgagtcataatgaaacagctctttattacaaggcagctgacttctttatcagtgcgtcaaccagtgagacgcaagggctgacctatgcagaaagcttagctagtggtaagccgattatcgctcagtccaatccttatttagatgatcttatcacagataagatgtttggaacgctttatcaaacagagtcagatttagccgatgctgttttaaatgctatcgtttcaactccagctaagcaggaaaaggtctggcagaaaaaactatatgaaatttcagcagaagcctttggcaaatcagtttttgcattctatctggatatgattatttccaaaaaggctaagaaaaaggaaaaatggtccttggcagtcgaaggaaaccgagcagatacttcaattagaattgtcaaatcaaccattaaactgcctgcaacagctcttaaaaagaccgctaagacttccgttaaagtgattaaagcgcctgtgcgtatggttaatgctattagagatttccttgat

SEQ ID NO: 36211 - DNA, 1848 bp, Streptococcus mutans
atgaaacaaagtaatatgttaatccccaccttgcgcgaaatgccaagtgatgcacaagtcatcagtcatgcccttatggtgcgtgctggttatgtccgccaagtatcggcagggatttactcttatttacctttagctcatcgcgttattgaaaaaattaaaaaaatcatgcgtgaagaatttgataaaattggtgctgttgaaatgctggcacctgcccttttaacagctgacttatggcgtgaatccggccgatatggaacttatggggaagatctttataagttaaaaaatcgcgatcaatcagattttattttagggccgactcatgaagaaacttttacaaatctcatccgtgatgcagtgaaatcttacaagcagcttcccttgaatctttatcaaattcaagcaaaatatcgtgacgaaaaacgccctcgcaatggcttgcttcgtactcgtgaatttattatgaaagatggctatagttttcatgctgattatgacagtttagatgctacttatgaagattatcgtaaggcttatgaagccatttttactagagttggtttagattttaaagcgattattggtgatggcggtgctatgggtggtaaagatagtcaggaatttatggcagtaacgccagatcgtacagatttggagcattggctggttcttgataaagctattggctctattgaagagattccagctgatgttttgaaagagattaaacaagaactctcctcttggttaatatcaggcgaggatactattgcttattcaagtgagtctgattatgcggctaatctggaaatggcgacgagcgaatataagcctaacaataaggttgtttctcatgaagatatacagcgtattgaaacaccaaattgtaaaacgattgatgaagttgctgcctttttagaaatagatccaacacaaaccataaaaaccttgttatttattgcagatgatgaaccagttgttgctttacttgtaggaaatgatcaggttaatgaagttaaactaaaaaactatctgggtgctgacttcttggaaccagctaatgaagaagaagcaagagaaatttttagtgcttcctttggttctctaggtccagttaatctaccagaaaatgtcaaaattgtggcagatcgtaaggtgaaaaatattgggaatgccgttgttggtgctaatgaagatggttatcatttgacaggtgtcaatccggaacgtgactttgaagctgcttatgttgatattcgtgaagtctgtgaaggagaggcatctccagatggtaggggtgttcttaaatttgcgcgtggtattgaaattggtcacatttttaaattgggaacacgttattcagaaagtatgggagctaacattcttgatgaaaatggacgttcaatccctattattatgggaagttatggcatcggtgttagtagaattctatcagcagtcattgaacaaaatgcacgtatctttgttaataagacacctaaaggagcttaccgattttcttggggagttaattttcctaaaacgttggcgccatttgatgtccatctcattacggttaatgtaaaggatgaagtctcccaacaattgacagcaaaagtagaagaaagtttggtagatgctcactattctgttttaacagataatcggaatgagcgtattggttcgaaattttctgatagtgaccttattgggctgccgattcgtgtaacagttggtaaaaaagcttcagatggtattgtagaagttaaaataaaatcgactggagatacaattgaagtcaatgcagagaacctattagaaactttatctattttgatagac

SEQ ID NO: 36212 - DNA, 792 bp, Streptococcus mutans
atgcagaaacgtgttctttttgggggagtggctctggctatttttctccctttcctatttttgggaggtctcttttttcagctttttgttggtgttctagccatgattggcgtatctgaactgttgaaaatgaaggcgttagaaattttttcatttgaaggtattttagctatgcttgcggcttttgtgctgactattcctttagagaactacctgacttttttaccgattgatggcagctttagtgcttttggtctcgttatctttttgattttagcaggaacggtcttaaatactaatcgctattctttcgaagatgctgcttttcctattgcttccagtctttatgttgggattggttttcaaaatctcgttaatgctcgcatttctggacttgataaagtttttctagccctttttatcgtttgggcgactgatattggagcttatatgattggtcggcagtttggtcaacgtaaattgatgccggcagtttctcctaacaagactattgaaggcagcttaggaggaattttgtcggcagttgtcattgcttttatctttatgttgtttgataagaatgtttacgcaccgcatcacttcttagtcatgcttattttggttgctctctttagtatctttgcccaatttggtgatctagttgaaagttcaattaaacgacattttggtgttaaggattctggcaaactcataccggggcacggaggtattttagaccgttttgacagtatgatttttgtttttccaatcatgcacttctttggtttgttc

SEQ ID NO: 36213 - DNA, 747 bp, Streptococcus mutans
atgtttacattaagacgaaaaaaacaagatataaaattatctaaaatcccagctcatatcggtatcattatggatggcaatggacgctgggctaagaaacgaatgaaaccaagggtatttggacataaggctggtatggatgcccttcaagatgtgacgatagcggcatcggaacttggagtcaaaattttaacagtttatgctttttcaacggaaaattgggctcgtcctcaagaagaggttaaatttatcatgaatttacctgtagagttctttgataagtatgttcctaagctgcataaaaataatgttcgtattttagtgattggcgataaggaagaactgccggcagcaactttagatgctctggaacgcgctagagaactgactaaacataattctggacttattttaaattttgctttgaattatggcggtcgtgctgaaattgttgatgctgtaaagttgattgctcaagatgttttagatgctcggtttaaccctggtgatattacagaagggctcattgctgattacttgatgacaagcaatcttccttacctttaccgtgatcccgatttgattattagaacgagtggtgagctgcgtcttagtaactttttaccgtggcaggctgcttatagtgagctttattttacagatacactttggccagattttgataaaaaagctttgtatttagctattgaagaatttaaccatcgccatcgtcgctttggtggtgtt

SEQ ID NO: 36214 - DNA, 1989 bp, Streptococcus mutans
gtgttacataaaaaagagacgcaaattatccaacttttgattaaggatgagggacaatttatcaccagtaaggcattagcagaacagttaaattgttcagacaggacgattaggacttactgcaaattgttgtctgagaaattaaaggactattctggtgttgatatcatttctaaacaaggtcaaggctatcagttcaatattaaggacagagaaaagtatcttcattttcttgaagacaatcatatcaatgatcacttattaacctataagaaggtcattgatattaatgaccgttacaattatttgctaaataagctgctatttgagcaaaatgaaatctattttgatgacttggcggatgaactctttgtcagccgttctactttatcaaatgattttaaaaaaataaggaaacgctttgttccttatcatttaaagattgaaagcaaggccaataaaggtgtttttgtgacaggaactgaacgtgacaaaagacgctttatcatggactatttcattcattctggttttattaatacgatgcagacctatattgacaatgagctgctaaatcagaaaatttcttttgaagaattaaccattattgttcttgatgagtgccgtgaaggtcatctaaagctttcagattttgtgattcaaaatttggttattcacattgctttagcgattagaaggataacggaaggctttcatattgccaaaatttcagataaaacggagttgagcaatatgcccgaaagagaagtggccagaaaaattcttaaacgggtgacgctggcaacgcagattgaatttccaatagaagaggttgattatatcaccctgcatctcatttcaaaaagctataataatgctcattacatttcaaatgacaattttgagcagatccgtaaagagctcgtcatggctattgagcagcttgagccctgtttgaaaaatgattttcaatttattgaaggcctgctggcacatctttcaaccatgcttattcgtttggaaggtcagattaatttagaaaatcctttaacagcagaaattcaaaagaattatcaggtgaaatatcaattagcccaaaagttaatgcacagcatgccgattttcagtcctttttctttctctgcagatgaaattgcctatattgctctgcattttatggcagctacagaaaggctcaaagaaaagaataagcataatattttggtcatttgtgctactggctatggtagtgctcaaatgctgaaaaaccgaattgaaaatgaactgggaaatctggttcatatcacggatgttgttggttactatgatatcaatgatgataagctgaaagatattgatttcattatttcttctattgacctctctaatctgatatttaatattcctgttttcacagtttcggttttcttgacagaagaggaattaagtcgaattagacatggtattgcccatatagaagcttccccaacggagttagcgcctgttggagtttctcctgctgatttatcatctgattttgatcattatttttcaaaagatgcttttttgcaactgtcagatgttagtaaagaagaagtgctaaaaaagatgattcttagtatttcaaaaggggaaaagagtcattttgctgacaagatggaagaattaatttatcagcgtgaggcaatgagctcggtggttttcagcgatactattgctgtaccgcatccgataaaagcagtaggcaacagacatcacatagcagtagccatgataaaagatggtctgttttggaatcaggattatcccaaaatgaaactggtctttttaacatcaatgtctatttatgacaatgatggtttacccgaattagcttcttgcattgcaactttggttgatcgaccagatattcagcaaaagatgctgacttgtcaatcatttgaacaatttaaaaagttatttttaaaactagaagaaaaggaaaaaggt

SEQ ID NO: 36215 - DNA, 714 bp, Streptococcus mutans
atgggacgtaaatgggctaatattgtcgctaaaaaaactgctaaagacggtgcaaactctaaagtttatgctaagtttggtgtcgaaatctatgtggctgccaagcaaggggagccagatccagaatcaaattcagctttgaaatttgttttggaacgtgctaaacaagcacaggttccaaaacatgttattgataaggctattgataaggctaaaggaaatacggatgaaactttcgtggaaggtcgttatgaaggctttgggccaaacggttccatgattattgtggataccttaacttcaaatgttaaccgtacagcagccaatcttcggactgcttttggtaagaatggcgggaatatgggagcagctggatctgtttcttatatgtttgataaaaaaggtgttattgtctttgcaggtgacgatgcggacagtatctttgaacaattgcttgaggctgatattgatgttgaagatgttgaagcggaagacggttctgtaacagtttatactgctccaacagaccttcacagaggtattgaagcgcttcgtgctggcggtgttgcagaatttcaagtgaccgaacttgaaatgattcctcagtctgaagtgacacttgaaggggaagatttggaaacctttgaaaaacttattgatgctcttgaagacgatgacgatgtgcaaaaagtttatcacaatgttgatggctta

SEQ ID NO: 36216 - DNA, 1431 bp, Streptococcus mutans
atgtctaaattacctgaaaattttctctggggcggtgcggttgctgcccatcagctagaaggcggttggcaagaaggaggcaagggaatttctgttgctgatgtcatgactgctggtcggcacggcgttgcgcgtgaaatcacagccggtgttctagaaggtaagtattatcctaaccatgaagccattgatttttatcatcactataaagaagatgtcaaattgtttgccgaaatgggcttcaaatgttttcggacttccatcgcttggacacggatttttcctaagggagatgaagcagagcctaatgaagcaggtctgcaattttatgatgacctttttgatgaatgtctgaaatatggtattgaacccgttgtgaccctatcgcattttgaattgccttatcaccttgttaccgaatatggtggctttactaaccgaaaagtaattgatttctttgttcattttgctgaagtttgctttcgtcgttataaggataaggttaagtattggatgactttcaacgaaatcaataaccaagccaattatcaagaagattttgcaccttttactaattcggggattgtttacaaagagggagatgaccgcgaagcgattatgtaccaagctgctcattatgaactggtagcttctgcgcgtgccgttaaaattggtcatgcgattaatcccaatctcaatattgggtgcatggttgccatgtgtccaatttatccagcaacctgtaaccctaaagatatcctcatggctcaaaaagctatgcaaaagcgttattactttgcggatgttcatgtccatggtttttatccagaacatattttcaagtattgggaacgcaaggctattaaggttgattttactgagcgagataagaaggatttgtttgaaggaacggtagattacatcggcttttcatattacatgtcctttgtcattgatgctcaccgtgaaaataatccttactatgattatctagaaacagaagatttagttaaaaatccttatgtaaaggcttctgactgggattggcaaatagatcctcaaggtttgcgttatgctctcaattggtttactgacatgtatcatttaccgcttttcattgttgagaatggctttggagccattgatcaagttgaagctgatggcatggttcacgacgattatcggattgattatctgggtgctcatatcaaggagatgattaaggctgttgatgaagatggcgttgagctcatgggctatacaccttggggatgtattgatctggtttcagcaggaacaggtgaaatgcgcaagcgctacggttttatttatgttgataaggacgatgaaggcaagggaaccctcaaacgttcaccaaaattatcattcaattggtataaagaagtcattgcttcaaatggagatgacatt

SEQ ID NO: 36217 - DNA, 390 bp, Streptococcus mutans
atgaaatttttacatacctgtatccgtgttaaggacttagacgcttcgcttaaattttatcaagaggcactagacttcaaagaagttcgccgcaatgattttcctgaatacaaatttactctggtttatctgcaactagaagacgaccccgactatgagttagaattaacttacaattacgatcacgaagcttatgaccttggcaatggctatggtcatatcgctgtcggtgttgatgaccttgaagcgactcatcaagcgcatcaaaaagccggctatactgtgacagacctttcaggtctgcccggtaagccaaagatgtactacttcatcacagaccccgatggctataagatcgaagttatccgtctcaaacaatttcaggaaaaa

SEQ ID NO: 36218 - DNA, 591 bp, Streptococcus mutans
atgacctatgaagcttatattgccatgaatcgagacgatttactgaaaaaacttaaatcggtagttcctaaaaagcgtttaagacacatgataggtgtcgaaaaagctagtatttatttagctgaaatcaatggttatgacactgagaaagctggtttagcagggcttttgcatgattatgccaagaaattatctgatcaggaatttttacaactcattgataagtatcatcttgattcgcaattaaaaaattggggcaataatgtctggcatggaatggttggcatttataaaattcaagaagatttgggcttgcaagatcaagaaattctgcgtgccattgaaattcatacggtaggttctagtcacatgtcaactttggataagattgtatatgtcgctgattatatcgaatgcaaccgtgatttttcgggggtggacaaggcgcgtgccattgcagaaacgtcgttgaataaggctgttgcttatgagacagctaggacagttgcatttttggctagtaaaggtttgaaaatttatccacaaactctagaaacttataatgcttatgtggactatttaagagaggat

SEQ ID NO: 36219 - DNA, 1683 bp, Streptococcus mutans
atgaaacgtttatttgctattgttgctatgtgtgtcggcatcttcctatgtatgctggacacgaccgtcatgaatattgccctaccagctattcaggacagtctaaaagtgaaccttaatgatcttcaatggtctttaaatgtctatacgattatttttgcttccttaacgattcctttaagtaagttggctgaaaagtttggaaaacacaaattttatcttctaggattgcttacttttatgggaggatctctgatttctgcactgagttctgatcttaactttctcatttttggccgcgggattcaaagtatcggagcagctattgtctttcctttatccatgacaattgggatcaataccgtcagtcttaatacgcgtaaaagcgtcatagcagctttaggcgttactcaaggtctggctgctgctttaggaccaaccattggaggcgtcttgacacagttcttgggctggcgttggattttcctaattaatctgcctttgatggtaatttcctttataatttgccttgtatgtctcgatttacaagaaagaaaagaaaaagccaagattgattatcttggtgctcttatcagtatggcaacacttttttcattgacattgggccttgttcaaggacgagattggggctggaccagctttaatatcctcaccttactcatcagttcagccgtcttgcttattctcttcattctctgggaaaaaggctgtcaagatcctatggttcccttaaatctctttaaaaacaaagaatttatgggttctgctatcgcaattattctcagcaatgtctttttggtagctgtaacagttgtattgcctacctattttacccgtgtacaaagtaaaacggaattggaagctgctttattagtcactccaattacagccatgattcttattttctctccgcttgctgctttcattattgataaattgggaccccgtctggtcattgccagcggtttcaccttaatggcagctgcctatattctgtttacaaaaattgatatggctgacagcacccagacaactctaacctgcttgattctggggactggttacggtattatcgctggtcctattaccgtgttagctgcctcaaacttcactgggagtctgttaacggcgtcccaaagtgtcgctggagttctcaggcaggtaggtattgtcttggctgttgccgtttatgtcacaggtctttatacaaaccttggcactgccaaaaaagaagcgattagctatattaaaactgaggtcaaaaccattgatgtttcaaaagaaaaacagcaaacgattcaaaaaacagcgattcattctttaggacaaagtactagtcatcagacggtttctaatcacttctccaaaaccgagcgcaaaggaatcattaatgaggcttatcaaaagactctgcagaaatacccaagcaaacttcctcaagtacaaaaacaagaaatttacaagaaagtcaaagccagtgtggagaaaaaactagcaacgattaataaacagattaacaaagcgatcaagcatattaaagattattctaggaaaagatataccaaagccttcaccaaactttacagttactcaattatattcattattttagctattttttcaagcctactattccccagaaaaaatacaattatatcaatg

SEQ ID NO: 36220 - DNA, 465 bp, Streptococcus mutans
atggtaaaggctcaaggaaacgtcgtcgctcaaaataaaaaagccagacatgactatgagattctagaaacttatgaagcaggcatcgtgttgacaggaactgagattaagagtgttcgtgcggcaagaattactctcaaagatggttttgctcaggttaaaaatggtgaggtttggctaaataatgtccatattacaccttatgaacagggtaatatctggaatcaggatcctgatcgtacccgtaagctcctccttaaaaagagagaaattgcaaaattggacaatgaactcaaagggacagggatgaccttagttcctcttaaggtttatctcaaaaacggctttgctaaggttctcatcgggcttgccaaagggaaacatgattacgacaaacgtgaatccataaagcgccgcgaacaagatcgcgacattaaacggcaaatgaagcagtttaatgggaga

SEQ ID NO: 36221 - DNA, 1104 bp, Streptococcus mutans
gtggaagaattattttgtatcggctgtggagcgcaaattcaaacgacagccaaagagcaagctggctatacaccaaagtcagccttggaaaaagggcttgaaagcgggaaaatatactgccaacgctgttttagactgcgtcattataacgaaatcacagatgtgcatatttcagatgatgattttttaaagcttctccatgaagtgggggacagcaggactcttgttgttaatgtgattgatatttttgattttaatggctccgttataccgggattgcagcgttttatctctagcagtgatttgcttttagtgggaaataaagcggacattctccccaaatcagtcaaatctgggaaaataacacagtggctgatggagcgtgcgcatgaagaagggttgcggccgcttgatcttatcttaatcagtgcccagaataaatgggcgataaaagaattaattgctaagattgaagaacttcgtcagggacgggatgtctatgttgttggtgttactaatgttgggaaatcaactcttatcaatgccattattcaggaaatcactggtgataaaaatattatcacaacatcgcgttttccgggaacgaccctgaataagattgaaattcctctgaatgatggttcctatatttttgatacgccggggattatccaccgtcatcagatggctcattacttatcagacaaggctctcaagtatatcagtcctaaaaaagaaatcaagcctaaaacttaccaactcaatcctgaacagacgctctttttaggcggtttggctcgttttgattatgtaacgggcgataagcaaggctttacagcttattttgataataatctcaaattacacagaactaagttggctggagcggatgctttctatgacaaacatatcggcagccttttgacgccgccagataagaaggaaatggcagcctttcccaaattggtaaggcatgaatttacgataaaagaaaagacagatcttgttttttcaggtttgggttggattcgcatcaatggcagagccaaaattgctgcttgggcacctgaaggggttgctgttgtgacaagaaaagccttaatt

SEQ ID NO: 36222 - DNA, 1167 bp, Streptococcus mutans
ttgatagcttggttcggtagcttttttactggagcaagcttttcacttgtcatgccttttatggctttatttgttgaggaattaggcgtaaaaggtgacttggtcaagctttatgcaggccttgcagtgtcaatttcagccttagcttctgctctttttgcacctgtttggggacgtttggcagaccgttatggacgcaagcccatgatgattcgagctagtcttgtcatgacttttaccatgggcggtctagcttttgtgacggatgtctatgggctgctttttttacgtttgcttaatgggatgtttgcgggttatgtgccaaatgccaatgcacttattgcttctcaggctcctaaaaatgaatcaggttctgctcttggaactttggctactggtgttattgctggcagtctaattggtcctcttatgggcggtatgcttgctgaatttttaggtattcgcaatgtctttctcttggttggcactttgcttttattggtaatgctgctgacaactttttttattcaggaagatttccgacctgtatctaagaaagatatcttatctactaaagaactctttgctcaaattaaagatcggcaaatactattggggctttttgttaccagtatgattattcaaatttcagctcagtctgttgcccctattctggcactttatattagatatctagggcaaagggacaatctgatgttaattgcgggcttaattgtgtctgctatgggcttttccagcattatttccagttcaagatttgggaaattaggtgataaaattggcaatcaccgtatgttattagcaggtcttttttattgtggtattatttatttgattcttgctcagtcaaaaacacctctgcaattaggaatttggcgctttctttttggttttggtactggagccctcatgccaagtgttaatgctctattaacaaaactaacacctaaggaaggtatctctagaatctttagctacaatcagatgtttaccaactttggtcaggtattgggcccttttgtaggatcgactgtagcagcaggctggggttatcgctgggtcttttatgctacaggagcaattgttcttttcaattttatatggagtcttgttaattttagaaaatatttgaaagttagggaaatt

SEQ ID NO: 36223 - DNA, 918 bp, Streptococcus mutans
ttgggagtaagtatgaagaaatcgtttaagggaacggttcttgttgttctagcagccattgcttggggcatatcaggagtgtcgggccaatttttaatgaagcagggcatttctgtctatttattgacttctttgcgtttattgatatcagggctacttttaattggagttgtcatttggcaacagcctcagcagatcaaagctattctagaggataaaaagatgttagtagggatttttggttttagcatttgtggactgcttctgaatcaatttagttatttgcaggctattcattatactaatgctggaacggcaactgtcctacaatatatggcacctgttttagttttgacaattatttgttttaagaatcgcagtttgccaactataggtgaacttgctgccattcttttagctattttggggacatttgtcatagcaacgcatggacagttgggcaatctcgctctgtctccagttggtcttttttggggtctcttttctgctgtgacttatactctttatatgcttttgcccattaaactcattcataaatgggggagcctcttagttattggattaggtatggtaatgggaggactggtatttggtctagtcagccggtcttggcaatacaattctcattttcaggcaaataacctgttggcttatgttggtttaatcattgttggcagtgtttttgcttatactgcttttttaaagggagtcagtcttattggtgctgtaaaaggcagccttctggcttctattgaaccagtagcagcagtctttttttcagttactcttatgaaagaaattttttaccccatcgatttcctaggcatgctgttgattatactagccgttcttatcatttctatcagagacttattagtaaccaataaagaaaaaatc

SEQ ID NO: 36224 - DNA, 819 bp, Streptococcus mutans
atgccagaattaccagaggttgaaacagtcaggcgtggcttagagcatttgattgttggcaaaaaaattgtatcggtagaggttcgtgtgcccaaaatggtcaaaacgggtgtagaagattttcagctggacattttaggacaaacctttgaaagtattggccgtcgtggcaaatatcttcttttaaatctcaacaggcagaccattatttctcatctgcgcatggaaggaaagtatttgctttttgaagatgaggtaccggacaataagcattttcatcttttctttggtctggatggtgggtcaaccttggtctatcaggatgtccgcaaatttggtacttttgaattattgcctaaaagtcaggttgaagcttattttgttcagaaaaaaattggtcctgagccaaatgccaaagattttaaactcaagccttttgaagaaggactggccaaatcacacaaggtcatcaaaacactacttttggatcagcatttagtggctggacttggcaatatttatgtggacgaagtgctctgggcagcaaaagtcgatccagaacggctagccagtcaactgaaaaaatcagaaatcaaacggattcatgatgaaaccatccgtattctgcaactggctattgaaaagggaggctcgactattcgtagctataagaatagcttgggtgaagatggcagtatgcaggattgcttacaagtttatggaaagacagatcagccttgtgctcgctgtgccacgcctattgagaaaattaaagtaggagggagagggacgcatttttgcccgtcctgccaaaaacaa

SEQ ID NO: 36225 - DNA, 897 bp, Streptococcus mutans
atgtcatttaaatcaggatttgtagctattttaggtcgtcccaatgttgggaaatcgacctttttaaatcatgtcatggggcaaaaaattgctatcatgtctgataaggcacaaacaacccgtaataaaattatgggaatttatactacagataaagagcaaatcgtttttattgatacgcctggtattcataaaccgaaaactgccttaggtgattttatggttgagtctgcctattcaaccctgcgtgaagtggacacagttctttttatggtacctgctgatgaaaagcggggtaaaggcgacaatatgattatagagcgtcttaaagcggccaaggtacctgttattttggttatcaataagattgataaggttcatccgaatcaattactcgaacagattgatgattttagaaatcaaatggattttcaagaaattgtccctatttctgccttgcaaggcaataatgtcagtcatctggtagatcttttggtagatcatctagaagaaggttttcaatattttccagctgatcaaatcacagatcatccagagcgctttttggtatctgaaatgattcgggaaaaagttttgttgctgacgcgtgaagaaattcctcattcggtagctgtggttattgactcaatggcgcgtgatgaggaaacgcataagatacatattcgtgcgaccattatggtggagcgtgacagtcaaaagggcattatcatcggtaaaaagggtgctatgcttaaaaagataggccaaatggctcgtcgtgacatcgaactcatgctaggtgacaaagtctacctcgaaacatgggtcaaggtcaagaaaaactggcgcgataagaaactagacttagccgattttgggtataataagaaggagtat

SEQ ID NO: 36226 - DNA, 411 bp, Streptococcus mutans
atgcctatggacttaagagataataagcaaagccaaaagaaatggaaaaatagaactttaacttccagccttgaattcgctttaacggggatttttacggcttttaaagaagagcgtaatatgaaaaaacatgcagtgtcagctcttttagctgtcattgctggtttggtttttaaagtatcagtcattgagtggctttttcttttattaagtatttttttggttattacctttgaaattgtcaattcggctattgaaaatgtggttgatttggccagtgactatcatttttccatgttggctaaaaatgctaaggatatggctgcaggagctgttcttgtcatttcaggttttgctgccttgacaggcttgattatttttgtaccaaaaatttggtttttgctttttcat

SEQ ID NO: 36227 - DNA, 1437 bp, Streptococcus mutans
atgaattttgaaactatcattggattagaagtccatgttgaattaaaaacaaattctaaaattttttcacctgcaccagcgcattttggagaggatccaaatgctaatacgaatatcgttgactggtcatttccaggtgtcttgcctgttatgaataagggtgttattgattatggcatcaaggctgcacttgctctcaatatggacattcaccaacgcatgcactttgaccgcaagaattatttttatcctgataatcccaaagcctaccaaatttcacaatttgatgaacctatcggctacaacggttggattgaaattgaattagaagatggcagcaccaagaaaattcgcattgaacgcgctcacttggaagaagatgctgggaaaaatacgcatggtgctgatggttattcttatgttgacctcaaccgtcaaggggtccctttgattgaaatcgtatcagaagctgatatgcgttcacctgaggaagcttatgcttatttaacagcccttaaagaaattatccaatacacaggaatttcagatgtcaaaatggaagaaggctccatgcgggtggatgccaacatttctatccgtccttatggacaggaagcatttggtgtcaagactgagttgaaaaacttgaactctttcaattttgttcgtcgcggtttggcctatgaagaaaaacgtcaggcagaagtccttcgttctggaggtcaaattcagcaagaaacacgccgttatgatgaagcaacaggggaaaccttgttaatgcgtgtcaaagaaggttcagcagattatcgctacttcccagaaccagatctaccaatttttgaaattgaagatgagtggattgaaaaagttcgagcagaattaccagcctttccaaaagaacgccgtgctaagtatgtcaatgacttaggattgtcggcttatgatgctgcccaactgaccagctcaaaagccatttcagatttctttgagtcagctcttgctcaaggtgcagatgctaaggctgtttctaactggctccaaggagacgtggcacaatatctcaatactgaaaatcaaaccattgatcaaatcggtttgacacctgaaaatttgactgaaatgcttcagttagtagcagatggaacgatctcttctaaaattgctaagaaagtttttgttcatttagctaaaaatggcggttctgccaaagaatatgtcaaatcggctggtcttattcaaatctctgatccagcacagcttctgccaatcatccaagaagtctttgccaataacgaaaaagcattgaatgactacaaaggcggcaacaaaaatgcagccaaatctctagttggtcaaattatgaaagccacaagaggacaagccaacccacaagtcgcgcaaaaattgcttaatgaagaattggcaaaattaacagat

SEQ ID NO: 36228 - DNA, 1464 bp, Streptococcus mutans
atgacttttaatcataaatccattgatgaattgcatgaccttcttgttaataaggaagtttcagcgctagaattaaccaaggctactttagaagatatcaaggaacgtgaagaaacagtaggttcttttatcactgtaacacaagaagaagcattagcacaggctgctgctattgatgaaaagggaattgatgcagataatgttatgtcggggattcctttggcagtcaaggacaatatttcgaccaaaaatatcttaacaactgctgcctcaaaaatgctttataactataaacctatctttgatgccacttctgttgaaaagctttatggcagggatatgattattgtcggtaaaaccaatatggatgaatttgccatgggtggttctactgaaaactcctatttcaagttgactaaaaatgcttggaatcaagagaaagtagctggtggttcttcaggcggttctgcaacagcagtcgcttctggtcaggtacgtttgtcacttggttctgatacaggtggttctattcgtcaacctgctgcttttaatggtgtcgttggaatcaagccaacttacggtcgtgtatcacgttttggtttgattgcttttggttcttcattggatcaaattgggccattctcacaaacggttaaagaaaatgcccaattgcttaatgttatttcaggaaatgataagaaagattcaacctcttcacaagtaaaagtacctgattttacgcagttcattggtaaggacatcaagggaatgaaaattgcccttcctaaagaatatattggtcaaggaattgatgaaaaggtcaaggaaacgattctgaaagctgctaagcatctagaaagcttaggcgctatcgttgaagaagttagtctgccacacagtaaatacggtgttgccgtttactatattattgcttcatcggaagcctcttcaaacttgcaacgtttcgatggcattcgctatggctatcgcaccgacgattatgaaaatctggatgatgtctatgtcaacacccgcagtgaaggttttggcgaagaagtaaaacgtcgtattatgctgggaactttcagtctttcttcaggttattatgatgcctatttcaaaaaagctggtcaagtacgaacacttatcatggaagatttcaagaaggtttttgccaactacgatttaattttaggtccaacagcaccaactgttgcttatgatttggattcgcaacaccaagatcctgttgctatgtatttagctgacttgttaactattccagtaaacttagctggtctgccaggcatctctatacctgctggttttgtggaaggattgcctgttggtatgcaactaattggaaaaccatttgctgagcaaaccatctatcaagcagcggcagcttttgaagcaagtacggattatcataaacaacaaccagttatttttggaggtggcaac

SEQ ID NO: 36229 - DNA, 300 bp, Streptococcus mutans
atgaaaatttccgaagaagaagttcgccatgtggctaacctttctaagttaaaattctcagatgatgaaacaacagaatttgcaacaactttgactaagattgttgatatggtggaattactaaatgaagttgatacgcaaggtgttccttttacatcaaatgtcgcagataatattaattatatgcgagaagatgtttctgtagcaggttgggatcgtgaacaactctttaaaaatgttcctgaacacgaagatggtctgattaaagtgccagctatcattgatgaaggaggagatgcc

SEQ ID NO: 36230 - DNA, 555 bp, Streptococcus mutans
atggcaaatgctattgtagaaaaagcaaaagaaagatttgaacaatcacaccagtccctcgcgcgtgaattcggcagtattcgtgctggccgtgccaatgcaagtcttttagatcggattgaagtagaatattatggtgtaccaactcctctcaatcaactagcttcaatcactgttccagaagcacgcgttcttttggtttcaccatttgataaatcatcattaaaagatattgaacatgctatcaatgcttctgatattgggattaatccggctaatgacggttctgttattcgtttggttattccagccttgactgaagaaacgcgcaaagagctggctaaggaagtaaaaaaagttggtgaaaatgcgaaggttgctattcgtaatattcgtcgtgatgccatggatgaagctaaaaagcaggaaaagattaaagaaatcacagaagatgaattgaaatctcttgagaaagatattcaaaaagttacagatgaagctgttaagcatattgatagcatgacggcaaataaagaaaaggaacttcttgaagtt

SEQ ID NO: 36231 - DNA, 735 bp, Streptococcus mutans
atggtaaaacctaaatatagtcgtgtattgattaagctctctggtgaggctttagctggcgaaaaaggagttggtattgacattccaactgttcaaactattgctcaggagatcaaggaagttcatgactcaggcattgaaattgctcttgttatcggtggtggaaatctttggagaggcgagcctgcttctaaggcaggtatggatcgtgttcaggctgattatactgggatgctggggacagttatgaatgctcttgttatggcagacgctctccagcatgcaggagtagacacgcgtgttcagacagcaattgccatgcagcaagttgcagagccatatattcgcggacgggcactgcgtcaccttcaaaagggtcgtattgttatctttgctgcaggtgttggttccccttacttctcaaccgatacaacatctgctcttcgcgcagcggaaattgaagcagatgctattttgatggccaaaaatggcgttgacggcgtttataatgatgatcctcgtaaaaatgctgatgctatcaaatttaatgagttaacccatatggaagttctcaaacgcggactgaagattatggattcaacggccagctcactgtcaatggacaatgacattgacttagttgttttcaatctgaatgaatcaggaaacatcaaacgtgttatctttggcgaacaaattgggacaactgtaaccagcagaatttctgattcagaa

SEQ ID NO: 36232 - DNA, 687 bp, Streptococcus mutans
atggctaaaaaaagcaaacaattacgtgctgctcttgaaaaaatcgacagtacaaaagcgtacagtgtagaagaagctgtagcacttgcaaaagaaactaatttcgcaaaatttgatgcaactgtagaagttgcttacaaccttaacattgatgttaaaaaagctgaccaacaaatccgtggtgccatggtattgccaaatggtactggtaaaacgcaacgtgttcttgtttttgcccgcggcgctaaagctgaagaagctaaagaagctggcgcagacttcgttggtgaagatgatcttgttcaaaaaattaacggcggttggctagattttgatgttgttattgcaacacctgatatgatggcaatcgttggtcgccttggacgtgttcttggtccgcgtaacctcatgccaaatcctaaaacgggaacagtaactatggatgttgccaaggcagtcgaagaatctaaaggcggtaaaatcacttaccgtgccgacaaagctggtaatgtacagactatcatcggtaaagtatcatttgatgcagataaactagttgaaaacttcaaagctttcaatgacgttattgctaaagcaaaacctgctactgcaaaaggtacttacataacaaaccttgtactgacaactactcaaggtcctggtatcaaggttgatgcaaattcattt

SEQ ID NO: 36233 - DNA, 423 bp, Streptococcus mutans
atggctaaaaaagtcgaaaacatcgtaaaacttcaaattcctgctggtaaagcaacaccagctccgccagttggaccagcacttggtcaagcaggaatcaacatcatgggattcaccaaagaattcaatgctcgtacagctgatcaagctggtatgattatcccagttgttatctcagtttatgaagataaatcatttgatttcgtcacaaaaacaccgccagctgctgttcttttgaaaaaagctgcaggtgttgacaagggttctggtgaaccaaacaaaactaaagttgcttcagtaacgcgtgcacaagtacaagaaatcgctgaaacaaaaatgccagatttgaacgctgcaaaccttgagtctgcaatgcgtatgatcgaaggtactgctcgttctatgggattcactgttactgac

SEQ ID NO: 36234 - DNA, 2361 bp, Streptococcus mutans
atggctaaaacaaagaataaaagaaaaggacggaaaacacgccgtccaacaaaggcggaattagagaaacaaagagccataaagcgcatggtatttgctttgtttatggcttttgtcctcttttttgcaatttttaaactaggacgagtaggcgtcactgtttataatatcattcgcttgatggtgggaagtctggcttaccctttcatttttgctgctctgatttatctttttgctaccaaatggttgaaaaaacatgatggcttggttggtggttttgtcatcactatgcttgggatgcttttagaatggcaagcctatcttttctccttagcaacgatgaaagatcaaagtgtcatcaaaggcactttggtgattgtttttagtgatctcagtaaatttcgtgttgctaattttgctggcggtggttttttaggggccctcctctatatgccggttgcctttcttttttcaaatattggttcttttttaatcggcggacttttccttcttttaggtctttttctaatgagtccttgggatgtttatgatgtcatgaatttcttcaaggacagttacgctaaatggcaggttaaacggcaggaaaatcgtgaaaaacgctttgcgcaaaaagaagaggcgcgccttttggcacagcaggctgtccaagaagcacaggagtcagcaacgtttgatcatgggctcaatgcagctattgatttagaaacaggcgaggttttagatcaggcacagaccattgatttagatgattttgatggacaagtccataaagaaccagaaattattggttatcagtcggatcctgagggagaagcattagaagcagaagttccagctgctgaacaaaccagtcagttaccaaaagaagaggatatgtcagatgaatccttagaggttgattttacacctaagacaactcttcattataaattgccgggtatcgatctgtttgctaaggacaaacctaaaaatcaaagtaaagagaagagattggtccgtgataatatcaagattttagaagaaacttttactagctttggaattaaggccaatgttgaacgagctgaaatcggtccatctgttaccaaatatgaggttaaaccggcagttggtgtgcgggtcaatcgtatttctaatctagcagatgatttagcgttagctttggctgctcaggatgttcgtattgaagcacctattcctgggaaatctcttgtgggaattgaagttccaaattctgaagtagctacggtgactttccgtgaactttgggaacaggctaaagcgtcgcctgataaattgcttgaagttcctttaggtaaagctgttaatggctcggttcgttcttttgacctagctaagatgcctcatattttggtggcgggttcgacgggttcaggaaagtctgtggcggttaatggtattattgccagtattttgatgaaggcacgaccagatcagatcaaattcatgatgattgatcccaagatggttgaactgtctgtttataatgatattccccacctgctaattcctgttgtgactaatccacgcaaggctagcaaagccttgcagaaagttgttgatgagatggaaaatcgctatgaactctttagccattttggcgttagaaacattgccggttacaatgctaaggtagaagaattcaatcgtcattcagagaccaagcatatacctttgccgcttttggttgtcattgttgatgaattggctgatttgatgatggtagctagcaaagaagttgaagatgccattatccgtttaggacaaaaggctcgtgcggcaggaatccacatgattctcgcaacacagagaccatctgttgatgttatctctggtttgatcaaagccaatgtaccaagccgaatcgcctttgcggtttcttctggaacagatagtcgaaccatccttgatgaaaatggagctgaaaagcttctagggcgaggagatatgctctttaaaccaattgatgaaaaccatcctgttcgtttgcaaggttcctttatttcagatgatgacgttgaacgtattgtgtcctttatcaaggaacaagcagaagctgattatgatgaaagttttgatcctggtgaagtttctgaagatgataattctaatggtaatggtggaaattctgaaggagatcctctctttgaagatgccaaagctttggttctggaaacacaaaaagctagtgcttctatgttgcaacgtcgactttcagttggttttaaccgtgcaacgcgtttaatggaagaattagaagaagcaggtgttattggacctgctgagggaacaaagcctcgaaaagttttgcaaagcaat

SEQ ID NO: 36235 - DNA, 693 bp, Streptococcus mutans
atgaaaattggaattattgcagctatggaggaagaattaaaactcctcttagcggaattaaatcataaaagagaagaaatctgtttagaacgaccttactacagcggtaaactaggtaaacatcaggtcgttctggtgcaaagcggtgttggcaaagtcatgtctgctatgagtgtggctgttttagtagatcattttaaagttgatgctttgattaatacaggttcagcaggagctttagcgccagatttggctattggtgatgttgtagtggcagatagactcgcttatcatgatgtagatttaactgcccttggttatgaatttggacgtatgtcagggcagcctcttttctttaaatcagaccaaacctttgtgagcgcttttgaagaggtgttggctaagcaccatattcatagtaaaatcggtctcattacaaccagtgattcctttatggctggtaaggaaaaaacgatttttgttaaggaacattttccagaagtgcaggcagttgagatggaaggcgcagcgattgctcaagcagcttatgcagccaaacgcccttttgtcgttattcgatcaatcagtgatacagcagctcatgatgccaatattacttttgaagaatttgttgttaaggctggaaaacaatcggctcaagtcctcttaaaatttttggaaatcttagaccaa

SEQ ID NO: 36236 - DNA, 1400 bp, Streptococcus mutans
ttttttatgaaggaatttttatgacgaactatgctattatccttgctgctggtaagggtactcgaatgaaatcggatttaccaaaagttttgcaccaagtggcaggacttactatgttggaacatgttaaacgtgctgttgataccatgaatccagcaaaaacagtgaccgttgtcggtcataaagcagaacttgttcaaaaggttctagaagaccaatcagaatttgtcctccaatcggagcaattgggaacggggcatgccgttatgatggctgagtcatctttggctgagcttgaaggacaaacgcttgtcattgctggtgacacgcctttgattagaggagaaagcctgaaaaacttgctgcattatcataaaagccataaaaatgtagcgacaatcttaactgctgaagcagatgatcctttcggttatggtcgtattattcgcaatcaaaatgccgaagtaatcaagattgttgaacaaaaggatgcttctgattatgaacaacaagtcaaagaaattaacacgggaacgtatgttttcgacaataagcgcctttttgaagccttaaaagaaatcaataccaataatgctcagggtgaatattatttgacagatgttatcagtatttttaaagaggcagatgagaaggttggtgcttataaactagctgattttgacgagagtctgggagttaatgatcgtgttgctttagcaaaagcagaaaaagttatgcgtcgtcgcattaatcatgcgcatatggtcaacggtgtgactttgacaaacccagctagtacctatattgacagtgatgttatcattgcgccagatgtagttattgaggctaatgtgactcttaaaggtcagaccaaaattgaaacaggagctgttttgactaatggtacctatattgttgattcagttattggtgaaaatactgtaattacccattcaatgattgaagcttctcggattgaaaaaaatgttacagttgggccttatgcacacttacgaccaaattcagtcttagaagaagcggtccatgtggggaattttgtggaagttaaggcttcgacacttggtaaagagaccaaagcagggcatctgacctatattggcaatgctgaggttggtcatgatgttaattttggtgctggtaccattacagtcaattatgatggacaaaataaatataagacaattataggcaaccatgtttttgttggcagcaattctaccatcattgctcctttaactattggtgataatgctttgacagcagcaggttcaacgattcataaagatgtcccagttgatagtattgctatcggtcgcggccgtcaagtcaataaagaaggctatgccaagaaaaaaccgcatcatcccaataataaatag

SEQ ID NO: 36237 - DNA, 1113 bp, Streptococcus mutans
atgattgctagttaccatcgtccgacgacagctttagttcatttagatcgtatcaaatttaatatcgaacaagttcaacaccatattccaaaatcagccaaaacttttgctgtggttaaagccaatgcctatggacatggtgctgttcaggtggctcaagccattcaaaagcaagttgacggtttttgtgtttctaatttagatgaggccttggaattgcgtcaggctggtctaaatgattttattttaattttgggtgtccttcttcctgaggaagttgccttggctaaaaaagaaaatattactattacagttgctgacttagattggtttgataaagtacagacagaaaacattgatttagctggtctttcagtacatgtaaaagtcgattctggtatgggaagaattggagttcgcagtactgcagaagcgaatcagcttattgcaggtttgcagaaggcgggagcgactgttaatggtatctttacccattttgcaacagcagatgaagcttctactgttaaattcagtcaacagttagagatgtttaccacccttatcagtcaattggattacaaacctcaaacagtacatgcttctaactctgctacaagtatttggcatagtgatacagtaatgaatgctgttcgcctgggaatagtgatgtatggactcaatcctagtggcaatgcacttgaattaccttatgaagtaaagccagcattagagttgacatccgctcttgttcaggtcaaagaagtgcaagctggtgatacagttggctatggtgcgacttatactgccagtcaggctgaaattattggaaccgtccctgttggttacgctgatggttggacaagagatttgcaaggttttcatgttttggtgaatggtcactattgtgaaattgtggggcgtgtgtccatggatcaaatcactattcgcttacccaaagcttatcctttagggaccaaagtcaccttaattgggcaggatggtcatgaaacgatttcagcaacagatgtcgctgaaaaacgagagacgattaattatgaagtgctctgtttgatcagtgaccgagttcctcgaaaatatgataaaaagttcagt

SEQ ID NO: 36238 - DNA, 357 bp, Streptococcus mutans
atgataataggacacggaattgatttacaagatattgctgctgttcagagagctcatgagagaagttcacgctttgccagcaaagttttaacatttaaagaattagaaattttcactagtctcaaaggtaggcgtcaagtagagtatttagcaggacgttgggctgctaaagaagccttttcaaaggcttatggcagtggcattggttctttgcgctttcaagatttagaaattttggctaataataaaggagcaccgatttttacaaagtctcccttttcgggaaatatttttatcagtatttctcattctaaaaattatgttgaggccagtgttattttggaggagaataactta

SEQ ID NO: 36239 - DNA, 2007 bp, Streptococcus mutans
atgactgaaaaacaaccattttacattacgacaccgatttattacccgtctgggaaactccatattggctctgcctatacaaccattgcttgtgatgtcttggctcgctataagcgtatgatgaatcatgacgttttttatttgactggacttgatgagcacggtcaaaagattcagcaaaagtctgaagaagctggtatcacaccgcaggcgtatgtggacggtatggcggttggtgttaaggaattgtggaagctccttgacatctcttatgataagtttatccgcacgacagatgattaccatgaaaaagttgtggctgatgtttttgaaaaattgctagcgcagggagatatttacttgggtgaatactcaggttggtattctgtttctgacgaggaatttttcactgaaagccaattagaggaaatcttccgtgatgaagacggtaaagttatcggtgggattgcaccatcaggtcacgaagtggaatgggtttcagaagaatcctatttcctccgtctcagtaactatgctgatcgtctagtagattttttccatgctcatcctgattttatccagccagatggtcgtatgaatgaaatcatcaagaactttattgagcccggtttagaagatttagcagtttcgcgtacctcatttacttggggcgttaaagtaccttcaaatcctaagcacgtggtttacgtatggattgatgcccttctcaactatgcaacagctcttggttacggtcaagatgcccatgccaactttgataaattctggaatggtacagtcttccacatggttggcaaagacattctgcgcttccactctatttattggccaatcctgctcatgatgcttgatttaaagatgccagaacgtctgattgctcatggttggtttgtcatgaaagatggtaagatgtccaagtctaaaggaaatgtcgtttacccagaaatgttggttgaacgctacggacttgatccgcttcgctattatctcatgcgtagtcttccagtcggttctgatggcacttttacgccagaagattatgttggtcgtatcaactatgaacttgccaatgaccttggtaatctcctcaaccgtaccgttgccatgattaacaagtattttggtggtgagattcctgcttatgtggaaaatgtgacggattttgatgctgatttggcagcagtagttgctgataatttggcacaataccacaaacaaatgaatgctgtggattatccacgcgcccttgaaacggtttggaacatcatttcgcgtaccaacaagtacattgacgaaactactccttgggtattggctaaggataaagctaaacgtgatgatttagcagcggttatggcacatttggcagccagcctgcgcgtggtggctcacctcattcagccatttatgatgaccacatcaaatgccatcatggaacagcttggtttggccggtcaatttgatttagaaggtcttgaacttgcaggacttccgacgggtgtcaaagtgattgccaaaggcacgccaatcttcccgcgtcttgatatggatgaagaaattgcttacatcaaagaacaaatgggtgacaactctgcgattgcccaagaggaagaaaaagaatggaacccaacaacagttgagctcaaaaacgagaagaaggctattaaatttgacgattttgacaagttggaaatccgtgtggctgaggtcaaggaagtgtctaaagtgaagggttctgacaagcttcttaagttccgcttggacgcaggggatggcgaagatcgccaaattctgtctggcatcgccaaatattatccaaatgagctagacttggttggtaaaaaactccaaattgttgccaaccttaaaccacgtaagatgatgggcttggtcagtcaaggtatgattctttcagctgaacatgctgatgggaaacttaccgtattgacggtagattcttcagtaccgaatggtagtcagattggg

SEQ ID NO: 36240 - DNA, 603 bp, Streptococcus mutans
atgacttggaacacaccgaaaccaggagagtggaagagtgaagaactaagtaagggacgtattattgattataaggcctttaattttgttgatggagaaggcgtgcgtaattctctttatgtagcaggttgcatgtttcattgtgaaggctgttataatgttgcaacttggtcttttgatgcaggaattccttatacacaggaattggaagaacagattatggaagatttagcacagccttatgttcaaggtttaacgcttttaggcggagaaccctttttgaatacgggtattcttttgcctttactaaaaaggattcgtaaagagcttccggagaaagatatttggtcttggacaggctatacttgggaagaattaatgctggaaactcctgataaattggaaatgcttaatttgcttgatattttggtggatggacgttttgataaatccaagaaaaatctaatgctgcaattccgaggttcttccaatcaacgtatcattgatgtgccaaaatcgctagcttcaggtcaagttgtgatttgggataaactcaatgatggcaaacagacctatgaacaaattgacagagatggactgata

SEQ ID NO: 36241 - DNA, 2517 bp, Streptococcus mutans
atggcaaatattctacgcactatcattgaaaatgataaaggcgaagtaagaaagttaacaaaaatagcaaaaaaagttgaaggttatgctaatgaaatggaggcactttcagacgaagaacttcaggcaaagactgacgaatttaaagaacgctatcaaaatggtgagaccttggatgatttacttcctgaggcttttgctgttgttcgtgaagcctcaaaacgcgttttaggtctctatccttatcgtgtccaaatcatgggcggtgttgtccttcatcatggcgacgttccagaaatgcgcactggtgaggggaagaccttaacggctaccatgcctgtttaccttaatgccttggctggcgagggcgttcatgttgttactgttaatgaatatctagcaacacgtgatgcaactgaaatgggagaattatattcatggttgggactgtctgttggaattaatttagcggccaagtcttctagtgaaaaacgtgaagcttataactgtgatattacttattcaactaatgctgagattggttttgattatcttcgtgacaatatggttgttcgcaaagaaaatatggtacagcggccgcttaattttgctttagttgatgaggtggattctgttctaattgatgaggctagaacgccattaattgtttcaggacctgttagcacagaaaccaatcagctgtatcatcgtgcagatagttttgtaaaaaccctatcagaagatgattatgctattgatacgcctactaaaacgattggcttaaaagattcaggaattgataaagcagaagagtatttccatctagaaaatctttacgacattgataatgtggctttgacccactatattgacaatgctttgcgcgctaactacattatgttacttgatattgattatgtggttagtgaagaacaggaaattctaattgttgaccaatttactggtcgtacaatggaagggcgtcgtttttcggatggtctccaccaagctattgaagcaaaagagggggtaccaattcaggatgagtctaaaaccagtgcttccattacctatcaaaatatgtttcgcatgtataaaaagttagcgggaatgacggggactgcgaagacagaagaagaggaatttcgtgaaatttataatatgcgcattattcccattccaaccaatcgtccggtagcccgtattgatcatcaggacttgctctacccaacacttgaagcaaaatttagagctgttgttgctgatgttaaggaacgccatgaaaagggacagcctgttttggttggtactgttgctgtcgaaacatcagatttgatttcaaaaatgctagttcaagcaggtgttcctcacgaagttcttaatgctaaaaatcactttaaagaagctcagattattatgaatgcgggtcaacgtggtgctgttaccattgccaccaacatggcaggacgcggtactgatattaagttgggcgagggtgtacgtgagctcggcggtctttgtgttattgggacggaacgtcatgaaagccgtcggattgacaatcaattacgtggacgttctggccgtcagggtgatcctggtgagtcacaattctatctctctttagaagatgaattaatgcgtcgttttggttccgagcgtatcaaagcttttcttgatcggtttattgaggaagataatgatgtggtgattaaatcacgcatgctaaccaatcaagttgaatcagctcaaagacgtgttgaaggaaacaactatgatactcgtaagcaagttcttcaatatgatgatgttatgcgtgaacagcgtgagattatctatgctgagcgttacgatgttatcacagcagaacgtgaccttgccccagagattaaggctataattaagcgaacaattgaacgcactgtggactctcatagtcaattggatcgtaaggaaagcctagatgctatccttaactttgctaaaacaaatcttttaccagaagacactatcagtttacatgatatagaagatttaaactatgaagatattaaggatctgctctatgatgcagctcttaaaaattatgaccgtcaaattgctaaacttcgtgatgaagaggctgttcgagagttccagaaagtgttgatcttgatggttgttgataataaatggacagatcatattgatgctctggatcaactgcgcagttcagttggtttacgtggttacgcgcagaataatcctattgttgaatatcaatcagaaggtttcaggatgttccaagatatgattggtgctattgaatttgatgtgacacgtaccatgatgaaggcgcagattcatgaacaagaacgtgagaaagaaactgaaagtaggacgacagctgagcaaaatatttcagcacagtctactatttctccacaggatccaatctttaagaatgtgggccgtaatgataaatgtccatgtggttcaggtaagaagtttaaaaactgccatggacgcaagcgattt

SEQ ID NO: 36242 - DNA, 948 bp, Streptococcus mutans
atggcagaacctttgtttttacaatcacaaatgcataaaaaaatctggggcggcaatcggctcagaaaagaatttggttatgacattcctagtgaaacgacgggagaatattgggcgatttctgcgcatcctaatggagtgtctgttgttaaaaatggtgtttataaaggtgtccccttagatgaattatatgcagagcatagagaactgttcggcaatagcaagagttctgtttttccgcttttaactaaaatcttagatgccaacgattggcttagtgttcaagttcatcctgataatgcttatgctttggaacatgaaggtgagttaggaaagacagaatgttggtatgtcatttcagctgatgaaggtgctgaaattatctatggacacgaagctaaatctaaagaagaattgcgtcaaatgattgccgcgggcgattgggatcaccttttgacaaagattcctgttaaagctggggatttcttctatgttcctagtggtactatgcatgccattggtaagggaattatgattttggagacacagcagtcaagtgatacgacctaccgcgtttatgattttgatcgcaaagatgatcaaggacgaaaacgagctcttcatattgaacagtcaattgatgttttgacaattggtaagccggcaaatgcgacgccagcttggttatctctacaaggccttgaaacaacggtcttggtttccagccctttctttactgtctataaatggcagattagtggttccgtcaaaatgcagcagacagctccttaccttttggtgagtgtccttgctggacaaggtcgtattacggttggtttagaacaatatgccttaagaaaaggagatcatcttattcttcctaatactattaaatcttggcagtttgatggtgatttagaaataattgccagccattccaatgaatgt

SEQ ID NO: 36243 - DNA, 879 bp, Streptococcus mutans
atgtctaaattatatggcagcatcgaagctggcggaacaaaatttgtctgtgctgtaggtgatgaaaattttcaaattttagaaaaagttcagttcccaacaacaacaccttatgaaacaatagaaaaaacagttgctttctttaaaaaatttgaagctgatttagccagtgttgccattggttcttttggccctattgatattgatcaaaattcagacacttatggttacattacttcaacaccaaagccaaactgggctaacgttgattttgtcggcttaatttctaaagattttaaaattccattttactttacgacagatgttaattcttctgcttatggggaaacaattgctcgttcaaatgttaaaagtctggtttattatactattggaacaggcattggagcagggactattcaaaatggcgaattcattggcggtatgggacatacggaagctggacacgtttacatggctccgcatcccaatgatgttcatcatggttttgtaggcacctgtcctttccataaaggctgtttagaaggacttgcagcgggtcctagcttagaggctcgtactggtattcgtggtgagttaattgagcaaaactcagaagtttgggatattcaggcatactacattgctcaggcggctattcaagcgactgtcctttatcgtccgcaagtcattgtatttggcggaggcgttatggcacaagaacatatgctcaatcgggttcgtgaaaaatttacttcacttttgaatgactatcttccagttccagatgttaaagattatattgtgacaccagctgttgcagaaaatggttcagcaacattgggaaatctcgctttagctaaaaagatagcagcgcgt

SEQ ID NO: 36244 - DNA, 276 bp, Streptococcus mutans
atgggatttgctgaaacgtttaaggctttgtcaaatccaattcgacgcgatattctagatttactaaagttggggcaattatcagctggtgaaatttctagtcattttgaactagcgggagctactatttcgcaccatcttagtgtcttgaaaaaagcagatttggtacgagaaacacgagagaagaattttatttactatgaactcaatacctcggttttggaggatatgatggtctggttggctgatttgaaaggaaatacgcatgatgaagat

SEQ ID NO: 36245 - DNA, 1173 bp, Streptococcus mutans
atgaatttgctgcactttttgcatatttaccagaaaaaactgcaaattagaatagctgtagctcatgtgaatcacaaacagagaccacaagctgatgaagaagaaatttatcttaaaaattgggcacgagacaatcatattcctttttatactgctgtttttaagggaattttttcagaaaaaaaggcgcgtgattttcgttatacttttttcaaaaatataatgaaagagcatggatatacagctcttgttacggctcatcatgctaatgatcaggctgagacagtctttttacgtttactcagaggatcacgcttacgatatttgactggtattaaagaaattcaggagtttggcaatggccaactgattcgtccttttttaaaatttcacaagaaggaactaccaaatattttccattttgatgatgattcaaatcaaggagattcttatcttagaaatagaatcagaaatcattacttgcctattttgacacaggaaaatcctaaattaagtcagcatttaatccaaatgagtgaagaaacaaatctccttttcaaggctttttcagatttaacctcgcaattagatattcaagattgtcaaatttttagaagtcaaagtgaggcaatacagtactttttattgcagaactatctaagaaaatttccaaatttagaagtcagcaaagctcaatttgataatttgcttcatattctgagaacaaaagattattactatgattatttaaaaaataattactatttgaaaaaagacaaaaaaaggttcaaaatttgtaaaataggtcctgagacggatagatttgaaggcgaaaaagtattagaatatggcagtatggtcaaatatggtcagtacattttctcttttcaagagggttcagattcaaaaaaaggaatccctgtaaaaaatgattttcctattattataagacgtcgtaagcctggggacaaaatcaaattaggaagtcattctaaaaaattgcgacgtttatttatagatgaaaaaattcctatttttaaacgttcaaatgctattattgttgaacaagatagcgatattatattaattcttttagatggagttacttatttgagaaaaggttttaaagatgatataatgaaaggcagactgtatattcaaaatagaaattgg

SEQ ID NO: 36246 - DNA, 1968 bp, Streptococcus mutans
atgaaaaataatcgaaataatggatttgttagaaattctcttgtttatatcatattgattttagctattgtgacaggttttcaatatttttttagaggaacaggttcacaaagtgaaaaaattagttatacaactctcgttaaacgcgtcaaatcgggtgatataaaatcaattacttaccaaccaagtggtagtatcgtccaagtaacaggtgattacacaaagtctcgggaaattaaaactaacagtgacttagcttttttcaacgggacaacaacaaaagttaaaaagtttacctcaattgtccttcctaatagtacttctattgaaaaaattgaaaaattagcagaagataaaggaactaaaatttctgttaaacaagagagttcaagcggagcttggatctccttcttaatgagtttcttgccaattttcataatgatcttcttcttcactatgatgttaaatcaaagtggcggcggtgcccgtggtgccatgagttttggtaaaaataaagctcgttcttcttctaaaagtgatgttaaggttcgattctcagatgttgctggtgcagaagaagaaaaacaagaacttattgaagttgttgattttctaaaagatcctaaacgttataatgctttaggtgctcgtattccagccggtgttctgcttgaaggccctccaggaacaggaaaaacacttcttgctaaagcagtagccggtgaagctggtgttccgttcttctctatttctggttctgactttgttgaaatgtttgttggggttggtgctagccgcgttcgttcattatttgaagatgctaagaaagcagagcgtgccattatctttattgatgaaattgatgcggtcggtcgtcgccgtggcgctggtatgggcggcggaaatgatgaacgcgaacaaacacttaaccaactgttgattgaaatggatggttttgaaggtaatgaaaatattattgttattgcagcaaccaaccgtagtgatgtcttggatccagcccttcttcgtccaggtcgttttgaccgtaaagttcttgttggtcaaccagatgttaaaggtcgtgaagcgattttacgtgttcatgctaaaaacaaacctctagctagtgatgttaatctaaaagttgttgcgcaacaaacaccaggttttgtaggtgctgatttagaaaatgttctgaatgaagctgctcttgttgctgcccgtcgcagtaaaaaaattattgatgccagtgatattgatgaagcagaagatcgcgttattgcaggcccgtctaagaaagataagactgtttctgaacatgaacgtcagatgattgcctaccacgaagctggacataccattgtaggacttgttttatcgaatgcacgagttgttcataaagttactattgttcctcgtggtcgagctggcggttacatgattgctcttccaaaagaagatcaaaatctcttatcaaaaagtgatttgaaggaacagttagctggactgatgggaggacgtgtcgcagaagaaattatcttcaatgctcaaacaacaggtgcttcaaatgactttgaacaagccactcaattggcacgatcaatggtaacagaatatggtatgagtgaaaagctcggtccagttcaatatgaaggtaatcattcaatgatgccaggacaatttgcatcagaaaagacttattcagcacaaacagcccttcttattgatgaagaagttcgtgaacttcttaatgaagctcgcaataaggcagctggaattatcaatgataatcgtgaaacgcataaattaattgcagaagcgcttcttaaatatgaaactttggatgcagcgcaaattaaatctatttatgagactggtaagatgcctgaaaaatcagaggattcaaaggatgcacatgcgctttcttatgatgaaataaaagaaaaaatgtctgaagataatactgat

SEQ ID NO: 36247 - DNA, 1410 bp, Streptococcus mutans
atgactattttcagaaagaagaatactaatttagataaaacagaaatgaaacgtcactttaaagtaattgatctaatttttcttggattaggatcaatggttggaacaggaatttttacaattactggtattggtgcagctaagtatgcgggtcctgctttgattatttcaattattgtttcggcaattgccgttggaatttctgcacttttctatgctgaatttacttctcgaatacctgcaaatggtggagcttacagctacttatatgctactttgggagaatttcccgcttggttagctggttggtacattattatggaatttcttactgcaatttcaagtgtagcatctggttggggaagttatttcaagggattgttatcaagctatggtattgaattaccatctttgcttaatggtacttttaatccagctaaaaataattacattgacttgcttcctgccttagtcatttttttagtcacaggaatcgtgttattaaattctaaaattgccttacgctttaatagtagtttagttgtaatgaaattttctgccttagccctttttataattattggattgttttatataaaacctgaaaattggtctaattttgcaccttttggttttggaaaaatttatggtggacaaactggaataatggctggcgcttctttgatgttttttgcatttttgggatttgaatctatttcaatggcagtggatgaagttcaaaaaccacaaaaaaatattcccaaaggtattattgcttctttaacgattgttaccattctttatgttagtgttactcttgtattaactggtattgttcattattctaaattaaatgttgccgatgcagttgcctttgcacttcgtcaagcgggtttggtatgggcagcaaactatatttcagttgttgcgattctgactcttataacagtttgcatttctatgacttttgctttagctagaaccgtttatagtattagtcgtgatggattattgccaaaacaactcggcattgttaccaaacatagcaaggttccgaaaaatgctactcttcttgttggttttgcttctatgatttgtgctggagtttttccgctttctagcattgcagaatttttaaatatttgtaccctagcttatcttattatgttggccattgctattatcaagctcagaaaagatcagggacaacctaaaattggagaattcaaaacaccatttatcccatttttacctattgtttctatagttatatgcttatctcttatgagtcaatataagtctgtcacttggattgcatttggaatcagtacatctataggtttcttaatttactttgcatatggctatagacattcaactattttcataaaaaataatccaaaaattaga

SEQ ID NO: 36248 - DNA, 2202 bp, Streptococcus mutans
atgattgcacttgagaaagaaaatatttttgtgaaaccagatgtcatcgtgattaaacgtgatggacgtcacgttgcttttgataaggataaaatttatcaggctattgtcagggcaagtaatcaagtgacagaattaacaccttttattgaagcaaaattatcaggtattgctgatcgtgttgtcgctgagatttatgaacgttttactgaaaatattaaaatttatgaaattcaaaatattgtagagcatgagctgctgcaggctggagagtacgttatcgctcaggaatatattaattaccgtgcgaaacgtgattttgagcgttctcaggcaacggatatcaactttaccattgataaattaattaacaaggatcaagctgttgttaacgagaacgccaacaaagacagtgatgttttcaatacacagcgtgatttaacagctggtattgttggaaaatcaattgggcttaaaatgctgccagaacatgttgccaatgctcatcttaaaggagatattcattttcatgatttggactacagtccttatacaccaatgactaactgctgcttgattgattttaaaggtatgctgcattcgggttttaagattggtaatgctgaggttgaaagtcctaaatctattcaaacagcgacagctcaaatttcacaaattattgcgaatgttgcttccagtcagtatggtggctgttcagcagatcgtattgatgaaactttagctccttatgcagaattaaattatcaaaagcatttaaaggatgctgaaaaatgggtcagtgaagataagcgtgaagattatgcgcgtgaaaagacgaaaaaagatatttacgatgctatgcaaagtctagagtatgaaattaacacactcttcacatcaaatggtcaaacaccttttacatcgcttggttttggtcttggtaaggattggtttgaacgcgagattcaaaaagcgattcttaacatccgtattaaaggattgggcagtgaacatcgtaccgcaatttttcctaaattaatttttactttgaaacgcggattgaacttagaaccaggaacgcccaactatgatattaagaaactagcgcttgaatgtgctactaagcgtatgtatcctgacatgctgtcttatgaaaaaattattgaattaacaggctcgttcaaggttcctatgggctgccgttctttccttcaaggatggaaggatgaaaatggcgttgaagttaattcaggtcgtatgaatcttggagttgttacggttaatttacctcgtattgcccttgagtcaaatgggaatattgataagttttgggatatctttaaggaaaaaatggctattgctaaagatgccctagtttatcgtgttgaacgtgtcaaggaggcaacgccggctaatgctccgattctttatcagtatggagcttttggtaagcgtcttggcaaggatgattctgttgatgaactttttaaagaacgtcgcgccactgtttcacttggatatattggactttatgaagtagcgacagtcttctatggcggtaactgggaatcaaatcctgttgctaaggattttaccattgatattgttcgtcaaatgaaggatctttgtggcaagtggtcaaatgaatacgattatcatttttcggtttattcaacaccatctgaaagtttaacggatcgtttctgccgtttggatactgaaaagtttggtatcatcaaagatatcactgataaagaatattatacgaattctttccactatgatgttcgcaaaaatccaacaccgtttgaaaagttagattttgaaaaagactatccggatgcaggtgccacaggtggtttcattcattactgtgaataccctgttcttcaacaaaatccaaaagcacttgaagcggtgtgggattatgcttatgatcgtgtcggttatctgggaacaaatacaccaattgatcattgctataagtgtgattttgaaggcgattttacaccgacagaacgtggttttatgtgcccaaattgtggcaatacagaccctaaaactgctgatgttgttaagagaacgtgtggttatcttggcaacccacaggctcgtccaatggtgaatggccgccataaggaaatctcagcacgtgtcaaacacatgaatggttcaaccattaaaaatccggggcacaaggca

SEQ ID NO: 36249 - DNA, 297 bp, Streptococcus mutans
atgtcacataatcatgaacaagagcatgatcttatcacgcttgttgatgaacaaggaaatgaaactttgttcgaagttcttttgactattgatggtaaagaggaatttggaaaaaattatgttctcttggttccagcgggtgctgaagaagatgctgatggtcaaattgaaattcaggcctattcatttactgaaaatgaagatggaacagaaggggctcttcaacctattccagaagatgctgatgctgaatggattatgatcgaagaagtctttaatagttttttagatgaagat

SEQ ID NO: 36250 - DNA, 960 bp, Streptococcus mutans
atggttgcaaaattaacagatgtcgcaaaactcgctggcgtaagtccaacaaccgtttcacgcgtgattaatcgaaaaggctatctctctgaaaaaacaattactaaagtacaggctgccatgaaaactctaggatacaagcccaataatctcgctcgcagccttcaggggaaatctgccaagctaattggacttattttccctaatatcagtcacatcttctattctgaacttattgaatatttagaaatagagttgtttaaacatggctacaaagccattatttgtaacagtcagaataatcccgataaagaacgggattatctcgaaatgttagaagctaatcaggttgatggcattatttccagtagtcacaacctcggcattgatgactatgagaaagtttctgctcctattattgcctttgatcgtaacttagcacccaatattcccatcgtctcttctgacaattttgaaggcggacgaatggccgcaaaacttttaaaaaaacacggctgccaacatcccattatgatcgctggaaaagataattctaattctccgacaggactgcgacaattaggctttaagtccgtctttgctcaagcacctatttttcatctatctggagagctgtccatcattcgtaaagaaatggaaataaaagtaattctccaaaatgaaaaacctgatggtatctttttgtccgatgatatgacagctattttaacaatgaaaattgctaaccagttaaacattaccattccccatgaacttaaaattattgggtacgatggaacacactttgttgagaactactatccttatctaacaactattaggcaacctattaaagatatcgcacatcttttggtagacgtattgctaaagaaaattgatcaccaagatactcctaaagattatattctccccgttggtcttttatcaggagaaagtgtt

SEQ ID NO: 36251 - DNA, 417 bp, Streptococcus mutans
atgagaataataggactggatgttggttccaaaacagttggtgttgctgttagtgacccactggggtttacagcacagggtcttgaaattattcctattaatgaagctaaaggagagtttggctttgatcgtctagctgatttggttaaggactacaaggttgaaaagtttgtagttggtttacctaaaaatatgaataatacaagtggtccgcgtgttgaggctagtcaggcttatggtaagaaaatcaaagaacttttcgatttacctgttgaatatcaggatgaacgtttgacgactgttcaagctgaacgaatgctagttgagcaggctgatgttagtcgcggtaagcgaaaaaaggttattgataagttggctgctcagctgattttgcaaaattatttggatcgtatgttt

SEQ ID NO: 36252 - DNA, 429 bp, Streptococcus mutans
ttgatgactaatgtatttgtggactctaggcgcgatcttcgtgaacgtgcttttcaagcacttttttctttggaatttggtggcgataatttaacagcagcaagatttgcttatacttatgataaaaatgaagaggaagaggctgaacttcctctcttcttactgactttaatacaaggtgtatctgattgtagaagggaaatagataagaatatttctattcatctaaaatctggctggacgctttctcgattgactttgattgataagagcctgttgcgtttaggtttatacgaaattaaatatcataaggaaacaccagaacgtgttgctcttaatgaaattattgaaattgcaaaaaagtattcagatgagaaatccagtaagtttattaatggcgttttaagtcagtttgtgcttgaaagaaaa

SEQ ID NO: 36253 - DNA, 267 bp, Streptococcus mutans
atgggatttacagatgaaacggtccgttttaaccttgacgatggtaataagaaggaaattagcgaaaccttgactcatgtctatcgttctttggaagaaaaaggttataatccaatcaatcaaattgtgggttatgtcttaagtggggatcctgcttatgtgcctcgctataatgacgctcgaaatcaaattcgaaaatatgaacgtgacgaaattgttgaagaattagtgcgttactatttgcaagggaatgggattgatttaaaa

SEQ ID NO: 36254 - DNA, 492 bp, Streptococcus mutans
atggtcctttacaagcagatttatcattctcctttgggagatttatctcttgttgcaaataatcagggtctaattggcgtttggttccttaatcaaaaatactttgaacaaggattggagggagaaacagtcatagagcaagcaaatactatcttagatcaagccaaacagtggctagatacttattttgctggggaaaatcctaatatggtaaagtttcctttgaatccacgggggactgcttttcaaaagcgcgtctggcaggccttgtctgaaattccttggggacagactagagcttatggagatattgctcaaaaaataaactgcccatccgcccgagcaattggtggatcagttagtcgcaatccgttaagtatcattatcccttgtcaccgtgttcttggtgctgccggtcaaatgacaggctatgctgctggtattgataaaaagatgtggttattagagcatgaaggctttaaagttgacaag

SEQ ID NO: 36255 - DNA, 552 bp, Streptococcus mutans
ttggaaattagacaagctttccccaatgaagtcgttgccgtaatggcagtcctcagttctgccaagcaatttttagcagaatcaggatctagtcagtggcagggtgaaaatggttaccccaacgaagacgatgtctttgatgacattttgcaggggcaggcttatgtggcggttgttggtggacaaattgtggcttatgctgcagtcattgatggcaaagatgaggcttatgacaaaatttatgatggcaaatggcagcacaacaactatcgttatatcaccatccatcgtctagctgtcttgcgagattttgcgggtcaagggattgctcagactttcttgcagggtctgattgaaggtcaggctggttcagatttccgtattgatacgcatgaaaagaacaaagctatgcggcatatcgttgaaaaattaggctttgtctattgcggtaaagtaccaattgatggtgagcgtttagcttatcaaaaaatcaaacagaataatgagaatgctctctatcaagaaattgatgaagcagattatcatggcttt

SEQ ID NO: 36256 - DNA, 1149 bp, Streptococcus mutans
ttggccaaaagaataaaaaagacagaagaaataacgaaaaaatttggtgatgagcgtaagaaagctcttgatgatgctttgaaaaacatcgaaaaagattttggtaaaggtgcagttatgcgtctgggtgaacgcgctgaacaaaaggttcaggtgatgagttcaggaagtctggctcttgatattgctcttggggcaggcggttatccaaaagggcgtatcgttgagatttacgggccagaatcttctggtaagacaactgtcgctcttcatgctgttgctcaggcgcaaaaagatggcggtattgccgctttcattgatgcagaacatgcccttgatccagcctatgctgctgctcttggtgttaatattgatgagcttttgctttcacaaccagattcaggagaacagggtcttgaaattgcagggaaattgattgattctggcgctgttgatttagttgttgttgactcagtggcagctttagtaccacgtgcggagattgacggagatattggtgatagtcatgttggcttacaagcacgcatgatgagtcaagcgatgcgtaaattatcagcttcaataaataaaacaaaaaccattgccatttttattaatcaattgcgggaaaaagttggtattatgtttggtaatccagaaacaacccctggcgggcgtgccttgaagttttattcttctgtgcgtcttgatgtccgtggcaatactcaaattaaaggaaccggggaacaaaaagacagcaatattggtaaagagaccaaaattaaagttgttaaaaataaagttgctccaccatttaaggaagcttttgtagaaattatatatggtgaaggcatttctcgtacaggtgaattagttaagattgccagtgatttgggaattatccaaaaagctggagcttggtactcttataatggtgaaaaaattgggcaaggttctgaaaatgctaaaaaattcctagctgataatccagaaatttttgatgacatcgatcataaagtgcgtgttcaatatggtttaattgaggaagataatactgaagaaaaacagtcttctaaagaaaaagaaactgatgagaaagctgacaaaaaccttgttttagagctggatgatacaattgagcttgaagat

SEQ ID NO: 36257 - DNA, 1089 bp, Streptococcus mutans
atgacaatttataatttttctgcaggtcctgcagtcttgccaaaaccagttcttgaaaaagctcagactgaatttctagattacaatcattctggcatgagtgttatggaattatcccatcgttccaaagattttgatgacatcattaaagatgccgaaaaattacttcgtgacttgatggctattcctgataattacagggtcatgttcttgcaaggtggcgcttcgctgcaattttctatgttaccacttaatcttgcacagggacgtaaagcttattatgtggttgcaggatcctgggggaaaaaagcatatgcagaagctgtaaaattgtccaaaacgattccttttgaaccaatccttttggcttcatcagaagagacaacttatgatcatatcccagaaattgattctgcgaagattgataaagatgctgcttatgtgcatattacgactaataataccattgaaggaacttctatctatgatcttcctgaaacgcatggtgtgccaattgtagctgatatgtcttccaatattttagcagttcgctataatgtcgctgactttggcttgatttatgcaggagcacaaaagaatattggacctgctggggttacgattgttattgttcgtgaagatttactcaatgacgagcccgttctttctagtatgttagattatcgtattcaagctgaagccggttcgctttataatacaccaccaacttacggtatttatattgctaaacttgtcttcgaatggcttaaagaacttggtggcgttgatgagatggaaaaaatcaatcgtgaaaaatcaggccttctttatgatttcattgaacagtcagatttttatactagtcctgtcaagagtcctaaagatcgctcagtagccaatatcccatttgtgacaccatctcaggatttggatgctaaatttgtcaaggaagctgatgcgcttggtttcaagaatatcaaaggtcaccgaagtgttggcggtatgcgtgccagtctttacaatgcctttccacgtcaaggtgttctagatttgattgacttcatgaagaaatttgaagcagaaaacaaa

SEQ ID NO: 36258 - DNA, 2829 bp, Streptococcus mutans
atgcaagataaattaattattcgtggagcgcgtgctcataacttaaaaaatatagatgtggaaattccgcgtgataagttgattgtcatgacgggcttatcgggttcaggaaagtccagtctggcttttgataccatttacgccgaagggcaacgccgttatgttgagagtttatcggcttatgctagacagtttttaggaaatatggataagcctgatgttgattcgattgatggtcttagccctgctatttccattgaccaaaagacaaccagtaaaaatccacgttctactgttggtacagttacagagattaatgattatctccgattattatatgcacgcgttggtattccttattgtaaaaatggtcatggtgctatcacggcttcttcagtagagcagattgttgatcaagttttgatcttgcctgagcggacacgaatgcagattttggcacctgttgttcggcggaaaaaaggtcaacataaggcagtatttgatcgcattcaaaaagatggctatgttcgtgtgcgtatagatggcgacattatggatgtagcagaagttcctgaactttcaaaaaataaaatgcacaacattgaagtggttgttgatcgtctcgtgcaaaaggatggtattagaggacgtttgtttgattccattgaagcagctttgcatttgggagatggttatgtcatcattgatactatggatgatcatgaattgattttctcagaacactattcttgtcctgtttgtggttttactgttccagaattggaaccgcgtctcttttcttttaatgcaccctttggttcttgtcctacctgtgatggtttagggattaaattagaagtcgatttggacttggttattccagatgagaataagactttgagagagggaacgctggctccttggaatcctatttcttcaaactattatccgcagctattagagcaggctatgaatgcttttggtgtagatatggataaaccttggaaagatttatcagatgaggataaaaaactcgtcttacatggttcaggtgacacagcatttcattttcattatcaaaatgattttggcggtgtcagggatattgatattccttttgaaggcattattagcaatattagccgccgttatcatgaaactaatagtgatttcacacgtaatgtcatgcgcagctatatgaatgagctgccttgtgcaacctgtcatggttatcgactcaatgatcaagctcttagtgtacgggttggcggaaaagaaggcctaaatattggtcaggtatctgagctatccattgcggatcacttgagtttgctgactcatttggaactgtcagaaaatgaaaaaaccattgcaacacccattgtcaaggaaattaaggatcgtctgactttccttaataatgtgggtcttaattatttgactttatcacgctcagcaggaacgctatcaggaggtgaaagccaacgcattcgtctagcaactcagattggttctaatttaagcggtgtactttatattttggatgaaccttccattggtttacatcaaagagataacgaccgccttatttccagtcttaagaaaatgcgagatttggggaatactttgattgttgtcgaacatgatgaagataccatgatggcagctgattggctggttgatgttggaccgggagcaggtgctttaggtggtgaaattgttgcctcaggcaccccaaggcaagttgctaaaaataaaaagtctattactggacagtatttatctggtaagaaaaaaattcctgtacctttggatcgtcgtaaagggagtggccgtttcattgaaatcaaaggagcagcagaaaacaatctgcaaaacattaatgttaaatttcctcttggaaaatttattgccgttacaggtgtttcgggttctggtaaatcaacactggttaatagtattttaaaaaaagtcattgctcaaaaactcaatcgtaattctgaaaagccaggcaaatacaagtctatttcaggaattgaacatattgatcgtttaattgacattgatcaaagcccaattggccgtacaccaagatccaatcctgccacctatacaggtgtctttgatgatattcgtgacctttttgctcaaaccaatgaagctaaaattcgcggttacaagaagggacgtttttctttcaatgttaaaggcggacgctgcgaagcctgctcaggtgatggcattatcaaaattgaaatgcactttttgccagatgtttatgtgccttgtgaagtctgtcatggaacgcgttataatagtgagactttggaagttcattacaaggacaaaaatattgcagaaattcttaatatgacagtcaatgacgcagcagaattttttgcaccgattcctaaaattgctcgcaagattcgaaccattaaggatgttggtctgggttatgtgactcttggacagccagcgaccactttatcaggtggggaagcgcagcgcatgaagttggcttctgaactgcataaacgctcaacgggaaagagtttttatattcttgatgagcctacaactggtctccatacagatgatattgctagacttcttaaagtcttagagcgctttgttgatgatggcaataccgtgcttgtcattgagcataatttggacgttattaaaacagctgaccatattattgacttgggaccggaaggcggtgttggtggtggtcaagtcatagcgactgggacaccagaacaagtagctgagatgacggaaagctatacaggacagtatttgaagggaagactaaatgaaaaa

SEQ ID NO: 36259 - DNA, 864 bp, Streptococcus mutans
atgcaagtacaaaaaagttttaaagaacaaacagcttatgggaagctttatctcgtgccaactcctattggtaatcttcaagatatgacttttagaagtattgctattttaaaaaaggttgattatattgcggcagaagatacccgcaacacaggactcttgctgaaacactttgatatttcaacacgtcagcttagttttcatgagcataatgcttttgaaaaaattcctgatcttctgaagctcttgaaatctggaaactctttagctcaagtatctgatgcgggtttgccaagtatttctgaccctggatatgatttggtgcgggcagctattcaagaagatatagcagttatagcacttccgggagcttcggctggcattactgctcttattgctagcggtttggctcctcaacctcatattttttatggttttttaccacgcaaatctggtcaacaaaagtctttttttgaggaaaaaaagtattacccagaaactcaaattttttatgaatcgccttatcgggttcaggaaactttagaaaatatactatctgtctatggtgatagacagatagtattgaccagagaattgaccaaactttatgaggaatatcaaagaggaaatatttcagaaatcttaacttatattgcagaaaatcctcttaagggagaatgcctcttactggtatctggctatgatcatcaagaaaaagagcagcaggtaagtgaagttgaactgaaacatttggttgaagctttagttaaagaaggtatgaaacctaatcaagctatcaaaaaagtagctaaagagaatgatttcaatcgtcaagaactatatcaactctatcatgaattacag

SEQ ID NO: 36260 - DNA, 513 bp, Streptococcus mutans
gtgattaatatgtctatctttaaaaataaattatttgtcattttatttgcctttcttatgttacttgtagatgggcatttatctttattatcacgaatcttatttcaaaatcagtttattgtgtcaagtcattttttattcattgtgttattgttttatactcttgtattcaatccttattttatttttggacttgcctgtgttttaggaattatttatgatttttattatttaggggtatataatttgggaattgcaactatgttgtatcctttaacaattgttattatgtttaaattatggaaacatattccaaatggtcctgttcaacgctttctagttttttttatcctaatcttttttcttgattttgctagtattggtatggcctatttatatcaattgacagcttatcctttaaatgattttatcacttataatttagcaccttccttaatttttaatatactggcttttctcttctttcaaaaacttttagaaaggatttaccta

SEQ ID NO: 36261 - DNA, 966 bp, Streptococcus mutans
atgtcttattctaatttaaaattgtttgctttatcttcaaacaaagaattagcagagaaagtggctaagactattggtattagtcttggaaaatcaactgttcgtcaattttctgatggagaaattcaagttaatattgaagaatctattcgcggaaaccatgtttttattttacagtcaacaagttcacctgtaaatgataacttaatggaaattttgattatggttgatgctcttaaacgtgctagtgctgagactgtcagtgttgtcatgccttattatggttatgctcgtcaagatcgaaaagcacgttcgcgtgaacccatcacctccaagttagttgctaatatgcttgctgtggcgggagttgatcgtcttttgactgttgacttgcatgcagcacaaattcaaggtttttttgatattcctgttgatcatttgatgggagcccctttaattgcggattattttgttcgtcgtggtatgtgtggcagcgactatgtcgttgttagtcctgaccatggaggcgtgacacgtgcgcgtaaattagcccaatttcttcaaactccgatagcaattattgataaacgacgaaatgttaacaaaatgaatacaagtgaagtcatgaatatcattggcaatgtttctgggaaaacgtgtattttaattgatgatatgattgatactgcaggaacaattgctcatgcagctgacgcccttgctgaagcaggtgctactgcagtttatgcttcatgtacacatccagttctgtctggttctgctttagataatattcaaaattcggctattgaaaaattagttgttttggatacaattgaccttcctgaagaaaaattgatagataaaattgaacaaatttcaattactgatttgatttctgaggctattattcgtattcatgaaaaacgaccgctatcacctttatttgaatttacaacttttaac

SEQ ID NO: 36262 - DNA, 1173 bp, Streptococcus mutans
atggatttgagtaaacgttttaataaaaatttaaataagattgaagtctctatgattcgtcagtttgatcaatctatttcagatattccagatgttttgaaattgactttgggtgaaccagattttgcaactccaaaacatattaaggaggctgctaaaagggcaattgatgctgatgaaagtcattacacaggaatggcaggacttttggcattaaggcaggcagctagtgcttttgtaaaagaaaaatatcatcttacctataatcctgataatgaaattttagtaacaattggagctacagaagctttatcagctagtttaacagctattttggaacctggtgataaagtgcttttgcctgcaccagcttatcccggttatgagcctgttgttaatttggttggggctgaagtagttgagattgataccagatctaatgattttgtcctaacaccagagatgcttgaagaggctattttaaaagagggagaggctcttaaggctgttattctcaactatccaaccaacccaacaggagtaacttattcgcgccagcaaatcaaaaatttggctgaggttcttaaaaaatatcctatctttgtcatcagtgatgaagtttatgctgaactgacttatacaggagaatcacacgtttctattgctgaatatttacctgaccaaacgattttgatttctggtttatcgaaatcacatgccatgacaggttggcgtttgggcttgatttttgcaccagctgttttgacagcacagttgattaagagtcatcagtatttggtaactgcagcgaccaccagtgtacaatttgctgctatagaagctttgaccaatggtaaagatgatgctctgccaatgaaagaagaatatattaagcgccgtgattatatcattgaaaaaatggaagcaatgaagtttaaaatcatcaaacctgatggtgctttttatatctttgctaaaataccagttgcgcaaggacaagattcctttaagttcctacaagattttgctaaagagaaggcagtagcttttattcctggtgttgcttttggaaaatatggagaaggttacttacgaatttcttatgcagcaagcatggagactataaaagaagcgatgaaacgccttaaagaatttatggagcaatatgcagac

SEQ ID NO: 36263 - DNA, 1254 bp, Streptococcus mutans
atgaaatctgagatcattgctgttggaacagaaattttaacaggacaaattgttaatactaatagtcaatttttatcagaaaaattcgcagaattaggaattgatgtttattttcaaacagcagttggtgataatgaagaacgccttttatctgttttgaaaattgcaaaggaacgtagtgatttaatcgtactttgtggtggtttgggaccaacagaagatgatttaacaaaacaaaccctagcaaaatttttgaaaagagaattggtatttgataaaacagctcaagaacgtctagatgaattttttgcatcacgtccaacatctatgcgcacaccaaataatgaatgtcaggcgcagattatagcaggaagtcagcctttatctaataaaacaggtttagcagttggggggcttttggaggcagatggagtgacttatgttgtattacctggtccgcctagcgaattgaagcctatggttaacaaagagttactcccttatttatcaaaaacttctgagaagctttattctcgtgtgttacgcttttttggtattggtgagagtcatctagtgaccttgttgcatgacttaatagcggagcaaacagatcccacaattgctccttatgctaagacaggcgaggtaacaatacgtttatcaacaaaagcccataggcagaaagaagcagatagtaagttagataagttggaaaagaaaattataactattgataacttggctgattatttttatggttatggtgaagaaaattcattaccacaggttgtatttgatctgcttaaggaaaagggtaaaacgattacagcagctgaaagtttaacagcaggcctttttcaggcaagattagcagattttgcaggagcatctgatatctttaagggaggttttataacttacagtatagaagagaaggctagaatgctaggtattccctttgaagatctccaacttcatggggttgttagtgcttttactgctgaaaagatggcagagcgctcccgccagctgactcaagcagatttggctatttctttaacaggagttgcaggtccggatagcttagaaggtcagccggcagggacagtttttatcggtttgtcaagttccaaaagaacaatggcaatcaaagtgttaattggcggacgcagtcggtctgatgtgcgttatatcgctgttttacatgcttttaatttagtacgtcaaactttattatctcataaaaatttagta

SEQ ID NO: 36264 - DNA, 1953 bp, Streptococcus mutans
atgtcaaaaattattgaactgccagaagttttagccaatcaaattgctgctggagaggttattgaaagaccagctagtgtcgtaaaagaactagttgagaatgctattgacgctgatagcagccaaattacaatagaaattgaagaatcaggactgaaaaaaattcaagtgactgataatggtcaaggaatagaacaagcggatgtaattatgagcttacgtcgccatgcaactagtaagattaaaaaacaatccgatctttttagaattaggaccttaggttttagaggtgaggcccttccatcaattgcttctattagcagattaacattaaaaacagcaacaaaaggggaaatatatggcactttattaatcgcaaatggaggtaaaattgaaaaagaagaagccattagtacccctattggaaccaaagtgagtgttgaaaatcttttcttcaatacccctgctcgccttaaatatatgaaaagtttgcaggcagagcttgctcatattattgatgtcattaaccgtcttagcttggcgcatcccgaaattgctttcacgcttattaatgatggccgtgaattaacaaagacggcaggtaaaggcgatctgcgtcaagctttagcgggtatttatggggtaaccattgctaaaaaaatggtcgaaatttcaaatgcagatcttgattttgaggtatctggttatattagtttgcctgaattaacccgagctaatcgcaattatattaccattcttattaatgggcgttatatcaaaaattttttgctcaatcgcgctattcttgatggttatggttcaaaattaatggtgggacgttttccaattgctgttattgatattcagattgacccttatttagcagatgttaatgttcatccaactaagcaggaagttcgcatttctaaagaaaaagagttaatgaatctcgttagttcggcaattgcagatagtttaagagaacaagagttaattcctgatgctttggaaaatcttgctaaaactagcacaaacaagaaacaaaagtttgaacaaacacagcttcctcttaaacaatcaaatctttactatgataagactcaaaatgacttctttctcaaagaaacgacagtttcagaagcatcaagcgagtttacagtagttgataaagctgtaaatattactgataatgtatcaggacatagtagtgtaaaatatgctcaacgtcaaatgagaacttgtgaaaacaaagagcatccaagtcttactatgacagataagcaacaaaagcgacagcttagtagaattgttgaaagtctagaaaatgaagaaaagtcaacttttcctgagttagaatattttggtcaaatgcatggaacttacctctttgctcaaggtgaaggggggctttatattatagatcaacatgctgctcaagaacgtgttaaatatgaatattatcgtgataaaattggagaagtagacaatagtttacagcagcttttagtaccttatctttttgaatttcctgctaatgattttatgaccttacaagaaaaaatgagcattttaaatgaggtgggaattcacttagaaaactatggagagaatacttttattttgagggaacatcctatttggttacaggaaaaagaaattgaatcagccgtttatgagatgtgtgacatgttgctgttgacaaatgaagtctccattaagaaatatcgagcggaattagctattatgatgtcttgcaagcgttctatcaaggctaatcatactttggatgattattctgccagaaatctcttaattcaattatcacagtgcaaaaatccttacaattgtcctcatggacgtcctgtgcttgtgaatttcacaaaagctgatatggaaaagatgtttcgtcgcattcaggaaaaccatactagtttgagagaattagggaaatac

SEQ ID NO: 36265 - DNA, 3723 bp, Streptococcus mutans
atggatagacgtatttttgttgagaaaaaagctaactttagcattaaatcggagtcactggtcaaagaactaacacataatttgcagttaacctccttaaaaattttacgtattgtgcaggtttatgatatctttaatttagaagaaagcctgtttgcgcgtgcgcaaaagcatgtcttttctgagcaggtgacagatacaattttagatgaagcaactgtgcaggcggatcttaacagccatgctttttttgctattgaagctttgccgggtcagtttgaccagcgggcagcaagttcacaagaagctttgctcttacttggtagtgacagcaacgtaacggttaatactgcccagctttatctggttaataaggatattgatgcatctgagttggaagcggtgaagcattatcttttgaatccagttgattcgcgtttcaaagatatcaccttgcctattcgtccacaggaattttcaaattctgacaaaacaattccaaatttggatttctttaagacttatacagctgaagattttgcggcttacaaggcggaacaaggtttggctatggaagtggatgatcttgtttttattcaagattattttaaatcaattgggcgtgtgccaacagaaacggaattgaaagttttggatacctactggtctgaccactgccgtcacacgacttttgagacagaattgaaaaatattaacttttcagcttctaagttccaaaaacaattgcagacaacttatgataaatatattgccatgcgtgacgaattgggacgttctgaaaagccacagacgcttatggatatggcgacaatctttggtcgttatgagcgtgctaacggtcgtttgaacgacatggaagtgtcggacgaaatcaatgcctgctcggttgaaattgaggtagatgtagatggcatcaaagaaccttggctgctcatgttcaaaaatgaaacccacaatcacccaacggaaattgagcctttcggtggagctgcaacttgtattggtggtgctattcgtgacccattgtcaggtcgttcttatgtttaccaagctatgcgtatatcaggtgcaggtgatattaccgcaccaatagcagaaacacgctctggtaaattgccacaacaagtcatctctaaaacggcggcgcacggctattcgtcatacgggaaccaaataggacttgcgactacctatgtcaaagagtacttccatccaggcttcgttgctaagcgtatggagctaggtgctgttgtcggtgcagcaccaaaagaaaatgtcgtgcgtgaaaaaccagaagctggtgatgtggtcatccttcttggtggaaaaacaggacgtgacggtgtcggtggtgctacaggctcatctaaggttcaaacggttgaatcggttgagacagcaggtgccgaagtgcaaaaagggaatgctattgaagaacgtaagattcaacgtcttttccgcaatggcaatgtcactcgtctcatcaagaaatcaaatgattttggtgctggcggcgtctgtgtggctattggtgaattggcagatggtcttgaaattgacttggacaaagtgccactaaaataccaaggtcttaacggtaccgaaattgccatttctgagtcacaagaacgcatggctgttgttgttcgtccaagtgatgtggacgcctttattgcagcatgtcataaagagaacattgatgcagttgttgtcgcgactgttactgaaaaaccaaaccttgtcatgacttggaatggtgaaaccatcgttgacttggaacgtgccttccttgatactaacggtgtgcgtgtggttgttgatgcaaacgttgtggataaggatgttgcccttcctgaggtgcgtacaacatcagcagcaacacttgaagcagacacagtgaaagttctgtctgatcttaaccacgctagtcaaaaagggttgcaaactatctttgacagctcggttgggcgttcaacagttaatcatccaatcggcggtcgttatcaaattacgcctactgaagcttctgtgcaaaaattgccagtacaaaatggtgtcacaacgacagcttctgtcatggcacagggattcaatccttatattgcggagtggtcaccttatcatggtgcagcttacgctgttattgaagcaacagctcgcttggtagcaacaggtgctgattggtctcgtgcgcgtttctcttaccaagaatactttgaacgcatggataaacaagcggatcgctttggtcagccagtagctgctctgcttggttcgatcgaggcacaaatccaacttggtttgccatcaatcggtggtaaggactccatgtcagggacctttgaagaattgacggtaccgccaaccttggttgcctttggtgtgacaacagtagatagtcgtcaggttctttcaccagaattcaagactgttggtgagaacatttactacatcccaggacaggctatttcagaagacattaattttgattatatcaaggctaactttgcacaatttgaagccattcaagctaaacataaagtaacagcagcttcagctattaaatacggcggtgttcttgaaagcctagcactcatgagctttggtaatcatattggtgcttctgtagaattgacagagcttgacagcagcttgacagcgcagcttggtggttttgtctttacatctgatgaagccattgctgacgcagtgaaaattggtcaaactgtggcagactttacagtaactgtcaacggtgtcaacttgtccgctgcgaaattacttgcagcttttgagggcaggttagaggaggtttacccaaccgaatttgaacagtcaacagctcttgaagaaatacctgctgtggtatctgatgctgttattaaagctaaagaaagaattgcacagcctctggtttatatcccagttttccctggttccaattcagagtacgattcagctaaggcctttgaacaagctggtgccaaagtcaactcagtgccatttgtgactcttaatgaagcagcgattgaggcttctgttgacaccatggttgacaacattgttaaagccaatattatcttctttgtcggcggcttctcagcggcagatgagccagacggttcggctaagtttatcgtcaatatcttacttaatgaaaaagtttgctctgctattgacagcttcattgaaaggggtggcctcatcatcggtatctgtaatgggtttcaagctcttgtcaaatccggtcttctgccttatggtgactttgaagaagttggtgagacaagcccaaccctcttctacaatgatgccaatcagcacgtggctaagatggtagaaacccgtatcactaatactaactctccatggttggcaggtgttaagatcggtgatatccatgcgattccagtctctcacggtgaagggaaatttgtcgtgacagctgaagaatttgcggaactgcgtgacaatggtcaaatctggagccaatacgtggactttgatggtaagccttctatggattctaaatacaatccaaacggttcgctcaacgctattgaagggattacgagcaagaacggtcaaatcattggtaagatgggacactcggaacgctatgaaaacgggctctttcaaaacatcccaggtaacaaagatcaaggcctatttgaaagtgcagtgaaatactttactgggaaa

SEQ ID NO: 36266 - DNA, 2547 bp, Streptococcus mutans
atgactaaggaaaaactctctccaggaatgcagcagtatttggatatcaaaaaagactatccagatgcttttttgcttttccgcatgggagacttttatgaactattttatgatgatgctatcaaggccgctcaaattttagaaattagcttaacaagtcgtaataaaaatgctgacaatcctattccgatggctggtgtcccttatcattcagctcaacagtatattgatgttttgattgatttgggttataaggttgccattgctgagcagatggaagaccctaaaaaagctgttggcgttgtcaaacgtgaagtggttcaagtgattaccccgggtactgttgttgattcaactaagccagacagtgctaataattttttagtctctctggatactgatggcagtcagtttggcctttcttacatggatttatctactggggaattttatgcgacaacattagcagatttgccagcagtgagaagcgaagtcctcaatctcaagacgcgtgaattagttattggttttgaactgagtgagaatgaagatcagctttttcgtaagcagatgaacctgctcttatcttttgaaaaaactgtctatgacgatgtacatttattggatgatcaattaaaagcaatagaacttgctgcagctggcaaactcttgcaatatgttcataacacacaaaaacgtgagttgagtcatttgcaaaagttggtgcattatgaaatcaaagattacttgcagatggcttatgctacaaaatctagcttggatctgttagaaaatgccagaagcgggaaaaaacacggcagtctctactggcttttagatgagacaaaaacagctatggggacacgtcttttgcgaacttggattgatcgtcctttggtcagttcaagccttatcagtaaacgtcaagatattattcagacttttctagatcacttttttgagcgcagtgatcttagtgacagcctaaaaggtgtttatgatattgaacgtttggccagccgtgtttcatttgggaaggccaatcctaaggatttattgcaattgggtcagaccttaagtcaagttcctgtcattaagactattcttgaaagttttgccagttctagtttggaaagcctaattaatcaaattgatactcttccagaattggaagcattgattcgttcggctattgactctaatgcacctataactattacagaaggcggtatgattcgagaggggtttgatgaaactttagataagtatcgaacggtaatgcgcgaagggacgagttggattgctgacattgagactaaggaacgtcagaaaagcggcatctcaaccttgaagattgattataacaaaaaagacggttattatttccatgtcaccaactctaatttgtctttagtaccagattacttctttagaaaggcaacgcttaaaaattctgagcgctttgggacagcagagcttgcaaaaattgaaggtgaaatgttagaagcgcgtgaagaatcagccaatttagaatatgatattttcatgcgtatcagatcacaggttgaatcttatattgagcgtcttcaaaatctggccaagagtctagcaactgttgatgttttgcaaagtttagcagtagtagctgagaataatcattatgtcagaccttcttttaatcatcagcaggaaatcagtattgaaaatggtcgccatgctgttgttgagaaggttatgggaagccaagaatatattcccaatactatcaattttgaccaaaagactagtattcaactgattactggacctaatatgagcggtaagtcaacttacatgcggcaattagctctgacagttattatggctcaattaggttcttttgtagcagctgattcagctgatttgccgatttttgatgctatttttacacgtattggtgctgcagatgatttaatttcagggcagtctacctttatggtagagatgatggaagccaatcatgctatcaaggcagcgacacctaattcactcattttatttgatgaattaggacgtggtacagcaacttatgatggtatggctttagcacaggctattattgagtatattcataataaagttggagctaaaacgctatttgctacccattatcatgagttgacagacttgtcaactagattgacaagtcttgtcaatgtacatgttgctactcttgaaaaagatggagaggtcacttttcttcataaaattgctgatggaccagctgataaatcttatggaatccatgttgctaaaattgccggcttgcctaaagatttacttaatcgagctgatcacatattagttgatttagaaaaaatgagtgcagctgtctcagtcaatctaaaaaacgagaccaaagaaagccaacctgtggaagagcagttgtcactttttgctattgataataattatgaagaattaatcaaaaaattgaaacagttggaccttaccaatttaacaccaagagaatccatgaatgccttatttgatttgaaggaactatta

SEQ ID NO: 36267 - DNA, 660 bp, Streptococcus mutans
atggatgtacaaaatcttactaaaaaaaatcaagaattcatcaatattgtaacacatcaattgctccaatcaggcaaatccgatgaagatattcaaactattctcgccaagactttacctgaaattatcgaaaaacaaaagcaaggaatccctgcacgttcttttttgggtgcaccaactgcttgggcagctcaatttattgaaacagaacaaaacaagtcaacagcttctgctcctaaaaatacaaatccctggcttatgtggctagatacttccctcttcttccttgctgttgtgaccttaataacaggatttttaaatttttttagcaaacaagcacctacctacgggattgtgacacttacctttcttggctttggtggcggtgctatcatgtttttaacttatcactttttctatcgctactcaggaatgcctaaaaatgaacgtcctagttttatcaaatcatttgggatcttagcattcttcatgattttttggatgtttctttatgcagcaacaggcttcttaccagcttttctcaatcccaaagttccaggcttcgtcttgcttgttatttgtgccctcgcttttggtattcgttatctgcttaagaaaaaatataatattgaaaatgctttggctcctcaacaaagaaaa

SEQ ID NO: 36268 - DNA, 237 bp, Streptococcus mutans
atggctcaacaacgtcgtggcggattcaaacgccgtaaaaaagttgattatatcgcagcaaataaaattgaatatgttgattacaaagatactgaattgcttagtcgttttgtttcagaacgtggaaagattcttccacgccgtgtgacagggacttcggctaagaatcaacgtaaggtaacaacagctatcaaacgtgctcgcgtaatggcacttatgccttttgtaaatgaagat

SEQ ID NO: 36269 - DNA, 492 bp, Streptococcus mutans
atgattaataatgtagtactagttggtcgcatgactcgtgatgctgagctccgttacaccccaagtaatcaagctgtggcaacttttacgcttgcggttaaccgtaattttaaaaatcaaaatggtgaacgtgaagctgatttcattaatatcgtgatttggcgtcagcaagctgaaaatttagctaactgggctaaaaaagggactcttttaggcattactggtcgaatccagacccgcaattatgaaaaccaacaaggtcagcgtgtttacgtcacagaagttgttgcggataatttccaaattttggaaagtcgtgctacacgtgaaggtcaatcaaacagttataatgctggtggtaacaataactttggcggaaataatttttcttcccaaggttcttcacaatctcaaacgccaaactttgctagagatgaaagtccatttggtgattcaaatcctatggatatttcagacgatgatcttccgttt

SEQ ID NO: 36270 - DNA, 288 bp, Streptococcus mutans
atggctaaatacgaaattctttatatcattcgtccaaacattgaagaagaagcgaaaaacgctttggtagcacgttttgatgctgttttgactgacaatggtgcaactattgttgaatcaaaagattgggaaaaacgtcgtctagcatatgaaatccaagatttccgtgaaggactttaccatgtcattaatgttgaaactgaagatgcccatgctcttaacgagtttgaccgtctatcaaaaatcaataatgacattcttcgtcatatgatcgttaaacttgacgct

SEQ ID NO: 36271 - DNA, 1689 bp, Streptococcus mutans
atgaatcataacagattaattgcaaaagaaattgcagcaatcgttcctgctttagagcaggaaactattttaaatttactggaaaaacccaagaaatctagtatgggagatttagcttttccaacatttagtttagctaaaacgatgcgcaaagctccgcaaatcattgccagtgaacttgtcggtcaaattaataatagctattttgagaaggtcgaagctgtcggcccttatattaatttttttcttaataagtcagaaatttcagctcaagtattaaaagaagtcattaaaaaaagggaagattacgctcaagcagccattggtcaaggccacaatattgttattgatctttctagtcctaatattgctaaacctttttctattggacatctacgctccactgttatcggcgatgctttatctaatattttccaaaaattaggctatgagaccgttaaaatcaatcatttaggtgactggggcaaacagtttggcatgcttattgttgcctataaaaaatggggcagtgaagaagcagttagagcccatcctattgatgaacttttaaagatctatgttcggattaatgctgaaactaaaaaccatccagaacttgatgaagaagcccgcgaatggttccgtaaactcgaaaacaatgatgaggaagcccttgcactttggcaatggttccgcgatgaaagcttaatggaattcaatcgtctttatgctgagcttggtatagattttgatagctacaatggtgaagctttttacaatgataaaatggaagaggttgtccaattactagccgagaagggacttttagaagaatctaaaggagctcaagttgttaaccttgaaaaatacggcattgaacaccctgctcttattaagaaatctgatggtgctactctctatattacccgcgatttggcagcagccatttatcgcaaacgtacctatgactttgctaaagctatctatgttgtcggtcaggaacaaactgctcatttcaagcaattaaaagctgtattagctgaaatgggctatgcttggagtaaagatatccagcatgtctcttttggccttgttactaaaaatggtcaaaaattatccacccgcaaaggaaatgttatcttacttgagccaacaattgctgaagctgtcaaacgctctttagcgcaaattgatactaaaaaccctgatttagttaataaagaagccgttgcccatgctgttggtgtaggagcgataaaattctatgaccttaaaacagaccgaacaaatggctatgattttgatcttgaagctatggtctcttttgaaggcgaaacaggtccttatgttcaatatgctcatgcccgtattcaatctatccttagaaaagctgattttcagcctcaggcaacagaaaactatcagttaaatgacactgaaagttgggagattattaaactcattcaggactttccaaataccatcgttagagcagctgataattttgagccctcccttattgctagatttgctattcacttagcacaaagctttaacaaatattatgcacacacacgcattcttgataatagccctgaacgtgacagccgtcttgcactcagttatgccactgcaactgttctcaaagaagccttagcccttctgggtgttgaggcgcctaatgaaatg

SEQ ID NO: 36272 - DNA, 2352 bp, Streptococcus mutans
ttgccattatgttataatagttccatgaatacaaagattttaaaagccttagaatttgataaggttaaaaagcaatttactcatttcttgcagagtgagcaagggcaaatggaattaaacgatttattacctatgaccaatcaggaaaaaattgaacgttcttttgctgaaattgcagatgtagcacagatttttcaggagtatgcttcctttggctttgggcacagtcaggatatttcagaaagtttacgtcgtttagaattaggagcggatctcaatactcaagagcttttggctgtcaaacgtattttgcagatgtcagcagagctcaaggacttttatgataatttagaaaatgttgatttgcaaattttggattgcttatttgaaaagattgaaacgtttcctgatttgcaagggagtttacaagccatcaatgatggtggctttattgaagattttgctagtcctgaattaactaaaattcgtcatcatattcaccaaaatgaacaacaaattcgtcaaattcttcaagaaatgttgaagaaacaaggtgatttattggctgaaaaccttattgccagtcgcagtggtcgcagtgttcttccagtgaaaaatacttatcgtcatcgtattgcaggtgttattcatgatatttcagcttcaggaaatacggtttacattgaacctcgagctgttgttaatttaaatgaagagatgactcaggcgcgtgcagacgaacgccatgaaatgactcgcattttacatgatttatccgataggctaagatcacaaacagatattattggtaataatgcttggttgcttgggcatattgattttgttcgtgggaaatacctttatatgagagaaaatcaagccagtcttcctagtttaacaacggatcaaactatccgtcttttgagtgtacgtcatcctctgctaagtaatccaattgccaatgatttacattttgaacatgatacaacagccattttaattacaggtcctaatacgggcggtaaaaccatcatgttaaaaacattgggaataacacaactgatggctcagtcaggtcttcctattttggctgatgagggaagtaaggttgctgtttttaaagacatctttgcagacattggtgatgaacagtccattgagcaaagtttatccactttttcaagtcatatgacacatattgtcgaaattctgcaaaaggccaataaagacagcttagtcctttttgatgaacttggtgctggtacggatccacaagaaggggcagccttggccatgagtattctggaacatttacgcttatcagatattaaaacaatgattaccacccattatccagagctcaaggcctatggtatcgaaacagaatttattgaaaatgcgagtatggaatttgatatggtgacgctcagccccacctatcattttatgcaaggagtaccgggacgatccaatgcttttgagattgcacgtcgtttaggtttgtctgaaattattgttgcagaagcggaaaatttgacgaatacggattcagatgttaataaaattatcgaacgtttggaaaatcaaaccattgaaagtcgcagacgtttggataatattcgtgaagtggagcaggaaaatctcaaatttaatcgagccgtcaaaaaactttataatgaattctcacatgcacaagacaaagagttgcgtaaggccaaactaaaggctcaagagattgttgacaaggctcttgcagagagtgattttattctcaaaaatcttcaagacaaagcacaacttaagccccatgaaattattgaagctaaaggcaagctcaagaagttggttcccgagatagagctttcgaaaaataaggttcttaaaaaagctaagaagaaacgtgctgcgaaagttggagatgatattattgtcagcagttatgggcaaagaggaacgcttactaagcgcttcaaagatggtcgttgggaagcacaagtagggctgatcaaaatgactttacaagagtcagagtttgatttagtgaaatcagacaaagcccaagcatcgcagaaaagacaagctcaccttgtcaaaaggacttctcaaaaggctcctagtgctagacttgatttacgtggcaagcgttatgaagaagcgatgcaagaattagatgaattcattgatcaggcactcttgaacaatatggctcaggttgacatcatccatggtatcggaactggtgttatccgtgatggcgtaactaaatatcttcgccgtaataagcaagttaaggagtttggctatgctcctcaaaatgcaggtggttcgggcgctacaatcgtgactttcaaa

SEQ ID NO: 36273 - DNA, 1767 bp, Streptococcus mutans
atgaaacgttctatgtatgctggtgctgtgcgttcagaacacatcggacaagagttaacccttaaaggctgggtggctcgccggcgtgatttaggaggtcttatttttattgatttgcgcgatcgcgaaggcattgtgcaactagtcattaatcctaaaactgccagtaatactgttgttaaaagtgctgaaagcttgcggagtgagtatgttatcgaagtgacagggatgattgtggagcgtgatcaagctaatgataatttaccaacgggttgtgtcgaaatgcaggtgacgcagttaacgattttaaatgcttcacaaacaccgccctttgaaattaaggataaaattgaagccaatgatgacacacgtttacgttatcgttacctcgatcttcgtcgtccagaaatgctgaaaaattttaagttacgtgctaaggtcacacatgttatccgcaattatctggatgacttggatttcatagatgttgagacacctatgcttgccaagtcaacaccagaaggagcgcgtgattatttagtaccaagccgtatgagtcgagggcatttttatgctcttcctcaaagtccgcagattaccaaacagcttttaatgaatgcaggttttgatcgttattaccaaattgtcaaatgttttcgtgatgaagacttacgtggagaccgtcaacctgaatttacacaagttgatttggaaacttcctttttatctgaacaagaaattcaagaaatcacagaaagattgattgcttgtgtcatgaaggaagtcaagggcatagagttgcaattaccacttccccaaatatcttatgatacagcaatgaacaattatggttctgataaaccggatactcgctttgaaatgactttacaggacttgacagatcttgtaaagaatattgatttcaaagtattctcacaggctcctgctgtaaaagctattgttgctaaaaatgctgcaaatagctattctcgcaaagcaattgataagttgacagatattgtaaagccatttggtgcaaagggtcttgcttgggttaaatataatgatggcaaaataggtggtcctattgctaagtttttgacaactattgaagatgagttgatagaacgtttacagcttgaagcaaatgatttagtgttttttgtagcagatgatcttgaaatagcaaatggtagtcttggtgctctgcgtaaccacttggcaaaagaactaaaccttatagaccattcgaaatttaatttcttatgggttgtggattggccaatgtttgaatggtctgaggaagaaaatcgctatacaagtgctcaccatcctttcactttaccgcaagaagatacggttgctgaacttgaaggtgatctcagcaaggttcgtgctgttgcatatgacattgttcttaatggttatgagcttggcgggggtagtcttcgtatcaatcagagagagacacaagaacgtatgttcaaggcgcttggatttacaaaagaaagcgctcaaaaacaatttggctttttactggaagctatggattatggttttccgcctcatggaggactagcgcttggattggatcgatttgttatgcttttagcaggaaaagagaatattcgtgaagtgattgcctttcctaagaataataaagcttcagatccaatgacacaagccccaagtttagtttctgataaacaacttgatgagctttatttgcaagtaaacaagaatgcagtaaagaacaatgaacaagaa

SEQ ID NO: 36274 - DNA, 1287 bp, Streptococcus mutans
atgacattacaaaaaccaaaaggaacacaagatattctgcctcaagagacagttaaatggcagtatgtcgaaaacgttgcgcgtaaaacttttaaaaaatatcattacggtgaaattagaacgcccatgtttgaacgctatgaggtcattagtcgttctgttggtgatacgacagatattgtaacaaaggaaatgtatgatttccatgataagggagatcgtcacatcacactgcgcccagaaggaacagctcctgttgttcgttcttatgtggaaaacaaactttttgcgcccgaggtacaaaaacctgttaaagttttttatattggttccatgtttcgctatgagcggcctcaggcaggacgcttacgtgaatttcatcagttaggagttgaatgttttggctctaacaatcctgccattgatgcagaaaccattgccatggcttatcagcttttcaacgagctaggtatcaaagatgtcactttgcaccttaatagtttaggaaataaagagagtcgcaaggcttatcgtcaggctttgattgattatctgatccctatgaaagacaaactgtccaaagattcacagcgccgcttagaagaaaatcccttgcgggtactagattctaaagaaaaagaagataaagaagctgttgaaaatgcaccgtctatcttagattatttggatgatgactcacaagcgcattttcagggtgtacgtgatatgttagaggtacttgacattccttatgttattgataccaatatggttcgtggtcttgactattataaccacacgatttttgaatttattactcaagttgataaaagtgaattaacgctttgcgctggcggtcggtatgacagtcttgtcgaatactttggtggtcctgcgacagctggattcggatttggtcttggtttggagcgacttttattggttattgacaaacaaaagattaatctgccagtagataacagtttagatgtctatatagctgtacttggtgcagctgctaatagtacggctttagaacttattcaagctattcgtaaacaaggtttttcggcagaacgtgattatcttagtcgtaaaattaaagcacaatttaaatcggcagatgtttttaaaacgaaattgatcatgactttaggtgagagtgaagttgaaactggacaagttgcagttaaaaataacttcacacgacaagaaattgctgttagttttgaggaaattaaaacagattttgctagtgtttttaaacaattaggttcagacagacca

SEQ ID NO: 36275 - DNA, 585 bp, Streptococcus mutans
atgaaaagatttttaaaagaatggggccttttcttggtcatcattttcgcattgctactcccgcgtctctttatctggtttcctgtccaagtagatggacattcaatggatcctaccttagccaatggggagcatctcattgtcgtcaggacaacttctatcaaacattttgacattgttgttgctgctgaaggcaataaaaatattgtcaaacgtgtgattggcatgcccggtgataccattacctatgaaaatgatatgctttctattaatgggaaaaaagtcaatgaaacttatctcaagcaatacaaggataaatttgccaaggacaaactccaaaagacttatgcctacaatcagtatttccaagaattagcctcacaatcaacagctttcacaacagacgaacaaggaaacgccagctttacgattaaagtaccaaaaggacgttacctgcttttaggtgatgatcgcattgtctctaaagacagccgccatgttggaacttttgctaagaataaaattgttggtgaagttaaattccgcttttggcctttaaacgctattcgtttcatttcaaataaa

SEQ ID NO: 36276 - DNA, 147 bp, Streptococcus mutans
atgcgcgtaaatattacacttgaacataaagaatctggtgaacgcttgtaccttacttcaaaaaacaaacgcaacactccagaccgtcttcaattaaaaaaatactcaccaaaattgcgtaaacacgtgatttttactgaggttaaa

SEQ ID NO: 36277 - DNA, 2361 bp, Streptococcus mutans
atgacctattacttttcaggcaccattgaccgtgttatttttgaaaataccagcaatttttttaaaattattcttctggaaattgacgatactgacagcgattttgatgattttgaaattattgtgacaggtactattgctgatgttattgaaggagaaaactatactttttggggtgaattgacccagcatcctaaatatggacagcagttaaaagtggaaagataccagcgtgctaaaccctcttctgctggtctgattaagtatttttccagtcagcatttcaagggaatcgggaaaaaaacagccgaaaaaattattcacttatatggtgatgaccctattgataatattctggaagatcctgataagttagaaagcattagtggactttctaaggctaatagagaaaatttagttagtaaacttcgtcttaactacggtgctgaacagattctggcaaaattagcagaatatggattaaataacaaaacagctgttcaaatttttgaacgctataaagaagaaagtttgactgttattactgaaaatccttatcaactggttgaggacattcaaggcattggattcaaaatggctgacaaattagcagaacaagtaggtattaacagcgatgctcctcagcgttttcgtgctgctcttgttcatactcttttagaaacctctattgacaaaggtgacacctatattgaagccaaagaattactcgaaaaatctctttttattcttgaagaggtgagacaagtcgaactggatcccagtcaaattgctcaggaactgacacaattaatctccgaagataaggtacaaaatattggtactaaaatctttgataatacgcttttttatgccgaatcaggcattcataagcatcttacccgcattctggatagaccacttgaaaaagagatcagcagccaagacattcaaactgaaattaaacatattcaagcagaatttaatattaactatgacaaagcacaaaaaaatgctatccaaaaagccatccaaagcaaggttttccttttaacaggcggtccaggaaccggaaaaacgactgtcatcaatggaattattaaggcttatgctaatttgcatcaaattgacctgcaaaaaagtgaccgacctattattctggctgccccgactggtcgtgctgctagacggatgaatgagctaacaggtttacctagtgccaccattcaccggcatttaggacttaatggtgatagtgaatatcaggcacttgatgattttctggattgtgatctcattattattgacgagttttctatggttgatacttggctagccaatcaattgtttagtgctattgcttcaaatacacaagttatcattgttggtgatagcgatcagctcccatccgtcggtccaggtcaaattttggctgatttactgaaaataaatagattaccgcaagtttccttaactaaaatattcaggcaatctgaggactcaactattgtcacacttgccaaccagattcgccaaggtcgtcttccaactgacttcacagctaaaaaggctgaccgttcttattttgaagcacagagcactcacattccgcaaatgattcaaaagattgtcagttctgcccttaaaagtggtatagatgctcaggaaatacagattttagcaccgatgtatcgtgggcaagcaggtattacgcatcttaataaactgatgcaagatttgctcaatcctttaaataaccagttagaatttcaatttaatgaccttcattttcgtaagggcgataaagtacttcatcttatcaacgatgcgcaaattaacgtgtttaatggtgacattgggtacattactgatcttattcctgcaaaatatacagagtccaaacaagatgaaatgattctggattttgatggaactgagattaactatcctcgcaatgaatggttgaaaataacactcgcttacgctatgagtatccacaaatctcaaggcagtgaatttaaagtagttattcttcctgtcacacgccaaagcggcagacttttgcaacgcaatctcatttatacagctatcacacgctcaaaaagcaaacttgtcatgttgggagaaattgcagcctttgacaacgccatcaaaaatgaaggaactaaaagaaaaacttatcttattgaacgctttaagaaggatgaatgcagtggccaccataacaccgagaaaaataaacaaggagtaaaagaaagtgcagctatattaaaagaagattttattttgacagaaagaaatatcttaacgattgaccctatgattggcttatctcaagctgacattgacttattttttaagaaa

SEQ ID NO: 36278 - DNA, 1392 bp, Streptococcus mutans
atgactaaaaaaatcatgttaacaatagccatgtgtttagggatttttatcgtaatgttagacactactattatgaacatcaccttaccggctattcaaaagggcttaggagtaaaactggatcaactctcttggaccatcaatgtttataccatcatctttgcttcctgtaccattcctttaagtaagattgctgatatttatggcaagggtcggttatttgtccttggtctgttgctctttggaataggcagcttactgtctgggcttgctaatggattttctcaattaattcttggacgtatcatctccagttttggagccgctattttacttccagtaggcaacagtttagggatttcttcctgggaggttaaagatcgctttaaaattgttgctgctcttggtctcatgcagggcggtgctgctgctatcggccctactttgggcggtattcttactgataccttttcttggcactggattttctttattaatctgccaatcatcataatcgcaacgtgcctcatgattttatcttatcattttaaaagtgaggaaaagattgagtccaaaattgattttgctggcagctttatttcaatgctaggtctctttttagtgacattgggcttaattaaaataagagattggggagcaggtgactggcgcactttaggctgtttgataacatttttgcttagtctctttgcctttattatccttgaaaagcacagtaagaatccgatgattaatttgaatctatttaagattagagaattcacagcttcagcattagtcgccttattagcgcaatttttctatattggcgtcatcgtgattttgccaaccttttttacaactattcaaggaaagacagaacttgatgcggccttaattttactgcctatgtccttagtggtctttatctgcggtggtttaggaagtctggttattaaccaattgggcccaagattgctggtttttgtggggctgaccgctattttactttcttaccttttaatcgtcagcatcaatccaaataaagtgatggcaatggctctcacaaccttaattttgggaattggttttggtattattgctggacctgtcaatgttttagcggcatcaactttacaaggtgaactgctcaccgcctctcaaagcgttattggagtcgtcagacagattggctctgttctaggcgtcactgtttttatctcaatggttagcaataatatggcaaatttaagtcaatataaccactccagtatggtagaagcttacatttctatctacaaaatttggatcccttgcctacttattttcttagtgctttctttcctatttccaaagaaaaaacgttacctagaaggactaacacaatcaaat

SEQ ID NO: 36279 - DNA, 1095 bp, Streptococcus mutans
ttggcgattaccattcaatttagcaattatgctctgaaaacagatgaaacgttgatacaaagaatacaatttgtatattctcctttaaatgaactgtttagaagtttacatgtcttattaaatccacgtcatcatggaactaatattgactgggtgattaggatacaaaataaacttactaaggaattttatgaaaatcttcattactttcgactcttttatgaacttggtgtttctcctattttactttgcaattttcgttatcatgcgacaacgattgaagaagagatacaaaatctaaagaaatttcttgatgagttatctactgctcagttaattgagcatctggaaaaagtgacaagtgatcgagaaaattcctttattccgacattagcaaggggattagaatggaaggatttttctttgaataaggataatcagttacttagtgacttgaggaaggatgcctctagtgtttatcaacatcttttttcttttgttgattggtaccgacaagaaatatttgatgaaacttgggaaagcaaagatattcaacgaaaacttttaacagaaatccagcatcaagcttcctttttaaaggaaagtgggtttaaagcgatgtttaaccatctgcaaattgaccgcattcattggcgaaaggacagactagtcattattaagccgtttgataaagatattcagttaaaggatagtgattctattatgttattaccaagttattttatttggcctcatctgtttgttgaatctttcaaccaaggaattgctgttacctatgatattacagagcagccaagttactataacgctacaccggaaaatttgattaccatttttaaagctttaagtgaccctgttcgtttacaaattatgaattatgttattgataaaccaagtacaacacaatctttggctcaaattttagtgatgagtaattccagtgtatccagacatctgcaaattttaaaggaggctaacttattaacaacaacaaaagctaaaaaattcgttctttatgagccaacacagctcattacacaacttatgccaaatttctaccatttttttaaaaat

SEQ ID NO: 36280 - DNA, 990 bp, Streptococcus mutans
atggctatcggaatcgttatcgccagtcatggcgaatttgccgccggcattcatcaatctggttctatgatctttggtgatcaagaaaaagttcaggttgtcacttttatgccaagtgaaggacctgatgatctttatgccaagtttaacgatgcaattgctgcattcgatgctgatgatgagattttagtactagctgatctatggagtggttctccatttaatcaggccagtcgtgtcatggaagaaaattctgaccgtaaatttgctatcattactgggcttaatttgccaatgcttattcaagcctatacagaacgcatgatggatgctgctgcaggcgttgaacaggttgctgcaaatatcatcaaagaagccaaagacggagttaaaatccttcctgaaaaattgcagcctcaggaagaagctcctacaacatctactaaaaaggcagctcctcaaggtgctatccccgaaggcactgtcattggtgatggcaaacttaaaattaaccttgcacgtgttgatacacgacttttgcatggacaagttgcgactaactggacgccggcttctaaagctgaccgtatcattgttgcatctgacacagttgctaaggatgaattacgtaagggattaattaagcaagctgcacctggcggtgttaaagctaatgttgtgccaattaaaaaattaattgaagcagcaaaagatccgcgttttggaaatacacatgcactgatcttatttgaaacaccgcaagaagctcttgaagcaattgaaggcggtgttccaatcacagaattaaacattggctcaatggctcactcaactggtaaaaccatggttaacaatgtaatatctatggataaagatgatgttgcaacttttgaaaagctacgtgatctcggagttaaattcgatgtccgtaaagtgccaaacgattctcaaaaagacttgtttgaactcattgagaaagcacatgtccaa

SEQ ID NO: 36281 - DNA, 2667 bp, Streptococcus mutans
atggcaaaagaaacaaaaacagaagcactcactgctgaagaagcagctaagcagtatacgaatagcttagttgaaaaagcgttaaaggctgaaaaagtttatgcaacttatacacaagaacaggtagataaaattgttgcagctatggcgcttgctggttctgaggcgtccctgcagttagctaaagaagctcacgatgaaacaggccgtggggttgtcgaagataaagatactaaaaaccactttgcgacagaatatgtatatgaacgcataaaaaatgaaaaaacggttggcatcattggtgaagataaagttgctggcagtatcgaaattgcagcaccacttggtgtcttggcaggtatcgtaccaacaactaacccaacatcaacgactatgtttaaaatcttagtcgcattgaaaacacgcaatgcaatcgtctttgctttccacccagcagctcaaaaatgttctgctcatgccgcccaaatcttgtatgacgcggcggttaaagccggcgctcctgaaaatattgttcaatggattgaaacaccatccatcgcaaacacgggagctttgatttccaacaaaggcattgcttcaatccttgcaactggcggacctggcatggttaatgcagcccttaaatctggtaatccatcgatgggtgttggtgcaggtaatggtgctgtttatgtggatgcaactgctaatcttgaacgtgcggttgaagaccttcttctttctaagcgttttgacaatggtatgatttgtgcgactgaaaattcggcagttgtggaagcaccaatttataaagaatggcttgctaaaatgcaggaaaaaggcgcttaccttgttcctaaaaaagattacaaaaaatttgaagattttgtttttaatgacaaccatggtgttaacggaccggttgctggtatgtcggcgaaatggatctgtgaacaagccggtgtgacattgccagaaggcaaagatgttctcttatttgaacttgataagaaaaaaattggtgagaaattatcatcagaaaaactctctccgcttctttctgtttataaagccaaagatcgcaaagatggtattgatattgtagcagcccttcttgattaccaaggtgctggtcataactgtgctatccaaatcggttcacaagctgacccatttgtcgctgaatatggagatgccctcaattcatctcgtgttttggttaaccaaccagactcagtcggtggtatcggtgacgtttatacagacgcattgcaagccagcttaactcttggaacaggatcatgggggaaaaattcattgtcacacaacttatctactggcgacctcttgaatgtgaaaactgttgcgaaacgccgcaaccgtcctcaatgggttcgtttaccagaaaaaacttactacgaaaaaaatgctatttcatacttgcaggatgaaactgaaacaatgacgcgtgctatcatcgttgccgacccaggtatgcttcaatttggttttgttgacactgtccttgctcagctgtcccttcgggatgaaaaagtggcaacttcaatttatggtactattaaaccagatccaacactcggtcagactattgaaattgctagacaaatgcgtgacttcaaaccagatactgttattgcagttggtggcggttctgcccttgatgcagccaaaattgcgcgttatatctatgaatattcgttggatcaagaagcagatttccttgatagttatgaaaaagtcagtgagctcttccttgaattgcagcaaaaattcattgatattcgtaagcggattgttcgcttcaagcatcagacagtgactcgtctcttctgtatcccaacaacatctggtacgggttcagaagtgacaccttatgccgttattactgatgatttcacacacgtgaaatacccattgactgattatgaattgacaccgcaagttgctattgttgatccagaatttgtcatgacagtgcctaaacgtacagtagctctttcaggacttgatactttgtcacatgctcttgaatcttacgtatctgttatggcatctgatttcacacgtccatggtctatggaagctatcagattggttatcgaaaacttggaagattcttataactttgatcctaagaatccaacacttcgtggagaacaagcacgtgaaaacatgcattatgcagcaactttagcaggtatggccttctcaaatgccttccttggaattaaccactcactcgcccacaaggctggcggtgaatttggacttcctcatggtcttgctatctcaattgctatgcagcatgttattcgctacaatggcgttgcaggaaatgtgaaacgttctgtttacccgcgttatgaagaataccgtgcccaacgtgattatgcggatattgctcgcgctcttggacttaaagggaaagatgatgcagaattggttgaagcactctgtgcacgtattgatcaattaatgcatgctgtagatgttgagcctaagttatctgctaatggggttactaagaaggcttttgatgcagctgttgatagattggcaagcttggcttatgatgatcaatgtacaccagctaatccacgtcagccttacattgaagagatgaagcagctcttgattgatcagttc

SEQ ID NO: 36282 - DNA, 1296 bp, Streptococcus mutans
atgatcaaccgttattcacgccctgagatggcgaacatttggagtgaagaaaacaagtaccgtgcttggttggaagtggaaattttggctgacgaggcttgggctgagttgggtgagattcctaaggaagatgtggccaagattcgcgagaaggcggattttgatattgaccgcattttggagattgagcagcaaacgcgtcacgatgtggtagcctttacccgtgcggtttctgagacgttgggtgaggagcgcaagtgggtacactttgggctgacctcaacagacgtggtggacacggcctacggctacctatacaagcaggctaacgccatcattcgtaaggacttggataatttcctcagtatcatcgctgataaggccaaagaacacaagtttaccatcatgatggggcgcacgcacggtgtccatgcggagccaacaacttttggtctcaagctggcgacttggtacagtgaaatgaagcgtaatattgagcgttttgaacatgctgccgctggtgtggaagctgggaaaatctctggtgctgttgggaactttgccaacattccgccctttgtggaaaaatatgtctgtgacaaattaggcattcgtgctcaggaaatttcaactcaagtcttaccgcgtgatttgcatgctgaatattttgccgtgctagccagcattgccacatcaatcgagcgcatggcgactgaaatccgtggtctgcaaaaatccgaacagcgtgaagtagaagagttctttgccaaggggcaaaaaggcagctctgctatgccccataaacgcaaccctatcggctctgaaaatatgacggggcttgcgcgtgtgattcgcggacacatggtgacggcctatgaaaatgtgtccctctggcacgaacgcgatatttcccactcatcagctgagcgcattatcgcgcctgatacgaccattctcattgactacatgctcaatcgctttggcaatatcgtgaaaaacttgaccgtcttcccagaaaatatgaagcgcaacatgggctctacctttggtctcattttcagccagcgtgctatgctgaccttaattgaaaaaggcatgacccgcgagcaggcttacgaccttgttcagcctaagactgcgcagtcttgggacaaccaagtggacttcaaaccgttgctggaagcagatccagagatcacgtctcgcttgagccaagaagaaatcgacgaaatctttaatccagtctactacaccaagcgtgtggatgaaatctttgaccggattggattgggagac

SEQ ID NO: 36283 - DNA, 1839 bp, Streptococcus mutans
atgagtaaaaaatttctttttaatcgctctgttttctcaaatgctaagggacatgatgtcaaacgtaaatcctccaaaggtctcgtaacaggtattgccttagcaggagctattgttttacttggaggcagccaaattgcttctgctgataacgttactgcttcagaaaacaacacaaccacatcctcaactgcagctgacacagacactgcaaactctcagacagttgacagcactgatagtgacaacagccaagttacttctgagactgtctcatcaaaaaatagcacagcaagcagtgaggctgcttctgaaagcaatgaagctgagacaaacaatgacgcaacagcttctgagtcagccgatcaaagtgatgatgaactttccgatgaaacaacaagtaatgaagctcaagttaagtctcaatcagtcaatgctttagaatcagcaaaatatgataaagatgatgatgaagaggaagaagaagtcaacgaatacaaagaagatgacaaatctgaaaaagcagatattaaatttgacaacacaggcgtaaaaacaacttcatctggtgtgaacattgatggaaaaaacattaccattacatcagcaggaacttataccattacagggtctgccagcggctacagcatatcagtagcagataaagtgactgatacagtgaagctcaaactcgatgcagtgaatttgactgactccactctttattcatcaagagatttagatattaaagtcctatctgatagctctatttcgtcttctttgaagaatacaatcgaaacaggaggagcactctacatttcaagtaaaaagaaaagcggtttgaaagtcacaagtacagctggtcacgctatcaaagcaaacagtttagaagctgataaagtaaccttagagctgtcttctactgctaaagatgggattaatgccacatcaaacgtctccattaaaaagtcaaatgttaccatttcggcagaagatgatgggattcaagctgaagataataccgatgtcaattcaggtgatatccagatcaaagattctattgtaaaaatcacctctacaagtaaaggaattacagcgaacgacgagataaccgttaaagggtcaactttcataacaattacatctggctctgaaggaatcgaaggccgctatgtgaatttgaaaaaaggtcaaataacgatcaatgctggtgatgatgctatcaacgcgactgaatggacaacaaaagacgatgctgacctatcgcatttgaaaaacagtaagaaagatatcgaaaatgaggttgctattgttatttctggtgctaatatcagcggtattggcaaagatgacggtgtggattcaaatggaaatctctatattaccgatggtagtctcaaaattcaatcaatcactgattacagctcagccattgattatgatggtacagggtttgcttccggaggaacaacttgggcaattggccatatgggatttgctcagggcttctcaaagggaaccaaacaagcttatattgctgcgattgtttcaggattagccggtgataccattactataactgactcaaaaggacatatcgttgcaaaaacaaaggcagatgtagactttgaccatgttgtcttttcaaataaaaccatcaaggcaggcaaaacctacacggttacaacatctgatggtcataaagcagttatcaaagcaacaaaagacacaaccactcatccttcaggcaggcatgtatcaaaagataccgttccgctccttccaaatggccatcatccagcctttcctggaaacggaacccctccaaatgataagaac

SEQ ID NO: 36284 - DNA, 423 bp, Streptococcus mutans
atgaagaaaatttgttttgtttgtttgggtaatatctgccgcagtcctatggctgaatttgtgatgagagaggaagcatccgatgcgagtctagagattgccagccgggcaacgtcaggctgggaacatggaaatcctattcatcgcggaacgcaagggatttttagaaaatataaaattgcttatgattcctctaagagatctcaacgaattagtttggctgattttgcttactttgattggatcattggaatggacgagactaatgtctgtgatctcaaaaggttatctcaaggacaatttgatgataaaatctttctttttattgatggtggtgtaccggatccttactataccggagacttcgaagaaacttatcatctggtcgaaaagggctgtcaaacttggttgaaaaaaattaaa

SEQ ID NO: 36285 - DNA, 1149 bp, Streptococcus mutans
atggataaagatccagttattgaatttaaagaggttaacaaaatttatggagataatgttgctgttaagcatatcaatttaaaaattatggcaggtgaatttgtctgcttgattggtaccagcggatccggtaaaacaacaattctacgcatgattaaccgtatgttaaaaccaagcaatgggaaaatttttatcaaaggggaagaaatttctgatctcaaccctgttcaactcagacgcaagattggttatgttattcaaaatatcggcctcatgccacatatgacaatttatgagaatattactctggttccgaaattattaaaatggtcagaagataagaaaaaagctaaagccaaagaacttataaagcttgttgaattgcctgaagatttcttggatcgctacccttacgaattgtcaggcggacaacaacagcgtattggtgttgtcagagctctagctgctgatcaagacattattttgatggatgaaccttttggtgctttggatcctatcacccgcgaagggcttcaagatttggtgaaatctttacaagaaaaaacaggaaaaacgattgtcttggtcactcatgatatggacgaagccctaaagctagcaaccaagattgtcgttatggataaaggtcatatggttcaacaagccaatccgaccgaattgttacgccaccccgcaaccgcatttgttaaaaagatgattggtgaagaccgactcattcaagcacgcgctgatgtaacgccggttaaaaacatcatgctaaaagaccccgtttccattgcacctgataaatctctcaatgatgctatctcactcatgcgtcaaaaacgtgttgactctcttttagttacagataaggataataaactactcggcatgattgatgttgaatccttaaataataactacaaacaaaaccttgttgttgccgatatcttaaataaaatcagtttctacttggaagaagatcaactgctgcgcgacacagcccatcgtatcttaaaacgcggacttaaatatgtaccggttattgataaagaatggcatttaaagggaatcgtgacgcgatcatctctggtagatatgctttatgatattatttggggcaatcaagatacggaggaaacatta

SEQ ID NO: 36286 - DNA, 1788 bp, Streptococcus mutans
atgagaataaaatggttttcttttgttagagttacagggctgcttttggtgctgctttatcattttttccaacgagcttttccgggcggctttataggagtagacgttttctttaccttttcgggttatttgattacagctctactgattgatgaatttgccagaaataagatgattgatcttttaggctttctaaggcggcgcttctatcgcattgtaccgcctgttgtcattatggttttggtcgttctgccttttacttttttgattaggaaggattttgtggcagatattggccgccaaattgcttctgttctaggttttacaactaacctttatgaaatttttactggcagcagttacgaaagccaattcatcccccacctttttgttcatacttggagcctagctattgaagtgcatttttaccttttttgggggattcttgtctggttcttatcaaaaaaggttaaggatcctacgcaatttcgcggccttatctttttgatttcagttggtttatttttgctgagcttctttactatgtttgcgcgtgccttttttgttaatagtttttcgacgatttatttttcaactttgtcacatatttttcctttctttttaggagccatttttgcaacgatgtcaggaattagtgagacaacgaaacgctttaagaaaaatgtgcagctctggcagaccaaacgcgttgtctttttcatggttggcagtgcagccttgttatttctgttgggatttattcttgactttaataatataatcacttatttatttggttttgctttagccagtctattcacggctgtaatggtttattccagccgtgtcttaaatgaccaaacgccacatttgcaagaacctgcttttgttacttatttagctgatatcagttatggtgtttacctttttcactggtctttttatattatctttgggcaattaatgaataactggttggctgtcatttttacggttcttttctctcttacctttgcaacgatttcttattatgttgttgaaccttatattgcaggaaagcaagctgttttgtttgggctggctgttcctattgagcattacaaaaaatggttctacagtttggctggtttattaaccgttgtgactttaggtattgcctttacggcaccaagtgtcggctcttttgaaacaggacttttagttgatgcgctcaaccaagctgataataatatgaatcggacacatacgctggctgctggagacgcaagtgctattagtgatatcactgttattggtgactcagttgctttgcgctcaagtactgctttttctgaacttctgccggaagctcaggtagatgcggcagttagccgtaattttgggaatgcctatgatatttttaaaaatcatattgataatagtacattatcaaaaacagttgttttagcggttggagttaattcggttgaaggttacaaagataatattcaacaattcattgataatctcccggatggacatcgacttattattgtgactccttataatactaaagatgaacgtattccagatgttcgtgattacgaattagatttagcaaagaaatatcagtttgtcacgatagctgattggtatcaagcagctgtggcacatcctgaaatttggacagaatctgatggtgttcactataatgacagcagtgatgaaggtgctaaactttatgtcgaaactataaaaaaagccattcagacatctgcaaagcagcctgctaagggtgaaaaacaaccc

SEQ ID NO: 36287 - DNA, 1482 bp, Streptococcus mutans
atgacattagtgtatcaatcaacccgtgatgaaaataataaagtaagcgccagtctggctattttgcaaggcttagcaagagatggcggtctttttacgccgacatcttatccacaagttgatttggattttgaccagcttaaaacggcttcctaccaagaagttgccaagttggttttatcagcttttttggatgattttacagaagcagaattggattattgtattgctaatgcctatgatgataagtttgatacaccggtcattgcgcctttagttaaacttaatggccaatataatcttgaactttttcatggttcaactattgcctttaaggatatggcgctttcgattttgccttatcttttaacaacgtcagctaaaaagcaaggcattaataacaagatcgtcattttaacagcgacatctggagatactggtaaggcagctatggcaggctttgcggatgttccggggacagaaattattgtcttttatcctaatggtggtgtcagtaagattcaagaattacaaatgacgacacaggtaggagataatacacatgttgttgctattgaaggaaactttgatgatgctcagacaaatgtcaaaaagatgttcaacgatagtgatctgcgaacaaaacttttagagcacggtgcccaattttcatcggcaaactctatgaatgtcggacgtttagtgccacaagtggtttactacgtttatgcttatgcccagttgcttaaatcaggtgacattaaaaacggtgatagggttaactttacagtaccaacgggaaattttggaaatattttggctgcttattatgcacgtcaaattggtgtgccaattggcaaacttatctgtgcttcaaatgaaaataatgttttgactgacttctttaaaacagggacttatgataagaaaagagaatttcgtgtaacaaccagtccctcaatggacattcttgtttcatctaatttggaacgccttatttttcatcttttgggaaatgattctgttaaaacaaaagaactcatgcaggctttgattgaaaagggtgagtatactttagaaaaagctgataaagctattttagatttatttgctgcgggatttgcgaccgaagaagagacagccgctgagattaaacgtgtttataccgcttcgcgttatattgaagatccgcatacagcagttgcttcggctgtttaccatgcttataggaaatctagtggtgatcaaagcccaactgtaatagcttcaacagctagcccttataaatttccgcgtgtcgttgtttctgcagtcggaggtaaagatccaaaagatgattttgcagctgtacgtgagctgagtcgtttatcaggtgtatcagtgccaagggcagttgatggccttgaaactgctgaagttcgtcatcgaaaggttgtcgcgacagctgatatgcaaaaagcagtagagtcatatttaggaatt

SEQ ID NO: 36288 - DNA, 1278 bp, Streptococcus mutans
atgttagacattaaacgcattcgtaatgattttgatcaaattgctgaaaaattggcaagacgtggggttgatgaaaagacactacacgatttgaaagaactggattttaaacgtcgccaactgcttatcaaatcagaagaagctaaagctgaacgcaatactgcttctgcagctatcgctcaagctaagcgtaatcaagaagatgcatcagagcagattgctgatatgcaaaaattatctgccgaaatcaaagcacttgatgcccaattagtcgaaattgatgggcaactaaagacatttacaacaactcttccaaatattccagcagatgatgtccctcttggtgctgacgaagatgaaaatgttgaaatgcgccgctggggaaaaccacgtcaatttgattttgacatcaaagcgcactgggatcttggcgaagatcttgatattcttgattgggaacgcggttctaaagtaacaggttcgcgtttcctcttttacaaaggtttgggagcccgcctagaacgtgctatctataatttcatgctagatgaacacgctaaagaaggctatacagaagttattccgccttatatggtcaatcatgattctatgtttggcacaggacagtatccaaaatttaaagaagatacctttgaattagctgacaatgattatgtcttgattccaactgctgaagtgcctttaaccaactactaccgcggtgaaatcatcgatggtaaagagcttcctatttactttacagccatgagcccttcttttcgttcggaggctggttctgctggtcgtgatacgcgtggacttatccgcctccatcaatttcataaagtagaaatggtcaaatttgccaaaccagaagattcttataatgaattggaaaaaatgacagccaatgctgaaaatatcctgcaaaaattagaattgccatatcgggttattaccttgtgtactggcgacatgggcttttcggctgccaagacctatgacttagaagtctggattcccgcacaaaatacttatcgtgaaatttcatcttgttccaatacagaagatttccaagcacgtcgtgcgcaaattcgttaccgtgatgaagtcgatggcaaggtgaaacttcttcacaccctaaacggttcaggactggcagttggacgtaccgtcgcagctatccttgaaaactatcaaaatgcagatggttcagttactatccctgaggttctccgtccttatataggtggtgtccaagtcatttcacctcaatca

SEQ ID NO: 36289 - DNA, 1404 bp, Streptococcus mutans
atgaactgcaccccaaaagttagacagaaaaaatctaacttttggggtgtttttattatgaaattgacttatgaagataaagttctcatctatgaactgaaaaaccaagggtatagcttagagcagctttcaaataaatttgggataaaaatttctaatcttagctacatgattaaattgattgatcattacggaatagagatcgtcaaaaaaggaaagaatcgttactattctcctgaactaaaacaagaaatcattgataaagttcttcttgaaggtcgttcacaaataagggtgtctctagattatgctcttccaagtcatggaatgttgcctaattggatagcacaatacaagaaaaataggtatactattgttgagaaaacaagagggagaccacctaaaatgggacgtaagccaaaaaagaaaatcggaagaaatgacagagctagagcaacttcagaaagaattagaatatctgagagcggagaatgctgttctaaaaaagttgagagaactccgattgagggaagaaaaagagcaagaagaaaaacggaaattgtccgaggattggtaacggagttttctttagacattcttctaaagattattaagctcgctcgttcaacctattattaccacttaaagcagctagataaaagcaataaagatcatgctattaaagctgaaattcaagctatttttactgagcacaaaggaaattatggttatcgtcgaatgactcttgaattgagaaatcgtggcttcttggtaaatcataaaaaggttcaacgtctaatgaaagttcttggtttggaggctcgtattcgtcgcaaacggaagtattcttcctaccaaggagaggtgggcaagaaagcagacaaccttattcaacgccaatttgaagcatcaaaaccaatggaaaagtgctacacagatgtgacagaatttgccattccagcaagcggtcaaaagctctatttgtcaccagttttagatggtttcaacagtgaaattattgcttataacctttctacgtcaccgaacttgatacaagtgaaagctatgctagaacaggctttcacagagaaacattacacaaatactattcttcatagtgaccaaggctggcaataccagcatgatttttatcatcaatttttagagaacaaggggattcagccgtccatgtcacgtaaaggaaacagcccagataatggcatgatggaatctttctttggcattttgaaatccgaaatgttttacggttatgagaagacatttaagtcacttaagcaattggaacaagctattgtagactatattgattattacaacaacaaacgtattaaggtaaaactaaaaggacttagtcctgtacagtacagaacgaaatcctttact

SEQ ID NO: 36290 - DNA, 1374 bp, Streptococcus mutans
atggcctataagacaacttatccctatactaatgaagttttgaaggaatttgctaataatagcgatgccgatttagaaaaagcattggttactggacatgcgctttataaaaaatggcgtgctgaaggaggcttagaggagcgtaaagctcaattgcataaagttgcggatatccttcgtcgcgatgtggataaatacgccgaagtcatgaccaaggacatgggaaaactctttacagaagctaaaggtgaggttgaactgtgtgcagaaatcgctgactattttgctgataaggctgaagaatttttagaaccaaaagcatttgaacctattcatggtgatgcctattacattaagcaagcagttggtgtgctctttatggtcgaaccatggaacttcccattctatcaaattatgcgtgtttttgctcctaattttatgattggcaacccaacggttttgaaacacgcatctatctgtcctgcttctgctcaggcttttgagaatttggttaaagaagcaggcgctcctgaagggtcatttaagaatcttttccttacttatgatcaagttaacaaggctattgctgatcctcgtattcaaggggtggccttaaccggttctgaacgtggtggtgcttctattgctgctgaagcgggagcaaatcttaagaaatctgctcttgaactcggcggtaatgatgcttttctcattttggaagatgctgactttgaactcttaaaagatactattttctttgcacgcctttacaatgcaggtcaagtctgtacatcatccaaacgtttcattgttgttggtgaagaaaactacaagaaatttcttgatatggttgttgaaaccttcaaaacagccaagtggggtgacccgatggatcctgaaacaacgcttgcgcccttgtcatcagccgaagctaaggaagaagttcttggtcaaatcaagttagctgctgacaacggagcacgtgtggtttacggtaataaaccaattgaccatccaggaaactttgtctttccaaccgttttgaccgatattaccaaggaaaatccaatctacaatcaagaaatttttggtccagtagcttccatttacaaagttgatacagaagaagaagctattgccttagccaatgattctagttacggacttggtggtacagttttctctaaagaccttgaacacgcaaaagctgttgctgctaaaatcgaaacaggaatgacctttatcaattccggttggtcttcctatccagaagttccatttggcggtattaaaaattcaggttatggtcgtgagctcagcaatctcggatttgatgcctttgtcaatgaacatttagttttcattcccaaacaa

SEQ ID NO: 36291 - DNA, 516 bp, Streptococcus mutans
atgaaattgacttatgaagataaagttctcatctatgaactgaaaaaccaagggtatagcttagagcagctttcaaataaatttgggataaaaatttctaatcttagctacatgattaaattgattgatcattacggaatagagatcgtcaaaaaaggaaagaatcgttactattctcctgaactaaaacaagaaatcattgataaagttcttcttgaaggtcgttcacaaataagggtgtctctagattatgctcttccaagtcatggaatgttgcctaattggatagcacaatacaagaaaaataggtatactattgttgagaaaacaagagggagaccacctaaaatgggacgtaagccaaagaagaaatcggaagaaatgacagagctagagcaacttcagaaagaattagaatatctgagagcggagaatgctgttctaaaaaagttgagagaactccgattgagggaagaaaaagagcaagaagaaaaacggaaattgtccgaggattgg

SEQ ID NO: 36292 - DNA, 1734 bp, Streptococcus mutans
gtgatgaaaggaagcggtcaaatgactgacaaaaaaactcttaaagacttaagaaatcgtagttctgtttacgattcaatggttaaatcacctaatcgtgctatgttgcgtgcaactggtatgcaagatgaagactttgaaaaacctatcgtcggtgtcatttcaacttgggctgaaaacacaccttgtaatatccacttacatgactttggtaaactagccaaagtcggtgttaaggaagctggtgcttggccagttcagttcggaacaatcacggtttctgatggaatcgccatgggaacccaaggaatgcgtttctccttgacatctcgtgatattattgcagattctattgaagcagccatgggaggtcataatgcggatgcttttgtagccattggcggttgtgataaaaacatgcccggttctgttatcgctatggctaacatggatatcccagccatttttgcttacggcggaacaattgcacctggtaatttagacggcaaagatatcgatttagtctctgtctttgaaggtgtcggccattggaaccacggcgatatgaccaaagaagaagttaaagctttggaatgtaatgcttgtcccggtcctggaggctgcggtggtatgtatactgctaacacaatggcgacagctattgaagttttgggacttagccttccgggttcatcttctcacccggctgaatccgcagaaaagaaagcagatattgaagaagctggtcgcgctgttgtcaaaatgctcgaaatgggcttaaaaccttctgacattttaacgcgtgaagcttttgaagatgctattactgtaactatggctctgggaggttcaaccaactcaacccttcacctcttagctattgcccatgctgctaatgtggaattgacacttgatgatttcaatactttccaagaaaaagttcctcatttggctgatttgaaaccttctggtcaatatgtattccaagacctttacaaggtcggaggggtaccagcagttatgaaatatctccttaaaaatggcttccttcatggtgaccgtatcacttgtactggcaaaacagtcgctgaaaatttgaaggcttttgatgatttaacacctggtcaaaaggttattatgccgcttgaaaatcctaaacgtgaagatggtccgctcattattctccatggtaacttggctccagacggtgccgttgccaaagtttctggtgtaaaagtgcgtcgtcatgtcggtcctgctaaggtctttaattctgaagaagaagccattgaagctgtcttgaatgatgatattgttgatggtgatgttgttgtcgtacgttttgtaggaccaaagggcggtcctggtatgcctgaaatgctttccctttcatcaatgattgttggtaaagggcaaggtgaaaaagttgcccttctgacagatggccgcttctcaggtggtacttatggtcttgtcgtgggtcatatcgctcctgaagcacaagatggcggtccaatcgcctacctgcaaacaggagacatagtcactattgaccaagacactaaggaattacactttgatatctccgatgaagagttaaaacatcgtcaagagaccattgaattgccaccgctctattcacgcggtatccttggtaaatatgctcacatcgtttcgtctgcttctaggggagccgtaacagacttttggaagcctgaagaaactggcaaaaaa

SEQ ID NO: 36293 - DNA, 2502 bp, Streptococcus mutans
atgttaacggaattaaaagcggttttaaaaaagcctatgctttggattacgatggtaggagtagcccttgtccctgccctatataatattatttttttgagttctatgtgggatccttatggcaaagtatctgatttacctgttgcagttgttaataaagataaaacggcaacttatgaaggaaagaagatgactatcggtaaagatatgactgataatatggtccgtaataaaagtttggactatcattttgttgatagcgaaaaagctcaaaagggacttgaaaaaggtgattactatatgatcattactttaccagaagatctttctcaaaatgcggctagtgttttaacagatgaacctaaaaagctaacgattccttaccaaacgtctaaaggacatagttttgttgcctccaaaatgagtgaaactgctgctaagactttaaaagagtctgtgtcgaaaaacattacaagttcttacaccaaatcactttttaagaatatgtcaaccctaaaaacaggtcttggcagtgcggctaatgcaagtcaaaaaatagcgactggttcaaaacagttagcaaatggcagtcaagtgatgactgataatctgaatttactttcaaattcaagtcaatcatttgctcaagggactaataccttatattcgggcttaacagcttatacgggaggtgtcggtcagctttctgcaggtttaaataatttaaacaatggtttgacagcttatacaaatggagttggtcagttagcaaatggcagcagccaactgagcaatcaatctcagaagcttctaggaggtgttgcgcaattagcgaatggttctgcttctattcaacaattggttaatgctagcagtcagttgaatcaaggacttattaagctgtcaacagcaacaggtctttctgaagaacaagttcaacagtttagctcattgattaatcagttgggaactttgaatcaaagtattcaaaattacagtgataatgggacagcaacgactgcaaatagtcctgatcttagtacgtatttatctgccattacaacagcagctcaagcaattgttaattcaggaaatacgtctcagcaaacaacaactaatcagtccaatgcattggctgcagtccaagctacaggtgcttatcaaagattatccgctgaggatcaatcagagatcgctgcagctttggccaacactggtagttcaacaacaactacaggtgctgatgcaaacgcagtgtcacaagcccaagctatcctaaacaatgtccaaagtattcaaagtgccttatctactttacagacaacaactgctaatacaccaacaagcccatcagccagcttgactcaaattaaaaatacagctaattctgtattacctagtgcggcaacttccttgacaaccttgtcaagtggtttgacacaagcaaaaacagctcttgattcgcaagtagtccctgtcagcacagcccttgctaatggtacggctcaattaggctctactttttcaacaggcgccaattccttgatgacaggagtaggccaatacactaatgcagttgatattcttaatgcaggagctaatactttggctgctaaaaataaccagttaacagatggtacaagtcaattggtaaatggtgccaatcaattaaatagcaactctggacaattaacgaaagggactgcacagttagcaaatggtgctaatcaaatagagacaggagctggcaaattggctgcaggtggagaaagtttaacggcgggcttgacaactttgtcaagtggtagtggtgaactgtcgaaagcattgtcaactgctaaaaataaattatcattagtagcagttgacaatgataatgctaagactttgtcaagtcctgtcactatcaagcatacagataaagataatgtcaaaacaaatggtgttggaatggctccttatatgatgtcagcagctttaatggtaatggcaatttcaaccaatactatctttagagtagcactttctggtaagcaagctaaaaccctacgagaatggatagatcaaaagttagcagtcaatggcttgattgctgttactggagctattattctctattttggtgttcatattattggtttatcagctaattttgaactaaaaactttaggattaattattcttaccagtatcacttttatggtcttagtgacaactttggtaacttggcatgataaatttggctcttttgctgccttaattttacttttactacaattaggttccagtgcaggaacctatcccttagccgttacagataagtttttccaagttgtcaatccttatttaccaatgagttattcggtttctggtttacgagaaaccatttctatggctggtacaattggtaatcaactactagcgctgagtttatttttccttacttttgctgctttaggattgttaatcgctcgaaggaggattaggtctgtcaaagtagcc

SEQ ID NO: 36294 - DNA, 267 bp, Streptococcus mutans
atggcaatctcaaaagagaaaaaaaatgaaattattaaacaatacgcgcgtcatgacggtgacacaggttcagtagaggtacaagttgctgtccttacttgggagatcaatcatcttaatgaacatattaaacagcataaaaaagaccatgcaacttaccgtggattgatgaaaaagatcggtcatcgccgtaatcttttagcttaccttcgccgtacggacgttaatcgttatcgtgatcttatcagctcacttggacttcgtcgt

SEQ ID NO: 36295 - DNA, 2190 bp, Streptococcus mutans
atgtcaaaacaagtgtttgaaacaatttttgctggcaaaaagctggctgtagaaatcggtcaggttgccaaacaagccaatggtgctgctttggttcgttatggtgattcaacggtcttgagtgctgcagttatgtctaaaaaaatgtccacaggcgatttcttcccacttcagattaattatgaagaaaaaagatacgcagctgggaaattccccggtggctttaacaagcgtgaaggccggccatcaaccgatgctactttaacggctcgcttaattgatcgtccgattcgtcccatgtttgcggaaggttttcgcaatgaagtccaagtcattaatacagttctgtcttatgatgctgatgcgagtgctcctatggcggctatgtttggcagttcactagcactttcgatttcagatattccttttaatggcccgattgctggggtacaagttgcttaccttgatggtcaatatgttattaatcctacggctgaagaaaagaaagcttcacttttagaattgactgtcgccggaaccaaggaagccatcaatatggttgagtctggtgctaaggaattgtcagaagatatcatgcttgaagcccttctcaaaggacatgaagcggtacgtgaactaattgctttccaagaggaaattatagcagctgttggtaaagaaaaagctgaagttgaattgttacaggtggatgctgatttgcaggctgaaattgttggaaaatacaatgcagaccttcaaaaggctgtccaaattgaggaaaagaaagcccgcgaaattgcgacagaagctgtcaaagagcacgtgactgctgaatatgaagaacgctatgctgaacacgaggaacatgaccgtatcatgcgcgacgtagctgaaatccttgaacagatggaacacgcagaggttcgccgtcttatcacagaagacaaggttcgtcctgacggtcgtcgtgttgatgaaatccgtccgcttgatgcagagattgatttcttgccaaaagtacatggttcaggtctctttactcgtggacaaacccaagccttgtcagtgttaacattggctccaatgggagatacccaaattgtggacgggcttgacgaagaatataaaaaacgcttcatgcatcattataatttcccgcaatattcggttggggaaacgggacggtatggagcgccaggacgccgagaaatcggtcatggagctcttggtgaacgtgctttggctcaagttctgccaagtttggaagcatttccttatgccattcgtttggtagctgaagtgttagaatcaaacggttcctcatcacaggcttcaatttgtgcgggaacgctcgctcttatggctgggggtgtacctatcaaagcaccagttgcaggtattgctatgggacttatctcagacggcactaactataccgttttgaccgatatccaaggactagaagatcacttcggcgatatggactttaaagttgcaggtacccgtgaaggtatcacagctttgcaaatggatattaagattgagggtattacaccgcagattttagaagaagctcttgcccaagctaaaaaagcacgttttgaaattcttgatgtgatcgaaaaagtcattcctgcaccacgtctagaattagcaccgacagcacctaaaattgacacaattaaagttgatgttgataaaatcaagattgtcattggcaagggcggtgaaaccattgataagattattgaagaaactggcgttaagattgatattgatgaagacggtaatattgctatctactctagcgatcaagaggctatcaatcggactaaggaaattattgcaagtttggtacgtgaagctaaggttggtgagatctatgaagctgaagttgtccgtattgagaaatttggtgcttttgtgcatctttttgataagacagatgcactcgttcacatctctgaaatagcttggacccgcacgaataaagtagaagatgtcttggctgttggagataaggttacggtcaaagttgttaaggtagatgacaaaggccgtattgatgcttccatgaaagctttattaccacgtccgccaagatctgaaaagtcaaataaggaggaccatcaatctgtcagacatcacggttctcctaaagacgataaaggtaaagaaaaatatgataaa

SEQ ID NO: 36296 - DNA, 615 bp, Streptococcus mutans
atgggttggtggaaagaaaccattgatattgttaaagaaaaagatcccgcagcacggacggcgctagaggttcttttgacttacccaggtgttaaggctttagctgctcattgcttatctcattttttgtggacacaccattgtaaattgttggctcggatgcatagtcagttttggcgtttttggacacaaattgagattcatccaggtgctgaaattgcagaaggcgtctttattgatcacggttcaggtttagttattggtgagactgccatcgtagaaaaaggggtcatgctttatcatggtgtgacacttggtggtacgggtaaagagactggaaaacggcatccaacgattcgtcaaggagctcttatttctgcacattcacaagttattggtccggttgaggttggtccgggcgctaaggtgggtgcaggtgcagtcgttgtttcggatgttccagcagacgtcactgtggttggtgttccagccaaggtggttcgtattcatggtcaaaaagatgaaacagctatccatgaaatcgaagagaaccgtgaatattacctcaaaaaactagaagaagctaaggaagctagttttcactcgtccgggctg

SEQ ID NO: 36297 - DNA, 1735 bp, Streptococcus mutans
atgataaaaatttatgacactttgacacgcagtctgcgtgaatttgttccaattcatgaaaatacagttaatatgtatgtctgcggaccaactgtttataattatattcatgtaggcaatggacgttctgctatcgcttttgatacaattcgccgctattttgaataccgtggatacactgtcaattatatttccaattttacagatgttgatgataagatcattaaggcagctgcgaaagctggtatgactaccaaagcgttatctgataagtttattgcagcttttaaggaagatgttgctgctcttggtgttaaacctgcgactgagaatcctcgtgttattgattacatgcaggacattattgattttgtccaaattttagttgacaaaggctttgcttatgaatcatcaggagatgtttatttccgtgttcgtaaatctgataattatgctgctttggccaataagactttggaagaattagagattggtgccagcggtcgagtggatgctgaaagtgattgcaaagaagatcctttagacttcgctctttggaaggcagctaaggaaggtgaaattgcttgggacagtccttggggagctggtcgtccgggctggcacattgaatgttcagtgatggcaacaaccattttaggagatactattgatatccacggtggcggtgctgacttagaatttcctcatcatactaatgaaattgctcaatcagaagctaaaacggggaaaaaatttgccaattactggatgcataatggctttgttaatattgacaatgagaaaatgtccaaatcgttaggtaattttatcactgttcacgatgctctcaagacaatggatggacaggttttacgtttcttctttgcaactcagcattatcgtaagccttttaattttacagaaaaagctattcgtgatgctgaaatcaaccttaaatatttgaaaaatacctatgaacagccttttacagctactgtagatgaggctgtatttgccagatttttggaaaaatttcaagcagctatggatgaggacttcaatacagccaatggcattacagttgtttttgaattggctaaatggattaattcaggtcattatgatcaaactgtaaaagataaatttgcagaaattcttcaaattttcggtgttgtttttaaagaagaggttctggatgctgagattgaaaaattgattgaggaacgccaaaaagcgcgtgcagcacgagattttactaaagctgatgccattcgtgatgacttagctgcgcagggcatcaagcttttggataccaaggatggtgtgaggtggatgcgtgactaggtcagttgacgttaatcttatcaacggaatcgcccttgcttttgagggggatgccatttattctacttacattcggaaacatctgatttttcaaggtttgacaaagcctaatcagctgcatcacaaaacgactcgttatgtgtcagccaaggcacaggctatgttgataactaagatgttagaagcgcagcttttgagcgaaaaagaagaagatatttaccgtcgcggacgcaatgccaacagccataccaaggctaaaaatacagatgttgtcacatacaagatgtcaacaggatttgaggcagttatgggttatctccatatgaccgagcaaattaagcggctggaagagctgattgactggtgtattcagacagttgaaaatgaatat

SEQ ID NO: 36298 - DNA, 903 bp, Streptococcus mutans
atgaccattcgtatcattcactcagataaaatttaccgtgagttgctgaaaatgcctgtagccaaaagaagggcttattttaaagaacaagttctggcgccttttaagcccaaattttacaaacagaatattccttacgaggcaaagcaggcggacggttttgacatcatgatgctgctttcttggatgcatctcatgcctgaaacgctgacggatcagcaccaagccttcattgactgtttagatgatggcttttggaaaagatgtgaccaagccattcaagatagtctagcaaggtttagttctttccagctgccagttcaagattatacttttacagctttattggccaatccagctgcccccatgctgcaaatcaatgatggttacagcggagatggtggtattccaggttatattttcttatctttggtgccccatttggataccttaaaccgtgtccaatctgcgctggctcacgagatcaatcataatgttcgctatcaatttattgattgggacggtggttctctgaaggagatgattgtagctgaaggtttagcagagaatttcgctgtacagctgtatggtaaggaaaagctgggtccttgggtaagcaagacagacttggagacgctcaatcagctggttaagcctttcttacgtgaacatcttgatgtaaggggaatgcagaaaatcactgcttatctctatggcgataaaattgctgctatgatgggtcaagacggagttggcatgccttattgtgcgggttacgcctgtggctattatctggtaaaatactacttagaaaaaacgggtcaaacaattgaagaagcaacgtttttgccagcttcagaaatcttagcggaggcggatgaattttggacagagactacacac

SEQ ID NO: 36299 - DNA, 735 bp, Streptococcus mutans
ttggacagagactacacactaaaagaaatcatgaccattactggtctaaccaagcgaacattgcattattacgaccaaatcggtctcctgccagctaggaagttagcaaatggctaccgtcactatagtcagcaggatttgattgatttgcagcgcatcctttttctcaaagccttggatttttctattaaagaaatccagtccttactcaagctcagtgatgaggctctgcgtccgattttagaagagcagcaaacacgcttggttcagaaaattcaggatttgcaaaaaaagaagaaagaactggaaaattttctggctggatcgccgctcattactttggatatttttgaaaaaccgttgaacgaccaatatcaaacagaagcagagcttcgttatgggaaaacatcggtctaccagacttatcaagaccatcgggcacagcttgattctactgaaagaactcagtatgatacaaaaatggagcagcagtttgaccaagtttttcaagaatttaaacgagtgagtcatttgccgctttctgcaacagaagtagcggcagctgttgaacagtggaaatcggctttcctgatgattggtgatttttcagatgaggttttggcttatattgcgaaatcttatgtctacgattcgcgttttaaacaatatttttctaaatatggcaattttgacctgacaagatttatagccgaagcagtcacttattatttaact

SEQ ID NO: 36300 - DNA, 609 bp, Streptococcus mutans
atgtcacgttatacaggaccatcatggaaaaaatcacgtcgccttggcttgtctcttacaggcacaggtaaagaattagcacgtcgtaactacgtgccaggtcaacatggaccaaacaaccgcagcaaactttcagaatatggtttgcaattagctgagaaacaaaagcttcgtttctcatatggacttggtgaaaaacaattccgtaatctcttcgttcaagcaactaaaattaaaggtggaatccttggttacaactttatgcttcttcttgaacgtcgtcttgacaatgttgtttaccgtcttggtttagcaacgactcgtcgtcaagctcgtcaatttgtaaatcacggtcacattcttgttgatggtaaacgtgttgatattccatcataccgcgttgaagttggtcaagtgatttcagttcgtgaaaaatcagctaaggtaccagctattcttgaagctgttgaatctgtagtaggacgtccagcattcgtatcctttgatgctgacaaacttgaaggttcattgacacgtcttccagaacgtgatgaaatcaacccagaaattaacgaagcccttgtcgttgaattttataacaaaatgctt

SEQ ID NO: 36301 - DNA, 1362 bp, Streptococcus mutans
gtgccagagacctcagaattacgagtacagcctcaagatttaattgcggaacaatctgttttaggttctgtttttatatcaccagagaaattgattgctgttcgggaatatattgatcctgaagatttttataaatatgctcatcgtgttatttttaaagcgatgattagtcttagtgatcaaaacgatgccattgatgcaacaacagttcgtgctattcttgataatcaaggagatcttcagaatattggtggaatttcctatctggttgaattggttaatagcgtgccaaccagtgctaatgctgagtattatgctaaaattgtagctgaaaaggctatgcttcggcggattatttcacgcttgacagaagctgttaatcaagcttacgaaggcgcaataaactctgaagatattatttcaggtgcggaaaaagccctgattgatgttaatgagcgcagtaatcgtagtggatttcgtaaaatttcagatgttcttgctgtcaattatgaaaatttagaagttcgttctcagcaaataacagatgttacaggactggctactggttttcgggatcttgataagattacaacaggtttacacccagatcaacttattattttagctgctaggccagcggtaggtaagacggcttttgttcttaatattgcccaaaatgttggcactaaaatgaatcgtcctgttgctattttttctctagaaatgggagctgaaagtctagttgatcgtatgctggcttcagaaggaatggttgatgcccataatttacgaacaggtcagttaaccgaacaggattggcaaaatataacgcttgcgcaagggactctagctgatgcaccaatttatattgatgacactccgggaatcaaggttacagagattagggcacgtgctcgaaaattagatcaggaactagagaaaggattaggattaattgtcattgactacttgcaattaatcacaggcacacgacctgaaaatcgccaacaagaagtgtctgatatttcgcgtcagttaaaaattcttgctaaggaacttggagttcctgtcattgctcttagtcagctatctcgtggtgttgagcagcgtcaagataaaagacctgttctttctgatatccgtgagtcggggtctatagaacaagatgctgatattgtagcctttctttatcgtgatgattattacgatagaggagataaagatgaagggcaagaacaattggtagataatacaatagaggttatcttggaaaaaaatcgtgctggtgctcgaggaacagtaaaattaatgttccaaaaagaatataataaattttctagtattgcccaatttgaagagaga

SEQ ID NO: 36302 - DNA, 450 bp, Streptococcus mutans
atgaaagttatttttttagcagatgtcaaaggtaaaggtaagagaggggaagtaaaagaagtttctacaggttatgctcagaattttttaatcaagaaaaatttggctaaggaagccacaaaacaagctattaatgagttaaagggaaagcaaaaatctgaagaaaaagctcaagccgaacttttagctgaggctaaagcagttaaagttaaacttgaacaagaatcaacgcttgttcaattcagtgaaaaggttggtccagatggtcgtacttttggttctattacaagtaaaaaaatttctgaagaattgaacaaacaatttgggatcaaactggataaacgttatattaaattagatcatccgattcgaacaattggtttaattgaaattcctgtaaaacttcacaaagatattgatggcatcattaaacttcaaattaaagaagct

SEQ ID NO: 36303 - DNA, 1971 bp, Streptococcus mutans
atgaaaagatttcgttttgccactagccatttaatcatgattggaatgattttgtttggaattttggctattagtgcgcgtgtttttccagattcaccactgttaatgtttattatttttttgacttgtgtagctgtaatcatactgttttactatcaaaagaatatttatgaaatttctgaattagagcagattgaactcttaaatagccaaactgaaggtaagctgattactatgcttgatcagatgccggtaggtgttattcaatttgatcctgaaacagataaaattgagtggtttaatccttttgcagagttaattttcacgaaagaagatggtgaatttgatggtgaatttatcagcagtgtcattaaaaatagaaaagaaggttctgttgatcaaacgatggaagttggggagaataaatattctgttgatatagatttagacaatggtattttttactttttcaatttatccagagaaagtgagaatcaaaggcaaggattagatttacaacctgtcattggtattatatctattgataattatgatgatacgattgagtctttagcagatgcagatgtttcacaaattaatggttttattgctaattttatttctgaatttgctcaaagtagggaaattttttatcgccgtgttaatatggatcgtttttatttctttacagattatagtgtcttagatcaactcattcaagataaatttgaggtgttagaacaatttagaaaagaggctcaagagcgccaccttcctttaactttaagtatggggatttcttatggcaatgcaaatcatagtcaaattggacaaatcgctttgaagaatttgaatattgctcttgtccgtggtggcgaccaagctgttatccgtgaaaatgacgaacataagaaactgctttattttggtggaggaacagtttcaactattaagcgttcacgtactaggacacgcgctatgatgactgctatttctgataaaattaaaacagtagatagtgtctttgttgtaggacataaaaatcttgatatggacgctttgggagcttcagttgggatgcaggctttcgcaaacaatatcattgaacatgctgcttatgctgtctatgatgaagatagtatgagtcatgatgtagcaagagctgtcaatcgtttaaaggaagatgggcatactcaacttttaacagtcaaagagtctatagaacaagtaagtgataattctcttcttgttatggtggatcattctaaattgcagctaacgttgtcaagagagctttacaataagtttacagaagttattgtgattgatcaccacagaagagatgatgattttccagaaaatgctattttaacctttattgagagtggagcaagcagtgctagtgaattagtaacagagctcttacagttccaaaatgggaaataccatctcaataaaattcaagctagtattgttatggctgggattatgcttgatacaaaaagtttctcgactcgtgtaacaagccgaacctttgatgtagccagctatttacgtacgcttggcagtgataatgttgaaattcaaaatatttcagctcttgattttgatgaataccgtttaattaatgaacttattttacgtggcgatcgtattttaccaaatgttgttgttgctacaggagcagatgatatcagttattccaatgttattgctagcaaggctgctgatactatgttaaatatggctgggattgaggctacctttgttattactagaaatgatgaaagaacagtttgtatatctgcacggagtcgcaataaaattaatgttcaacggattatggaagaaatgggaggcggcggccacttcaacttagcagcctgtcaattaaaaggtacaagtgttaaagaagcccgcaaactcttattagaaaagatcaaagaagaatttacaggaaacgaggaagct

SEQ ID NO: 36304 - DNA, 1308 bp, Streptococcus mutans
atggctttaccaacagttgctattgtcggacgcccaaatgtcggcaaatcagcgctttttaatcgtatagctggtgagcgtatttccatcgttgaggatgttgaaggagtaacaagagaccgcatttatacaaaggcggaatggcttaatcgccaattttcaatcattgatacaggcggtattgacgatgttgatgccccctttatggaacaaattaaacatcaagctgatattgctatgacagaggctgatgtgattgtttttgtggtatctgctaaggaaggtatcacagatgccgatgaatatgtagcaaagattctttatcggacacacaagccggttattttagctgttaataaagttgataatcctgagatgcgcagtgctatttatgatttctatgccttgggactgggggatccttatcctgtttcttctgctcatggtattggtacaggagatgtccttgatgctatcgttgataatttaccgacagaagcgcaagaagagagttcagacattattaagtttagtttgatcggacgtcccaatgttggtaaatccagtttaatcaatgctatcttaggagaagatcgtgttatagcatcaccagtagctggtacgacccgtgatgcgattgatacaaccttcacggatgaagaaggtcaagaatttaccatgattgacacagctgggatgcgtaagtcaggtaaagtttatgaaaatacagagaaatattctgttatgcgtgctatgcgtgcgattgatcgctcagatattgttttgatggtgttgaatgctgaggaaggtattcgtgaatacgacaagcgcattgctggttttgctcatgaggctggtaaagggattgttgtcgttgtgaataagtgggatgcgattaagaaagataatcgtactgttgcacaatgggaagcagatattcgtgacaattttcaatatatcccttatgctcccattgtttttgtgtcagcagttaccaaacaacgactgcataaactgccagacgtgattaaacaagtaagccaaagtcaaaatacccgtattccatcagctgttttaaatgatgttgtcatggatgctgtggcaatcaatcccacaccaacagataaaggaaagcgcctcaaaattttttatgcgacacaggtttcggtcaaaccgccaacctttgttatttttgttaatgaagaagagctgatgcatttttcttatttgcgttttttggaaaatcaaattcgccaagcttttgtttttgagggaacccctatccgcttgattgcaaggaaacggaaa

SEQ ID NO: 36305 - DNA, 1893 bp, Streptococcus mutans
atgacacacgaatttactgaaaactatgatgttattgtcatcggcgctggtcatgctggtgtggaagccagtcttgctactagtcgtatgggctgtaagactttactggcaactattaatttggaaatgttggcttttatgccttgtaatccttcaattggtggttctgctaaggggattgtcgttcgtgagattgatgctcttggcggtgagatgggaaagaatattgataagtcctatattcaaatgcgaatgctcaatacgggtaagggtccagcagtacgtgctttacgtgcacaggctgataaggcactttatgctcgcaacatgaaacatacggttgaacaacaggaaaacttaaccttacgtcaatctatgattgatgaaattttggttgaagatggtaaagttattggtgttaggacagcgacgaatcagaaatacagcgctcaggctgtcattgtgacaactggtacggctttgcgcggtgagatcattttaggcgaattaaaatattcatctgggcctaataatagtctcgcttcagtaactttagcagataatttgagagatttaggtctggagattgggcgctttaaaacggggacaccgccacgagttaaggctaattctattcattatgatgaaactgaaattcagcccggagataagaaagcaaatcacttctcgtttatgtccaaagatgaagattaccttaaagatcagatcccttgttggctgacctataccaatcaaagtagtcatgatattattaataaaaatctttacagagcacctatgttttcaggtattgtcaagggtgtaggaccacgttattgtccttctattgaggataagattgtccgttttgctgacaaagatcgtcatcagctttttttagagcctgaaggacgtgaaacagaagaagtctatattcaaggtctgtcaacgagtttgccagaagatgttcaaaaagatgtggttcattcgattaaaggactggagaatgctgaaatgatgcggactggctatgccattgaatatgatattgtccttcctcatcaattgcgggcgactctggaaaccaaaaaaatctcaggactatttacggctggtcaaacaaatgggacgtctggttatgaagaagccgctggtcaaggaattgtcgctggtatcaatgctgcccttaagattcaaggaaaaccagaattgattctcaaacgtagcgatgcttatattggagttatgattgatgacttggtcacgaaaggaacccttgaaccttatcgtttactaacatcgcgtgcggagtatcgtttgatcttacgtcatgacaatgcagatttacgcttgacagaaattggtcatcaggttggtctagtgaatgaagaacgctatatgcgcttccaaatccgtaaaaatcaatttgacaatgagttgacaaggttgtcaagtataaaattaaaaccagttgctgaaataaataaacgtattgaagaacttggctttaagcccttgacagatgctttgacagcaaaagaatttatgcgtcgaccagaaatcaactatgccattgcaacaagttttgttgggcctgcggcggaaagcttagatgagaaggtcattgaacttctagaaactgaaatcaaatacgagggatacattaataaagccctagatcaagttgcaaaaatgaagcgaatggaagaaaaacgaattcctaagaatatcgattgggatgccattgattctattgcgaccgaagcacgtcagaaatttaagaaaattaacccagaaactattggtcaagctagccgtatttctggtgtgaatccagctgatatatcaattcttatggtctatcttgaaggaaagaatagaagtcgtacaaga

SEQ ID NO: 36306 - DNA, 1119 bp, Streptococcus mutans
atgacagataattcaaaaacacgtgtcgttgttggcatgagtggtggtgttgattcgtctgtaacggctctgcttttaaaagaacaaggttatgacgtgattggtgtcttcatgaaaaactgggacgacacagatgaatttggcgtttgtacagctacagaagattacaaagatgtggctgcggtagcagatcagattgggattccttattattcagtcaattttgaaaaagagtattgggatcgtgtcttcgagtatttcttggcagaatatcgtgcaggacgcacacctaatccagatgtcatgtgtaacaaggaaattaaatttaaagcctttcttgattatgccatgacccttggtgcggattatgtggcgactggacattatgcgcaagtgtcacgtgatgcagacgggactgtccatatgttgcgcggagcagataataacaaggaccaaacttattttttaagtcagttatcacaagaacagctgcaaaaggtaatgtttcctttaggtcatttgcaaaagccgcgagttcgtgaaattgcagagaaggcaggattggtaacagctaagaaaaaagattcaacaggaatatgctttattggtgaaaagaattttaaagagtttttgagtagctatttgccggctcaaaaaggtcgtatgatgactattgatggtcgtgatatgggagaacataatggattaatgtactataccattggtcaacgtggcggcatgggaatcggtgggcaaaaaggtggagataatgcaccttggtttgttgtagggaaagatttgtctcaaaatattctctacgttgggcaaggtttctatcatgacgcacttatgtcaaccagcttgacagctagtcaggttcattttacacaaaatatgccagataagtttacactaaattgcacagctaagtttcgttatcgtcaaccagatagtaaagtagatgtcaaggtaaacggtgacaaagcagaagttattttcgatgaacctcaacgtgctatcacacctggtcaagcagttgttttctatgatggagatgaatgtcttggcggtggtcttattgacaatgcctatcaagaagaaaaaatttgtcagtatatc

SEQ ID NO: 36307 - DNA, 444 bp, Streptococcus mutans
atgaacaaaacaacatacatggctaagccaggtgaagttgaacgtaaatggtacattgttgatgcgactgatgtccctcttggacgcctatcagcagttgttgccagcgtacttcgcggtaaaaacaaaccaacattcacacctcatacagacacaggtgactttgttattgttattaatgctgaaaaggttaaattaactggtaaaaaagcagctaataaaatctactacactcactcaatgtatccaggtggattaaagcaaatctctgctggtgaattgcgttctaaaaatgctgtgcgtttgattgaaaaatctgttaaagggatgcttccgcataacactcttggacgtgcacaaggtatgaaattgaaagtctttgttggttctgagcatacacatgctgcacaacaaccagaagtacttgatattacaggacttatc

SEQ ID NO: 36308 - DNA, 390 bp, Streptococcus mutans
atggcacaagcacaatatgcaggaactggtcgccgtaaaaacgctgtcgcacgcgttcgcttggtaccgggtactggtaaaattacagtaaacaaaaaagatgttgaagaatatattccacatgctgaccttcgccttgttatcaaccaaccttttgcagtaacatctactgaaggttcatatgatgttttcgttaacgttgttggtggtggttatgcaggtcaatcaggagcaatccgccacggaattgcacgtgcattgcttgaggttgatccagactttcgcgacgcactcaaacgcgctggtctccttacacgtgatgctcgtatggttgaacgtaaaaaaccaggtcttaagaaagctcgtaaagctagccagttctcaaaacgt

SEQ ID NO: 36309 - DNA, 330 bp, Streptococcus mutans
atggtaaccatcaagcaagggtcaattatcaaaattaacttggatcccaaacaaggacatgaacaaaaagggtatcgtccgtacatttgtctaaaccatagtatcgtaaccaagtattctaatattggtatttttgcgccaattagcaataccaagcgtgattatcctttttatgtttccctagaaggaacagaatccacagggaaagtattattagaccaactggttacaatcgattttaatgctagagattatcgttatgtggaggatattcaggaagacttattagatgaacttttagctagggtcaaggtgctatttgaaaaagga

SEQ ID NO: 36310 - DNA, 1836 bp, Streptococcus mutans
atgtctaaaattattggtattgatttaggtacaacaaactcagcagttgcagttcttgaaggaactgaaagcaaaattatcgctaatcccgaaggaaaccgtacaactccttctgtagtttcatttaaaaatggtgaaatcatcgttggtgatgctgctaaacgtcaagcagtgactaatccagaaacaattctttccatcaaatctaagatggggacttctgaaaaagtttcagctaatggcaaagagtatacgccacaagaaatctcagctatgattctgcaatatttgaaaggttatgcggaagattaccttggtgaaaaagtcgaaaaagccgttattacagttcctgcttactttaacgatgcacaacgtcaagcaactaaagatgctggtaaaatcgctggtcttgaagtagaacgtattgtcaacgaaccaacagctgcagcacttgcttatggccttgacaaaacagataaggatgagaaaattttagtcttcgaccttggtggtggtacttttgacgtatcaatccttgaattaggtgacggtgtctttgacgttttggcaactgctggagataataaacttggtggtgataactttgaccaaaaagtcattgattggttggttgaagaattcaagaaagaaaatggtattgatttatcaactgataagatggctcttcaacgcttgaaagatgctgctgaaaaagctaagaaagatctttcaggtgtaacatcaacacaaatcagtttacctttcattaccgctggtgaagcaggaccccttcatttagaaacgagcctttctcgtgctaagtttgatgatttaacacgcgatctagttgaacgtactaaaactcctgttcgtcaagccctttcagatgctggtttgtcattgtcagaaattgatgaagttatcttagtcggcggttcaacacgtattccagctgttgtagatgctgttaaagctgaaactggcaaagaaccaaataaatcagtgaatccagatgaagttgttgctatgggggctgccattcaaggtggtgttatcactggtgatgtcaaagatgtcgttcttcttgacgtaacgccattgtcacttggtatcgaaacaatgggtggtgtctttactaaactcattgatcgcaatacaacaatcccaacttctaaatcacaagtcttctcaacagctgcagataaccaaccagccgttgatatccatgttctccaaggggaacgcccaatggcagcggacaataaaacacttggccgtttccaattgacagatattccagctgcgcctcgtggtgtgccacaaatcgaagtaacattcgatattgataagaacggtatcgtgtctgttaaggctaaagaccttggaactcaaaaagaacaaacaatcgtcattcaatctaactcaggtcttactgatgaagaaattgataaaatgatgaaagatgctgaagcaaatgctgaagctgatgctaagcgtaaagaagaagttgatcttaagaacgaggttgatcaagctatctttacaaccgaaaaaactatcaaagagactgaaggaaaaggtttcgatactgaacgtgatgccgctcaggccgctcttgatgacttgaagaaagcccaagaatcaggtaaccttgacgatatgaaggctaaacttgaagcacttaatgaaaaagctcaagctcttgccatgaaactttatgaacaagctgctgccgcccaacaagcacaagcaggtcaagagggagctcaatcatctgattctgattcatcagacaagggcggcgacgatgttgtagatggagagtttacggagaaa

SEQ ID NO: 36311 - DNA, 786 bp, Streptococcus mutans
gtgttgttcttagataattgtcatgctataatttttcttatgatacggtataaagcgattatttcctatgatggcactaatttttcgggtttccaaaggcagccgcaggtgagaacagtgcaagaggaaattgaaaagactcttttacgtttgaatagcgggcaggctgttaagatacatggggctggccgaacagatgcgggtgtgcatgcttatggtcaagtcattcattttgatttgccgcagcaaagggatttagaaaaactgcgttttggccttgatacacagacaccagatgatattgatgttattcaggttgaacaagtagcagatgattttcatgctcgttaccaaaagcatcgcaaaacctatgaatttttagtagatttggggagacctaagaatcctttgatgcgccattatgccacccattttccgtataaagtggatttttcagttgttaaagcggctattaaaaaattacgtggaacccatgatttcactggttttacagcgtctggtactagcgtggaaaacaaggttagaacaatcagccgtgctactgttgaaaaagacgacaagactggatttctcatttttacgtttacaggaagtggttttctttacaaacaagtcagaaatatggttggaaccctattaaaaattggcaatggccgcatgccgattgaccaaattgacagaattttagaatctggggaccgcagtctagctggtccgacagctgcaagcaatggactttatcttaaggagattatttatgacgac

SEQ ID NO: 36312 - DNA, 855 bp, Streptococcus mutans
atgaaattgattacttcttattttggccgttttaacttagaaaacctcttatttgaatttgcgtcaaaactattgtcccttctgcttctactcattgtttttattattgctaaaagagttattagttatctttttgaaaaaacaattgcaagatccactgctctagctagatatagccaaggccgacaaaaaaccttgattaagctttttcataatatcatggattatagtctctattttctgttgatatattggattttagctattattggtctgcctgtttcaagccttctagctggtgcaggtattgcaggggtggctattggtcttggtgctcaaggattcctttccgatctggtaaatggctttttcattttgttggaacgtcagtttgatgttggagattccgttaaattaagagcaacaacgggttcaatctctggaacagtctctagtgttggcatccgaaccacacaaattcgtgattttgatggcactctgcatttcgtccccaatcgcaatattaccatcgtcagtaatttgtcacgcggtgatatgcgagcacagatagatattcctatctatgctaatactaatcttagacaagtaactaccattatcaagcaagtcaatgaagacaatatcagtcagtttcctgaaatcgttggtgttcctaatatcttaggagcaacgacctctcccgtcacaggtcaaatcgtttttcgaatagatatttttgttcaaaatagcaagcaaaatcatatttactatactttttatcgcctctatcaagaagcattgctggcaaatcatatttccctgccaacagctaatgccatccctattgctaaaaaa

SEQ ID NO: 36313 - DNA, 792 bp, Streptococcus mutans
atggctaatcttatccttgggcgatatattccaggtgattctttcgttcatcgactggatccgagaagtaaattgttatcaatgcttattttcattattgtcgttttttgggctaataatgttcttacaaatcttttgatgttcgtctttacgatgattctggtctttctatcacgcgtaaaaattagtttttttctaaagggattgagaccgatgattggtttaatcctctttacaacgctttttcaagttctttttacacagaatggccatgttttatttcatttatggattatcaaaataactgattctggtattgggcaggcagctttgatttttatgcgttttgttttaatcattattttttcaacgcttttaactttgacaacaacgccactcagtttagcagatgcagtcgaatcacttttaaaacctttagaacccttaaaagtacctgttcatgaaattggtttaatgctatcattaagtttacgatttgttccaaccctgatggatgatacaacacgaattatgaatgctcaaagagcacgcggtgtcgattttggtgaaggaaatttgatacaaaaaattaaatctatcattcctattttaattccgctttttgcatctagttttaaaagggcagatgctttagcaacagcaatggaagcgcgtggttatcaaggtggtgcaggacgtagcaaataccgtttattaaaatggacttataaagacagcttggctattgttggtatttgtttgcttggttttattttatttttattaaaaaaa

SEQ ID NO: 36314 - DNA, 840 bp, Streptococcus mutans
atgggcattaatctccaagaagtaagttacacttatcaagcgggaacaccttttgaaggtcgtgccctttttaacgttagtttggagattaaagatggcagttttacagcttttattggccatacgggtagtggcaaatcaacaattatgcaattgttaaatggactgaatacaccaactgaaggaacagtccttgttgatgatgttgctattaggtcagactctaaaaataaagatattaaaaatattcgtaaaaaagttggtttagtctttcaatttccagaaagtcaactttttgatgaaacagttttaaaagatgttgcttttggtccacaaaattttggtatttcaaaagaagaagcagaaaaattagcacgggaaaaactagctatggtaggtatttctgaagagctatttgaaaagaatccttttgaattatctggtgggcaaatgcgtcgggtagctattgctggtatattagcaatggagcctagtattctcgttttggatgaaccaactgctggacttgatcctaaaggacggcgtgaactaatgaccttgtttaaggagcttcatcaagggggaatgactattgttttagtcactcatttgatggatgatgtttctaattatgcagattgggtttatgtcttagaaaagggacgaattgttctatctggtagtccaaaatcagtttttcaggaaattgaatttctggaaagtaaacagttgggagttcctaaaattacccaatttgccgctcatttgcgagaaagaggaataacttttgatgctttacctattactttagaggaatttgtggaggcgattaagaatggc

SEQ ID NO: 36315 - DNA, 871 bp, Streptococcus mutans
atgattacttcaaaggagctggctttctttttaaggatacttttaaataaaaaatgacagataaaataattgagttaaaaaatgttacttttcgctatgatgaaaatcaggaaaaaccaaccttaaataatatttcgtttcacgtgaaacatggagaatggttatcaattattggccataatggtagtggtaaatcaacaacagtacgcttaattgacggactcttagaagctgaatcaggacaaattttgatagaaggtcacaaactatcagaggacaatgtttgggatattcgccataaaattagtatggtttttcaaaatcctgacaatcaatttgttggggcaactgtagaagatgatattgcttttggtcttgaaaataaaggaattcctttaaaagagatgagagaacgcgttgtagaagccttgaatcttgttgatatgtctgatttcaaaacacgagaaccagctagattatcagggggtcaaaagcaaagggtggctattgcgggtgcagtggctatgcgtcccagcattatcattttagatgaggccactagtatgttagatccagaaggtcgtttagagttaattggaacgattcaaaaaattcgtgaacaatatggtatgacagtcatttcaattacacatgatttggatgaggtaacacttagtgatcgtgttttggtgatgaaaaacggacaaattgaatctagctcaagtccaagagagctcttttcgcgaggagatgaacttttagatctagggttagacatcccttttacctcaactattataaaggcattgcgacaaattggctttacatttgataatcgttatttactagaaaaggaactggaagataagtt

SEQ ID NO: 36316 - DNA, 540 bp, Streptococcus mutans
atggctaagaaggaaaatatccctaatttattaacgttaatcagaattttattaattccagtcttcttgcttttaacttctgtgactagtagtgtcacttggcatattattgcagccattatttttgctgtggcaagtttaactgactatttggatggttacttagcacgtaagtggaaagttgttactaattttggtaaattcgcagatccgcttgctgataaaatgttagtcatgagtgcttttatcatacttgttggtcttaacttagcgccagcttggatttctgctatcattatttgtcgtgaattagctgtaacaggattacgtttacttttagttgaaacaggtggtgaagttttggctgctgctatgccaggaaaaattaaaacagctactcaaatgttttcaattatcttattgctttgccattttgaatttgtaggaactattctgctttacatagctctcttctttacgctttattcaggttatgattacttcaaaggagctggctttctttttaaggatacttttaaa

SEQ ID NO: 36317 - DNA, 1290 bp, Streptococcus mutans
ttggcagcaacaagattaaagagacgaaaatttccaactattaatgaggaattttactataatcaactagaaaatggtatgactgtttttttgatacctaaagaatcatttaaggaaacacttgctgtaatgagcagtcgctttggatcaattgacacaaactttacagttaatggtaaaaagaaatcttatttagcaggtattgctcaccttttagaacatcagttatttgaaatgaataaacaaaaagatgctgcttatgaatttacaaaattaggtgcagaaagcaatgcttacacaacttttgataaaacaatttattacttttcaacagctgataatatcaagaaaaatttagatttattacaggagtttaccagtcaaataaactttacagatatgtcaattgaaaaagaaaaaaaaatcataactcaagaatttaatatgtatcaagatgattctgatgattatctttaccaagttattttatctaaactttatcctcaaacctctttagcagaagatattactgggaatagagatagtattgataaattaacaaaaaataacttagaggaaaattttcattatttttatcaacctgaaaatttaactcttttagtggcaggagattttgatgttaaaagggtttataaagatattgttactactcaaaggcagttaccagacaggcccaaatttgaaatcaaacgttctcctttaaagttactaccaataactccaacgagttcaatgcaaatggatatttctatttcaaagttagcagtaggctttcgctttaattttattaagaaaaaacggaaatctttgataaaggaaagattacttttaaagctcttttttttacttttgtttggttggacatcagagcactatcagcaatggtatgaagatagaaaaattgatgattcttttgaattaaaaattgaagtgtcaacttcttatcaatttgttgtcattttgcttgacactaaagagccaatagcaatgtctaacaagattgggcaaacaattaagaagtttaagacagataccaatctttctgcctcacatttacaaacagtaaaaaaagagctatatggtgattttattcggagtttagattcacttgaggctctttctagtcaatttatagataatttatggggagaagaaacttattttgattttcctactgttttgcaaaatatagaaataaaagatgtattggaatttggagaaaaaataacaaaggaaatgcagctaaccgattttacattatttccaaaa

SEQ ID NO: 36318 - DNA, 975 bp, Streptococcus mutans
atgacaaagcttaatagctcatttatgattgacaatgtggaaattcctcatcgcaccgtcttagcaccaatggcaggagtgacgaattccgcttttcgaactatcgctaaagaatttggagctggacttgtcgtgatggaaatggtatccgataaaggcatccaatacaataatgaaaaaacgctccacatgcttcatattgatgaaggagaacatcctgtttctattcagctttttggcagtgatggtgatagtctagcacgcgcagctgaatttattcaagctaatacaaagactgaccttgtggatatcaatatgggctgcccagttaataaaattgtaaaaaatgaagctggtgcgatgtggctcaaagatcctgaaaaaatctactccgtcatttcaagtgttaagtctgttttgaacattcctttaaccgtaaaaatgcgtactggctggtctgatgcctccctagctgttgaaaatgccttggctgcagaatcagctggtgttgctgctcttgccatgcacggtcgtacccgagagcaaatgtatactggctcatgcgaccatgaaaccctcgctaaagtcgctaaagccattacaaaagttccttttattgccaatggggatattcgtagcgttgaggacgctcaatttatgattgaccaagttggcgcagatgctgtgatgattggtcgagccgccagaagcaatccttatattttcactcaaatcaatcattattttgaaacaggagaaattttagataatctgccattcgctaaaatgttagaaattgcccaagatcatcttcgacgtttggtagatcttaagggagaaaaaatcgctgttcgtgaatttcgtggcctagcaccttattaccttcgcggtacatcaggtgctgccaaaattcgctcagctgtctcacgagctgaaaccattttggaagtcgagaacattttcgctcaaatccat

SEQ ID NO: 36319 - DNA, 870 bp, Streptococcus mutans
atggataaacttattaagtcaatagcaaaatcgggatctttccgtgcttatgtactcgatagcactgaaacggtcagaactgctcaagaagaacatcaatccctctcaagttcaactgtcgctctaggacgtacactcattgccaatcaaattctagcagctaatcaaaagggagacagcaaggttactgtcaaagttatcggtgactcttcttttggtcatattatttcggttgctgataccaaaggaaatgtaaaaggctacattcaaaatgccggcgttgatgtcaaaaaaacagctagcggtgaagttatcgtaggaccttttatgggaaatggacagtttgtggtcatcactgactatggaactggcaacccttatacttcatcaacgccacttgtttcaggtgaaatcggtgaagatttggcttactatctaactgaaagtgaacaaacaccatctgctgttgggctcaatgtgctcttagatgaaaaggataaggtcaaagtagccggtggctttatgctacaagtccttccagaggcttctgaggaagaaattactcgttatgaaaaacgcattcaggaaatgcctgctatttcaactctgctagagtcagaggatcacatcgaagctctcttgaaagctatctatggtgaagaggactataaagttttagtcgaggaagacttacagtttacctgtgattgctcacgtcagcgttttgaagcagctcttatgacactgagcaaatctgatcttaaagaaatgaaagaagaagaccacggagcagaaattgtctgccaattttgtggtaaaaaataccaatttaaggaaagtgatttagaggagatgattaatgacaaagct

SEQ ID NO: 36320 - DNA, 1608 bp, Streptococcus mutans
atgacaaaatatatttttgtaacaggtggtgtcgtttcgtcaattggtaagggaattgttgctgcaagtcttggacgtcttttgaaaaatcgtgggcttaaagtaaccattcaaaaatttgatccgtatattaatattgatcctggaacaatgagtccttatcagcatggtgaagtttatgtgactgatgatggtgctgaaactgaccttgaccttggacattacgaacgtttcattgatattaatctgaataaatattcaaatgttacaacaggaaagatatatagcgaggttctgcgtaaagaacgtaaaggtgaatatcttggagcaactgttcaagttattccccatattacagatgctctaaaagaaaaaattaaacgtgcagctacaacaacagactcagatgttattatcactgaagttggtggtacggttggtgatattgaaagcttgcccttccttgaagcccttcgtcaaatgaaagctgatgtgggtgctgataatgtcatgtatattcatacgactttgcttccttatcttaaagctgcaggagaaatgaaaacaaaaccaacccaacactctgttaaagagctgcgtggtttgggaattcaacctaatatgcttgttattcggacagaacagccagccggacaaggtattaaaaataaattagctcaattctgtgatgttgctccagaagctgttattgaatcacttgatgtggatcatctttatcaaattccgttaaatcttcaagcacaaaatatggatcagattgtttgtgatcacttaaaactggatgtgcctgttgccgatatgaccgaatggtcagcaatggttgataaggttatgaatctcaagaaaaagactaagattgctctagttgggaaatatgtagaattgccagatgcttatttatcagtcgttgaagctcttaagcattcgggctatgttaatgatacagccattgatctcaattggattaatgctaatgaggtcactcctgaaacggttactgatttgctgggagatgctgatggtattattgttccgggtggatttggccatcgtggaacagaagggaaaatagaagctattcgttatgcgcgtgaaaacgatgtgcctatgctaggaatctgtcttggcatgcaattgacttgtgttgaatatgctcgtcatgtccttaaccttgaaggagctaattctgcggaattggatccagataccaaatatccagttattgatattatgcgcgatcagattgatattgaggatatgggaggaacgcttcgccttggcctttatccatgtaaattgaaatcaggcagcaaaacagcatcagcttatagcaatcaagaggtcgtacagcgccgtcaccgtcatcgttatgaatttaataatgcctttcgtcagcaatttgaggaggctggtttcgtattttcaggagtatcaccagataatcgcttggtagaagtggtggaattgtcagataaaaaattttttgttgcagctcaatatcatccagaattacagtctcgtccgaatcgtccggaagaactttatacagcttttattactgcagcggttgaaaacagtcaggcacat

SEQ ID NO: 36321 - DNA, 879 bp, Streptococcus mutans
atggcaatcgtttcagcagaaaaatttgtccaagcagctcgtgataatggttatgctgtcggtggatttaacactaacaaccttgaatggactcaagctatcttgcgtgcagcagaagctaaaaaagctcctgttctcattcaaacttctatgggtgctgccaaatatatgggtggttataaactttgtaaagttcttatcgaaactcttgtagaatcaatgggaatcactgtaccagttgctatccaccttgaccatggtcattatgaagatgctcttgaatgtatcgaagttggctatacttcaattatgtttgatggttctcatcttccagttgaagaaaaccttgaaaaagctaaagaagttgttgcaaaagcacatgctaaaggtatttcagtagaagctgaagttggtactatcggtggtgaagaagatggtatcatcggccgcggtgaattggcaccaattgatgacgctaaagcaatggtcgaaaccggtattgatttcttggcagctggtattggtaatattcacggtccgtacccagcaaattgggaaggtcttgaccttgatcacttgaaaaaattgacagaggctgttccaggtttcccaattgtacttcacggtggttcaggtattcctgatgaccaaatccgcgcagcaattaaacttggtgttgccaaagttaacgttaatactgaatgtcaaatcgcatttgctaatgctacacgtaaatttgctgctgaatacgaagcaaatgaagcagaatacgacaagaaaaaactctttgacccacgtaaattcttgaaaccaggttttgaagctattacagaagcggttgaagaacgtattgatgtctttggttcagaaggtaaagct

SEQ ID NO: 36322 - DNA, 1020 bp, Streptococcus mutans
atgtcaaaacctattattttaacaggagatcgaccaacaggaaaattacatttgggtcattatgttggtagtcttaaaaatcgtgtccttttacaaaatgaaaataaatatgaaatgtttgtttttttagcagatcaacaagctctcacagatcatgctaaagaatcagaaattattaaagattctattgcaaatgttgctcttgattatttgtcagtaggtcttgaccctgaaaaggtcactatttttatccaaagtcaaattccggaattagctgaattgaccatgtattatatgaatttagtatcattggctcgtttggaacgcaatccaactgttaaaactgaaattgctcaaaaaggatttggcgaatctattccaacaggatttttagtttatcctatttctcaagcggctgatattacagcttttaaagcaaattatgtacctgttggcaatgaccaaaaacccatgattgaacaaacgcgtgaaattgtgcgtagctttaatcatacttataaaacaaattgtttagtagaaccagaaggtatttatcctaaaaatgaggcagctggtcgtttaccaggtttagatggtaatgcaaagatgtcgaaatcacttggtaatggtatttttctttctgatgacgctgataccgttcgtaagaaagtgatgagcatgtacacagatccaaatcatattcgtgttgaagatccaggccaaattgaaggaaatatggtttttcactatcttgatatttttggacgtaaagaagaccaaacggatattgcagctatgaaagaacattatcaaagtggtggacttggagatgttaagaccaaacattatcttttagatattcttgaacgagaattaacaccaatacgtagacgccgtctggagtatgaaaaaaatatggatcaagttttagatattttaaaaaaaggtagtgaaacagcacgtgaaacagcttcagaaaccttaagtggagttaaaagggctatgggaattaattatttt

SEQ ID NO: 36323 - DNA, 1617 bp, Streptococcus mutans
ttgctaactgtatcagatatttcgctgcgtttcagtgatcgtaaactttttgataatgtcaatattaaatttacagcgggaaatacttatgggttgattggtgctaatggtgctggaaaatcaactttcttaaaaatcctatcaggtgatattgaacctaccacaggccatgtttctcttggtccagaggaacgcttatctattttacgtcaaaatcattttgattacgaagaagaacgcgctattgatgttgttattatgggcaatcaagatctctataacatcatgaaagaaaaagatgctatctatatgaaacctgatttttcagatgaggatggtgttcgcgccgctgaacttgaaggtcagtttgtggaattaaatggctgggaagctgaaagtgaagcttctcagctcttgcaaaatttgaatattcctgaagaacttcactatcaaaacatgagtgagctcactaacggtgataaagttaaagtgttacttgctaaagcactttttggtaaaccagatgttcttttactagatgaacctaccaatggtttagatatccaatctatcaattggttagaggatttcttaatagactttgaaaatactgttattgtagtctctcacgaccgccattttctcaataaagtctgcactcatatggctgatctagattttggaaaaattaaactctatgtgggtaattatgatttttggaaagaatcttctgaactagcagcaaaacttcaagctgaccgtaatgctaaagcagaagaaaaaatcaaagaattacaagaatttgttgcccgcttttcagccaatgcttctaaatcaaaacaagcaacttctcgtaaaaaaatgcttgataaaattgagttagaagaaattgtaccttcaagccgtaagtatccctttattaagtttcaagcggaacgtgaaattggaaatgatcttttatcagtagaaaacctttcagttaaaattgatggtgaaagcattcttgacaatatcagttttactttaaatcctggagataaaactgctattattgcccaaaatgatattcagtcaacagctcttattcgtgcacttatgggagatattgactatgaaggtaccattaaatggggtgttacaacaagtcaatcctatcttcctaaagacaatacaaatgattttgcgagtggagaatctattcttgaatggatccgtcagtttgcaaacaaagaagatgatgataatacttttcttcgtgggttcttgggtcgtatgcttttttctggtgatgaagttaacaagtctgtcagtgtcctatcaggtggcgaaaaagtgcgtgtgatgttagctaaacttatgctcctcaagtccaatgtactggtactcgacgatccaactaatcacttagacttagagtctatctcaagcttaaatgatgggcttaaagatttcaaagaatctattatttttgctagccatgatcatgaatttatccaaacattagcaaatcatattttggttatctctaaaaatggtgtcattgatcgtattgatgagacttatgatgaatttcttgaaaatgaagaagttcaggctaaagtagcacaactctggcaa

SEQ ID NO: 36324 - DNA, 477 bp, Streptococcus mutans
atgaaagtcaaattaatcacagttggtaaattaaaggaaaaatatctgaaagatgggattgctgaatattgtaaacgtctaaagcgttttactaaatttgaactggaagaattacccgatgagaaaattccaaataatgctagtcaagctcaaaatacttatattcttgaaaaagagggtcagcgaattcttaataagatttctaatcgtgagtttgttattgttttagcaatagaagggaagcaattttcttctgagaaatttagccaacttttatctgctacaatgttgaagggatattctgatttgaccttcgttattggagggagtttaggattatcacaggaagttaaaaaaagagcttctatattaatgagctttgggttattaactcttcctcatcagttaatgcgtcttgtttttgtagaacaaatttatcgagcctttatgattcaagagggaagtccttaccataaa

SEQ ID NO: 36325 - DNA, 1206 bp, Streptococcus mutans
gtgaataatacgaaatctcacccttttttaaaatggtttataccttttttagttatttttttaacttttattttaggggtcatatcaacacttacctttaattggataactggtaacaaatcgttttctaacaatggaaaaacaactgttagtaatgtcatttatgataccaaatctaacactaccaaggctgttaaaaatgtcaaaaatacagttgtatctgtcatcaattatcaaaaaacagataatagttattacaattatgacagcggttctcaagaaaaaaataaatcagaggatggtctaggagtctacggtgaaggttctggtgttatctataaaaaagatggcgatagtgcttatttagttacaaacaatcatgtcgttaaagatgcagaaaagttagaaatcatgatggctaatggtaaaaaagttgtcggtaaattagtaggttctgatacttattctgatctggctgttattaaaatttcttctaagtatgttacgacagttgctgaatttgctaattcggataaaataaaagttggagaaccagcaatcgctattggtagccctttaggcagtgattatgctaattctgtaacagaaggaattgtttcaagtctcagtcgtacagtaacttcacaaaatgaaaatggcgaaacaatttcaactaatgctattcaaacagacgcagctattaaccctggtaattctggtggcgctttaattaatatcaaaggacaagttattggtatcaattcaagtaaaattgcatcaagtaataactcaaatagtggcgttgctgttgaaggaatgggctttgcaattccttcaaacgatgttgtctctattattaatcaattagaagaaaatggtgaagttgttagacccgctcttggtatttcaatggctaatcttagtgaagcttcaacaagtggaagagatactttaaaaataccaagtgatgtcacaagcggtattgttgttctttcaacacaaagtggtatgccagcagatgggaagctgaagaaatatgatgtcattacagaaattgatgggaagaaggtagcgtctatcagcgatcttcaaagtattctttacaaacacaaaaagggagataaaattaaactcactttctatcgcgaaaaagataaacaaacagttgagatccaattaactaaaacaagtcaagatttgaatcat

SEQ ID NO: 36326 - DNA, 2900 bp, Streptococcus mutans
accttccaggagattatcctcacgttacagcaatactggaatgatcagggttgtatgttgatgcaggcttatgataatgaaaaaggtgcaggtaccatgagtccctacactttcttacgtgctattggacctgagccttggaatgcggcttatgttgagccttctcgtcgtcctgccgatggtcgttatggtgaaaatcctaatcgtctgtatcagcaccatcaattccaagtagttatgaagccatcaccaagtaacattcaagaactttatttgcaatcacttgaattacttggtattaatgccttagaacatgatattcgttttgttgaggataattgggagaatccttcaactggttcagctggacttggttgggaagtttggcttgacggtatggaaattacccagttcacttatttccaacaagtaggaggattagcaacacaacctgtaaccgctgaggtaacctatggtttagaacgtctagcttcttatattcaagaagttgattctgtctatgatattgaatgggcacctggcgttaaatatggtgaaattttcagacagccagaatatgagcattctaaatattcttttgaaatttccaaccaagagatgctgttggagaattttgaaaaatttgaagcagaagctaaacgctgcttggagggaagcttagtgcatccagcttatgactatatcctaaaatgttcacatacgttcaatctgcttgatgcccgtggagctgtttcggtaacagaacgtgctggttacattgcacggattcgcaatttagcgcgtgtggctgccaagacctttgtagccgaacgtagacgtcttggttatccactgttagatgaaatgacacgagaaaaacttttggcagaggaggaagcataatcatgacaaagaatttattagtcgaacttggtcttgaagaaatgccggcttatgttgtaaagccgagtatcaaacagttacgtcaaaaaatgggacagtttttggagaccaatcgtctttcctttgaaaaaatagaaatgttttcaactcctcgtcgtttagctattcgtgttgttcatttggctgatcagcaaagtgattattctgaagactttaaggggccggctaagaaaattgctctggatgctgatggtcattttactaaagcagcccaaggatttgttcgcggtaaaggattgacaacagatgccattgaatttcgtgaggtcaagggcgaagaatatgtttatgtcactaaaaatgaagcaggcaaaccagctaaagaagttttaggtggtcttattgatgtattgcagtctctgactttccctgttaatatgcattgggctaatcatacttttgaatatattcgtcctgttcatacacttgttgttcttttggatgatgaagctcttgatcttaattttcttgatattaaatctgggcgtatcagcagaggccatcgttttcttggtcaggaaacacaaattgctagcgctgcctcttatgaaactgatttgcgagcagaatttgtcattgctgacgctaaagaacgtgaagacatgattattgagcaaattagagaaattgaaaaaacctataatgtttctgtcgaaattgatgaagcattgctcagcgaagtgctgaatttggttgaatatccaacagcttttatggggagttttgatgagaaatatttggaattgccagaagaagttttggtaacgtcaatgaaaacgcaccaacgttattttgttgttcgtgatcaaactggtaaattattgcctaatttcatttcagttcgtaatggtaatgaacaattcattgaaaatgtcgttaaaggaaatgaaaaagttttattagcacgcttagaagatggagaatttttctggcgtgaagaccaaagattgcagattgcagatctagttgaaaaattaaaattggttactttccatgaaaaaattggttctttatatgaacatatgatgcgaaccaagcagattgcggcttatctagcagaacaggcagatttgacggatcaagaaaaagcagaaatagagcgtgcagctagcatctataagtttgaccttttgactggtatggtaggtgaatttgatgaattacaaggtatcatgggagaaaaatatgctactttagcaggtgagagtcaggcggttgcaactgctgttcgtgaacattatttgccaatcagcagtgacggtcagctgcctgacagcaaggtaggcgctattttagccgttgctgacaaacttgataccctattgtccttcttctcagtcggtcttattccaagtggttccaacgatccctatgctcttcgtcgtgcgacccaaggaattgttcgtattttagataaattcggttgggaaattcctttggatcgtttagttgccaatctttatcaatttgactttgacagtttgacttatcaaaatcaggcagatgttctggcatttattcgtggtcgtgttgaaaaaatgattgataagtctgtaccaaaagatattagagaagcagttcttgacagttcaacacatattgttcgtctggaggttgaagcagcagcagccttggctgaaaaagctgacgaggatcattttaaagcttctattgaaagtttatcgcgagtctttaatttagcagagaagtctaatcataatgaaatggtggacaccagtatttttgaaaatgaatatgaacaagagctcttcgatgctgttgaagaattgcattttacagaagatatgactgacaatgttgaccgtctttttgtcttaagtccgattattgatgctttctttgataatacaatggttatggtggatgacgaggctgtgaaaaagaatcgtttaaacttactggatcgtctggcacag

SEQ ID NO: 36327 - DNA, 1248 bp, Streptococcus mutans
atggcaattattgataatttaggacaaaatgcaaaaaaggctagttttttacttgctcaattaggtacggaagcgaaaaatactgctttgcttaaagtggcggaagctttgttggcagaattaccttatattttagaagaaaatgctaaagatgtcgccttggctcaagaacatggtattagcgctatcatggtagatcgtttacgtttggatgagaaacgtctgcaagatattgcttcaggtgttcgtgatgtggctgctttaggtgatcccattggacaggttgttcgtggttatacgaatatggttgggctgaaaatcattcaaaaacgtgtgcctttaggtgtcattgctatgatttttgaaagccgtcccaatgtatctgttgatgctttcagcttggcctttaagacaggaaatgctatcattttacgcggaggccgtgacgctatttgttccaatacggctctggtcaatgtgattcgtcggacactcgctagctttggacttgatgaaaatgcagttcaattagttgaagataccagccatgaagttgccaaagagttgatggctgcggtggactacgtagatgttctcataccgcgcggcggtgcccgtctgattcagaccgtaaaaaaggaagccaaggtacccgttattgaaacaggtgttggcaatgtccatatctatgttgatgagtttgctgaccttgacatggctagcaagattgttgttaatgccaaaacgcagcgacctagtgtctgtaatgcagctgaggggttacttgtccatgaaaaagttgcttcggatttcttaccaaaattagaagcggctattaatcaaatacatccagttgaattccgagctgatgatagggcacaaaagattttgaaaaacgctcaacctgccagtcaggaagattacgcgacagaatttttagactatatcatatctgttaagattgttaatagtcttggtgaagcgattgactggattaatacctataccagtcatcattcagaatccattataacaagagatattcaggcagccgaacgctttcaagatgaagtagatgcggcagcagtttatgtgaatgcttccacacgttttacagatggttttgtctttggtttgggagcagaaattggtatatcaactcaaaaattacatgcccgtgggccaatgggtttagaagctctaaccagtactaaattttacattaatggtaaaggacagattagagaa

SEQ ID NO: 36328 - DNA, 948 bp, Streptococcus mutans
atgactaatgattttcatcatatcactgtgctcttgcatgaaacaatcgatatgcttgacatcaagccagatggcatctatgttgatgcaacgcttggtggtgcaggacatagtgagtgtttgctttcaaaacttggtaaagaaggtcatctttattgttttgatcaggatcaaaaagccattgataatgctaaaatacgtttgcaacaatatgttaagactggtcaagtcagctttatcaaagataattttcgacatctaaaaagccgcttggctgatgagggaatctacgaaattgatggtatttgctacgacttaggagtatcaagtcctcaattagatgaacgcgaacgcggtttttcttataagaaggatgcaccgcttgatatgcggatgaatcaagatgcacagttgacagcttttgatgtggtcaatacttatgattatcgtgatttagtacgccttttctttaagtatggcgaggataaattttccaagcaaattgcaagaaagatcgaaagtgccagaaaagagaaactgattgagacaacggcagagttagctgagattattaaatctgctaaacctgctaaagaactaaagaagaagggtcacccagccaagcaaatttttcaggctatccgcattgaagttaatgatgaattaggtgcagcagaggaatctttaacacaagccctagatttgctggctttaaatggacgaatagctgtcattacttttcattccttagaagaccgtctcacgaaacaactgtttaaagaagtgaccactcttgatgttcctaagggcctcccttttgttccagagaacttacaaccgaaattctctttggtaaatcgcaaacccatcttacccaatgctagagaattatcagaaaataatcgggcacattcggctaaattacgggtcattcaaaaaattcgaaat

SEQ ID NO: 36329 - DNA, 321 bp, Streptococcus mutans
atgacaaatgaaaaacggagcgaagctctctctcaagctttacaaaaaagaatcaaaacctttaccagattggaaaaggctttttatggtgcgattattattactgctatcacactggctgttagtattatttatttacaaagtcgcagcctacaaattcagcaggaaatcagccatttaaacagccaaatcaatgacagagagactgaatataataatgctaaacaggaagttaatgaactgagccgctatgatcgtattgcggaaattgctcaaaaagcaggtcttactgtgcaaaaagataatattaagaaggtggac

SEQ ID NO: 36330 - DNA, 930 bp, Streptococcus mutans
atgggaatttatacttgtaccatgaatttagccattgatttatttattgagacagaacacctgtatgagtctaaggttaatcgtgctttatcagatgatattcaggcaaatgggaagggcgttaatgtgtcttttattatgaaaagacttgggcttgagaacactgctcttggtttttcgggaggttttacaggaaaatatgtcgcagacaatttagaagctgaagggatagctgccccttttgttgaagtagaaggactgacacgaattaatgtctttactaaagtaaatgctacctgtcaggaatttaaattagtcaatcagggacctttggtcaatgaagctgctcaatgcaggctattacagcaaatttctaaatttaaaaaaggagattatcttgttgtatctggcagcctacccagaggtgttccatcgcaaatcctatatgatattgctaaattatgttacgaaaagggtgttaatcttatttttgatgtgagtgattgtatcattatggatagtttgtcatttcatccttttttgttgaaaccaaatgaggaggaattagctacttggtttggcaaaaatcaattggaagaggaacaattgatttcttatgctaagcaattaattgtcaagggagcacgtcatgttcttttgtccttaggacaagatggagctatttttattgattctcactttaatgtctatcaggctaatgctcctagaggaaaggtggtgaacacagcctgtgcaggggatactttattggggacctttttggcaggattcatcagacaggaatctttagaaagggtattagcaaaaagtgtagctgctggttcttcaacggcttttagaagtggtatcacagactttagtgatgtcaatgaattaaaagaacaaattatggtcaaaaaaataaaggag

SEQ ID NO: 36331 - DNA, 1398 bp, Streptococcus mutans
atgtcagaatttaaacttattgcagcaactggctgtcctactggtattgcccatacgtttatggcacaagaagctctagaacaggctgccaaggaaaaaggtgtttctattaaggttgaaacccatggacaagtaggagtagagaatgaattgactcctgcagaaatagcaggcgccaaagctgttattattgcagccgacaaggatgttcaagcagaacgttttgctggaaaaagagttattgaagtttctgttgctgatgggattaaaaaagcagaccaattaatagcagatgctttagctggcaaaggacaaattaagggcggcactaaaatagaaagtgcagagctttcttcagatactgagggagaaagttttggacggcaagtttatagacatttaatgaatggtgtttcccatatgttaccgtttgttgttgctggtggtgttttggtagccatttctttcttatttggtatctattcttttgatcctaaaagcgaacaatataattggtttgcagcactgctgaaaacagatattggtggtgttgcgatgggcgttatgactcctattctagcggcttatattgcagagtctattgcaaaacgccccggctttgttgctggttttgttggcggcatgatggcggtgaatggcggctcaggcttcttaggtggtattatcgctggttttgctgcaggttacattgtattaggtctcatgaaactgtttgaaaaattaccaaaatcattggatggcttaaaggcaatctttttgtatcctgtatttggtgtctttttgacaggaatggttatggctgttgttaattcacctatggcttgggttaataagagtttaatggcatggctaggtgcttttgaaaatgctaatccattggttcttggtgttattgttggctgcatgtgtgcatttgacatgggtggtcctgttaataaagcggcttatgttacgggtacggccctacttgcacaaggaaatacaacctttatggctggtgtatcagcagcatgcattgcacctccactcattacttttgttgcgaccactgcttttagaaaatattatgatgaaaatgatcgtaatgctggtttggcaaatcttattttaggttccactcatattaccgaaggggcgattcctttcgcggctaaagatccgcttcgcatgttaccaaccttcatgctgggctcatctattgctgctatcttaacctatatgtggaaagttaaggtcccagcgcctcatggtggctttctagttctaccagttgttacccatgccttcctttgggttcttgctattgcaatcggtgccatagtagctggtattattatgggattcattcaaaaatcaaaatatgaaaaagcaagaggt

SEQ ID NO: 36332 - DNA, 987 bp, Streptococcus mutans
atgattttatcacagcaaaaatataattatttagcaaaagtcagtgattcaaatggcgttatttcagctctagcctttgatcaacgcggtgccttgaaatgtttgatggcacaatatcagatgaaggagccgacagttgctcaaatggaagaactgaaagtgctggtgtcagaagaattaacaccctatgcttcatctattctccttgatcctgaatatggcttgccagctgcacaagcgcgtgatagggaagcaggactcttgttagcttacgaaaaaacgggttatgatgcgaacacaaccagtcgtttgccagattgtttagtggactggtctattaagcggctgaaagaagcgggtgctgacgctgttaaattcttgctctattatgatgttgatggagatccacaagttaatgtgcaaaaacaagcttacattgagcgtattggctctgaatgtcaagctgaagatattccgtttttccttgaaattctcacttacgacgaaacaatctcaaataattcaagtgttgaatttgctaaagtaaaggtgcataaggtcaatgatgctatgaaagttttttcagctgagcgttttggtatagatgttcttaaggttgaagtgcctgttaatatggtatatgttgaagggtttgctgaaggcgaagtagtgtatagtaaagaagaagcagcacaagcctttcgtgaacaggaggcctcaacagatttaccttacatttacttaagcgctggtgttagtgcagagctttttcaagaaacgcttgtttttgcgcataaggcaggtgctaagtttaatggtgtcctttgtggacgtgccacatgggcagggtctgttcaggtttatatggaagaaggaaaggaagcagcacgtcaatggttgcgtacgagtggcttgcaaaatatcaatgaacttaacaaggttttaaaaacaactgcatcaccttggacagaaaaagtgtcagttggt

SEQ ID NO: 36333 - DNA, 840 bp, Streptococcus mutans
atgaaacaactatcaaaaaataaaatatttggtggctggcatgagcgctacagccattcgtcaaagacaacgaatactgagatgacctttgccatttatctgccgcctcaggcagcagataggagggtccctgttctttatttcctatctggtttgacttgcacagatgaaaacttttcaaccaaagctggtgctcagcagtatgctgccaaatatggcttggccttagtcataccagatacgtcacctaggggtaagaatgtgcctgatgatgaagcttatgacttaggacaaggagctggtttttatctcaacgcaactcagaatccttggtcgcaacattaccacatgtatgactatattgtagaagaattgccagagttgattgaagcgaatttccctgtaacgaatcaacgatctatttttggacatagtatgggcggtcatggcgctttacaaatcggtttaaaaaatccagattgttatgctgccatctctgcttttgcacctattgtcaatccgagcaatgtcccttgggggaaaaaagctttctctgcttatcttggcaaggacgagaagacttgggcagcctatgacagcagcaaacttgtatcacaggtgaaaaaagcacgaccaattctgattgatcaagggttagcagataacttttatccagaacaactacagccagaagtttttgttcaggctgctgagtcaaacgggattgaggtgcttctagatctgcatgaaggctatgatcacagttattattttattgccagttttgtcgaaaaacatatcgcttttcatgcttactatttgggattaaggaaagaacca

SEQ ID NO: 36334 - DNA, 1116 bp, Streptococcus mutans
atgaatactatcaaaacacgagcagcagttgcttgggcacccaatgaacccttgaaaattgaagagttggacctgatgatgccacaaaagggagaggttatggtgcatattacagcgacaggagtctgtcataccgatgcctataccctatcaggaaaagatgcagaaggggttttcccttgcgttttgggacatgaaggtgctggtatcgttgaagcagtgggcgaaggcgtaacagagtttcaggtcggtgatcatgtgatcccgctttatacagccgaatgcggtaaatgtgagttctgcctttcaggaaagaccaacctatgctcagccgttcgtgagacacaaggccgcggtgtcatgcctgacgggacagttcgtttctttaaggatggtcaacctatttatcattatatgggaacctcaacatttgcagaacatactgttgtttcagagtattctttggttaaaatacaggacaatgcgccgcttgaagaagtctgtttgctgggctgcggtgtaacaactggcatgggggctgttttgaatacagctaaagtcgaagagggagcaactgtggccatttttggtctaggcggtatcggactagctgctattattggtgctcgtatggctaaagcctctcgaatcattgctattgatattaatcccgataagtttgacaaggctagaaaattgggagctaccgatttagtcaatcccaataatcatgctaaaccaattcaggaagtcattattgacataaccaacggcggtgttgattattcctttgaatgtatcggaaacgtagaagtcatgcgggctgccttggaatgctgccacaagggttggggagagagtactatcatcggtgtagcaccagctggtgctgaaattcatactcgtccatttcaattggttacaggtcgtgtctggcgtggttcagctttcggtggtgttaaaggcaaaacacagctgccgggaattgttggacaatatatggctggcgagtttgcattgagtgattttattacccataccatgcctctagagcagattaacgatgcctttgacttgatgcatgaaggcaaatctattcgcacagtcattcattac

SEQ ID NO: 36335 - DNA, 2247 bp, Streptococcus mutans
atgaaaaattttaaaaagaaatttttggactatgttgtgggcgaccgcagagtacctagagaaaaccgtgaacgtgttggacaaaatttaatgattttgtctgtctttatcttttgtgttttcattgttaactttattattattattggaacggatcggaaatttggtgttaatttatctaaaggggcgtcctctgtttatcaaaccgttcaaaaagttcaggctaaacgcgggactatttatgatcgtaatggaaatcccatcgcagaagattcaaccacttataatatttatgctgttattgacaaatcttatgtgtcgacttccggcgaaaaattatatgttcagccttcacaatatgataaagtagctgatattcttaaccagcatttaggcatggaaaaagattatgttactgctcagttaaaacaaaagaagctaacgcaagtatcttttggatctaaaggttcaaatattacttatggaacaatgacagatgtcaccaaagcacttaaagatgcaaaaattaagggagtcgcttttacaacaagtcccggacgtatgtatcctaatgggaccttcgcttcacaatttattggtctagctcagattaaagaaaataaagatggtagtaagagcttagtaggtgcaacaggcatggaagcttctcttgataaaattttatctggaaaagacggacaagtgacctaccaaaaagataaaaatggaaacacacttctaggtgctgccacaactgtaaaaaaagctcaagatggcaaagatgtttatacaacattgtctgctcctattcagacttatttggaaacgcagatggatgctttccaaagtaaggctaagggtgctcaggcgagtgctactctggtcaatgccaaaacaggcgaaatattggcaacttcacaaagaccaagctttaattccgatacaaaggaaggtttggattctaaagatttttcttggcaaaatgctctttatcaaaccaattatgaaccgggttcaacaatgaaagtcatgttactcgctgctgctattgatgaaggggtcttcaatcctaacgaaacttataataatgccagtctgtctattgctgacgctaccatcaaagattggtcagttaatgaaggtatttcgcaaggaggctatctttctttcgctcaaggctttgcttattctagtaatgtaggaatgacgctgctagaacaaaaaatgggtaatgataattggcttaattatctcaataaatatcgttttggcttaccaacacgttttggaatgggcagtgaagcctcaggcctccttccatctgataatatggtaacgattgctatgagtgcctttggtcaaggtattggagtgacacagacacagatgctcagagcctttacttctgtctctaatgatggtgttatgttagaaccgcaatttatcaccaaaatttatgatcctaaaacgggaagcagccgtacggcgaaaaaagaagaggcaggcaatcctgtttcagccgatgcagcgaaacaaacacggcagtatatggtaacagtaggaacagaccctaattacgggactctctattcagccagtttgggtggtccagtcattaaagtaggcaatcagtctgttgcagtcaagtcagggacagctcaaattgcttctggtgacggttcgggttacttatctggaagcaatgattatatctattcagttgttgctatggtaccatctgataatcctgatttcttgatgtatgtgacattacaacaaccagaatcatttagtgtgtccttctggcaagatgttgttaatcctgttttggaagaggcaacattaatgaaagatacgctattggcaccaattgaaacacctgaagatcaacagactaagtattatttaccaaatgttattggaaaaaacccaggtaatacggctgatgacttacgtcaaaatcttgttcacccaattgtgcttggtacaggaaataaaatcattaaaacgtctgtaagtgttggttcgaatttgaaggaaaatcaacaggttttactattaaccagccattttgatactatgcctgatatgtatggctggagcaagaaaaacgttaagaagtttgaagattggactggtatcaaggtaactttcaaagggaaaaaatctggaaaagttaccgaacagagtgttaaagttggcagtaagcttaaaaatttgaaaaaaataagaataaccctaggagaa

SEQ ID NO: 36336 - DNA, 1017 bp, Streptococcus mutans
atgttaaccactacaatcatcgcaggaattatttcttttatcttaaccattcttgccatgccatttttcatccggttctatcaattgaaaaaaatcaatggacaacaaatgcacgaagatgtgaagcaacatttagctaaggctgggactccaaccatgggggggacagtgtttcttcttgtagcagctttagttacctttatctgtgcattcgttcttcatattactggagggcctgcttttggggccaccttggctattctttttattgtcttaatttatggaactattggatttttggatgatttcttaaagatttttaaaaaaattaaccaaggtctaacagcttggcaaaaaatggccttgcagcttattggcggtcttgttttctaccttgttcatgttaaaccaagcggtacagattccttaaatctttttggttttcctttgcatttgggcgtgttttacattatttttattctgttttgggttgttggtttttcaaatgccgtcaatttgacggatggtattgatggcttggcttccatttcagtggttatcagtctgctaacttatagtgttattgcatatgtgcaaaaccaatttgatgttctcttgattatcatttccatggttggtgctttactaggcttttttgtctataatcacaaaccagctaaggttttcatgggagatgttggtagtttagccttaggagcaatgttggcagctatttcaattacacttcgtcaggaatggactttactgattattggtattgtctatgtgcttgagacggcttctgtgatgcttcaagtatcttattttaaatggactaaaaagcgcaaaggagaagggcagcgtatttttaggatgacaccttttcatcaccatcttgaacttggtggcttacgtctaagagaatctggtaaaaagtggtctgagtggcaggttgatttttttctttggtcaataggtcttctcgggagtttacttattttagcgattttatattta

SEQ ID NO: 36337 - DNA, 1341 bp, Streptococcus mutans
atgttatttacagattttaaatttaaaaattatattaacaatgctttggcaaacttacattttgaaggaccgacggaggttcaagaacgcctgattccacttatcttatctggaaaagatttggttggtgaatcaaaaacaggatcaggaaagactcatacttttttgttacctatttttgaaaaattagaagaagattctttagatgttcaagccgttatcactgcaccaagccgtgaactcgccagacaaatttatgaagctgctaaacaaattgctcaattttcagaacaaaatattcggcttgctaactatattggcgggactgataaacttcgtcaagttgaaaaactaaaagcaactcagccacaaattatgattgggacaccgggtcgtatttatgatttagttaaatctgggcatcttgatatccataaagctcatacttttgttgtagatgaagcagatatgactcttgatctgggcttcttagatacagttgataaaattgctgcaagtttgcctaaagatatacagctccttgttttttcagcaaccattcctcaaaaattacagccttttttgaaaaaatatctaaatcatcctattatagaaaaaatcaagaccagtacagtcattgcagacaccattagcaattggctgatttcaactaagggacgcgataaaaatcagcaaatattagagattgtaaagagtttgaaaccctatttggccattatctttgctaataccaaagaccgtgttgatgatcttcacgctttcttgtctgctaatggttttaaaactgcaaaaattcatggtggaattccgccgcgtgaacgtaagcggattatgaatcaggttaagcaactagattttgaatacattgtagcgacagatttagctgcacgtggcttagatattgaaggcgttagtcatgtgattaatgatgcgattcctcaagatttatcattctttgttcaccgtgttggccgaacaggccgcaatggtctttctggtacagctatcacgttatatcaacccagtgatgattctgatatcagagaacttgagaagttagggatagtctttgttcctaaagtcttaaaaaatggggagtttcaggatacttatgatcgggatcggcgcctcaatcgtaagaaaacgcaggaaaaacttgatctggaaatgatgggtctggtcaaaaagaaaaagaagaaaatcaaaccgggatacaagaagaaaattcagtggaaagttaatgaaaaacgtcgtaaagaacgccgttttgttaaacgtgcccaaaatcgtgctaatcgtaaagctaaaaaacaacgtttt

SEQ ID NO: 36338 - DNA, 1701 bp, Streptococcus mutans
gtggaaaaaatatatcttgaaaatcctaaatcaggatcagaaattcttcttgatactttggcaaatttaggagtaaaaactatttttggttatcctggcggtgccgtcttaccactttatgatgctatttataaacaagacaatattcgtcatattttagcgcgtcatgaacaaggagcagtgcatgaagcggaaggatttgcaaagtcaacagggaaacttggtgtagctattgttaccagtggtcctggagcgactaatgccattaccggaattgctgatgctatgagtgatagtgtcccaatgttggtttttactgggcaggttgcaactccgggtattggtaaagatgcctttcaagaagctgatattattggtattacaatgccaattactaaatataattatcagattcgcgaaacagctgatataccaagaattgtaacagaggctgttcatattgcgacaacaggacgtcctgggccagttgttattgatttacctaaagatgtttctgagaaaagagtaagttcttttaatgaaacgacaattaaaattccgggttatcaaccaactattgagccaaataatttacaagtcaagaaaatcttgagccaattaaaaaaggcaaagaaacctttgattctagcaggtggcggtgtcaattatgcaggagcttctgcagaacttattgcttttgcagaacgttataagattcctgttgtctcaacgcttttgagtttgggagttatgccaattgaacatcctttatcattaggaatgggaggcatgcatggttcatatgcttccaatatggctttgacggaatgtgattttctcatcaattttggttcgcgatttgcggatcgtttgacaggaaatcctaagacttttgcccaaaaggctgttgtggctcatgttgatatagatcctgctgaaattggcaaggttgttaagacggctattccagttgtgggagatgccaagaaaaccttaaaacagctcttagagtctgataaagtatccacaagacacagagaatggacggataaggtcttgcaagataaagctaaggctccatttagttataagtttgaccaagaagttatcaaaccgcaacatgctattgaaacaattggtaaattaacaaaaggtgatgccattattattacggatgttggtcagcatcaaatgtgggcagctcaattttatccttataaaaatgagcgtcagattatcacatcaggtggtctaggaacaatgggatttggtattcctgcagctgtgggagccaaattggctaatcctggtaaagaggttgttctttttgttggtgatggcggttttcaaatgactaatcaagaattggctattttaaatggttatggcgtcccaattaagcttgtcttaattaataatcattctttaggaatggttcgtcagtggcaggaatctttttatgatgaacgtcgcagtgagtcaacctttgatgatgaacctaatttccaacttttagctgaatcttatgggattagccattataaattggacaatcctttgactttagaaaaagatttggaagttattttggaaaacaagcctatgttgatagaagttgatatttctaaccgtgagcatgtttatccaatggtaccatcaggaaagagtaatgcggaaatgttgggggtgacttttaatgcg

SEQ ID NO: 36339 - DNA, 1458 bp, Streptococcus mutans
atgtataaggatgatagtttaaccttacatacagatttgtatcaaatcaatatgatgcaggtctatttcaaccaagggattcataacaaaagagctgtttttgaagtcttctttcgtaaggaaccttttgcaaatggttatgctgtttttgcaggtttagagcgaatgattgcttatttgcaaggactgagtttttctgaaacagacattgcttatctagaggaattaggttatcctgcagattttgttgcctatctaaaagagtttaaattagaattgagtgttaaatctgctaaggaaggagatttagtctttgccaatgagccgattgttcaaattgaaggaccgcttgctcaatgtcaattagttgaaacagccattttaaatattgttaattttcaaaccctcattgcgacaaaagctgctcgcattcgttctgttattgaggatgagccgcttttggaatttggtacgcgccgtgctcaagagatggatgcagctatttggggaacgcgcgcagcagttattggtggtgctaacgctaccagcaatgttcgtgcaggaaaactctttggtattcccgtttcaggtacgcatgcgcatgcccttgtccaagcttatggtaatgactatgatgcctttatggcctatgctggaacgcataaagactgtgtctttttagtagatacttatgatacgctgcgtttgggagtacctgcggccattcgtgtggctagtgaattgggtgataagattaatttcttaggagtgcgcattgattcaggagacatggcttatctttctaaaaaagttcgtaaattgttagatgaagctggctatccccatgctaaaatttatgcttcgaatgatcttgatgaaaataccattctcaatctgaaaatgcaaaaagctaaaattgatatttggggcgtaggaacaaaactgattacagcttacgatcaaccagctttgggggctgtttataagattgtttccattgaagatgacaatggtgtgatgcaagataccattaaactctctaacaatgcagaaaaagtatcaacgcccggtaagaaacaagtttggcgcatcaccagtcgtgctaaaggaaaatcagaaggcgactacattaccttcacagatacagatgtcaattctttggatgaaattgacatgttccatccaacttatacttacattaataaaaaagttcgcgattttgatgccgtaccgcttttagttgatatttttgaccaagggaaattagtttatactcagccaagtttatcagatattcaagattatgcgcgcagagaatttgataaactctgggatgagtataaacgcgtcctcaatccacaagattatccggttgatctggcgtgtgatgtttggcaaaataaggtgaatctgattgatcgtattcgtaaggaagcctatgagaaaggtgacgttaaa

SEQ ID NO: 36340 - DNA, 480 bp, Streptococcus mutans
atgcgtagaatgttaacagccaaacttcaaaattccacaggagtcctgaatcgttttacaggagttctttctcgtcggcaagttaatattgagtctatctcagtaggtcatactgaaattcccaatatttcaagaattaccattattattgatgttgactccttggaggaagttgaacagattatgaagcagcttaatcgtttaattgatgttgttcgtgttcgagatattacagataaacctcacttggaacgcgaagtcatcttgattaaggttgctgccccaacgagtaagcgtgcggagattttggcgattattcagccttttcgtgccagtgttattgatgtcgcaccaaagtccattaccattcaaatgactggtgatgcagataaaattgaagctcttattcgagtcattcagccttacggggtgaaaaatatcgctcgtacgggagcgacaggctttactagagatttatcc

SEQ ID NO: 36341 - DNA, 822 bp, Streptococcus mutans
atgagtttacaagaagatattattactcagttgggtgttaaacctaaaattgatgctcaagaagaaatccgtaaatccattgactttcttaaagcttacatgaagaagcatggctttttgaaatcttatgttttaggaatttcaggtggtcaagattccagtcttgctggtcgtctagcgcaacttgctattgaggaattacgtcatgaaacgggtgataatggctataaatttatagctatccgtctgccttatggtgtacaggctgacgaagatgatgcacaacgagcgctcaattttattcagcctgatgtcagtcttgctatcaatattaaacctgctgttgatggggaagtcgctgccttagcagaggctggagttcaagtttctgactttaataagggaaatatcaaggcacgtcagcggatgattagtcagtatgctgttgctggtgaaaatggcggagctgtcattggaacagatcatgctgctgaaaacattactggtttctttactaaatttggcgatggtggagctgatattttacctttatatcgtctcaataaacgtcaaggtaagcagctgttagcagaattaggagctgataaggctctctatgaaaaaattccaaccgcagaccttgaagaaaataaacccggtatcgctgatgaagttgcccttggcgtgacctataatgatatcgacgattatttagagggcaagcaagtctccccagcagcccagaaaataattgaaaattggtggaacaaaacagaacataaacgtcatttaccgatttctatctttgatgatttttggaag

SEQ ID NO: 36342 - DNA, 1020 bp, Streptococcus mutans
atggcagtagaaatgttatatgaagcagatgtaaaagtagcagcacttgatggtaagaagattgctgttattggttatggatcacaaggacatgctcatgcccaaaacttgagagattcaggacacgatgttatcatcggtgtgcgtcatgggaaatcgtttgacaaggctaaagaagatggttttgatacctatgaagtgggtgaagctactaaattggctgatattatcatggttttagcaccggatgaaattcaaaaagatatctacaaagatgaaattgctcctaatttaagtgctggtaaggctcttggttttgctcatggttttaatatccatttcggttatattaaggcaccagaagatgtagatgttttcatggttgcccctaaaggaccgggccatcttgtacgtcgtacttacacagaaggatttggagtaccttctttatatgctgtttatcaaaatccaactggtaatgctgaaaatattgctttagattgggctaagggtattggttctgcgcgtgtaggtctccttgtaaccactttcaaagaagaaacggaagaagacctttttggtgaacaagcggttcttatgggtggtttaactcaccttattgaagcaggttttgaagtgcttactgaagcagggtatgctccacaattggcttattttgaagtgcttcatgaaatgaaattgattgtagaccttatctatgaaggtggtttcaagaaaatgcgtcaatcatgttcaaataccgctgaatttggtgactttgtgacaggcccacgtgttatcggtccagaagtaaaagaaaacatgaaggctgctcttgctgatattcaatcaggtaaatttgcccgtgaattcgtggaagatcatgatgctggcttcccacgtttgaaagctttccgtaaagaagctgaaggactcgaaatcgaaaaaattggtgcagaacttcgtaaagcaatgccatttgttaatcaaaacgatgacgatgctttcaaaatttataac

SEQ ID NO: 36343 - DNA, 885 bp, Streptococcus mutans
atgggagtttttatttttttgtgtttcatactgtttttggtcatccttttgattgccagtggactttatgttgttcgccaacaaacagttgctattattgaacgctttggtaaatatcaattgacttccgctagtgggattcatttacgtttaccttttggaattgataaaattgctgcgcgtatccaattacgtctgcttcaatcggaaattattgtcgaaactaagacaaaggacaatgtttttgtgacgcttaatgttgctacgcaatatagggttaatgagcaaaatgttactgacgcttattacaaactcatgagaccagaagcgcaaatacaatcttatattgaagatgctctgcgttcgtctgttcctaaattaactttagatgaattatttgagaaaaaagatgaaattgctcttgaagtacagcatcaagttgcggaagaaatgtcaacttacggttatatcattgttaaaaccctgattactaaggttgaacctgatgccgaagttaaacaatcaatgaatgagattaacgctgcacagcgtaagcgcgttgctgcgcaagaattggcaaatgctgataaaattaaaattgtcactgctgcagaagctgaggctgagaaagatcgccttcatggtgttggtattgcacaacaacgtaaggcgattgtggatggtttagctgagtctatcatggaattaaagggtactaatgtatcattgacagaagagcaaatcatgtctattcttttgactaatcaatatcttgattctcttaatacctttgcgcaacatggcaatagttccattttcttacctgctaatcctgaaggagcagaagacattcgtacacaagtcatgtctgccttaaaagcaaga

SEQ ID NO: 36344 - DNA, 4395 bp, Streptococcus mutans
atgtcggaattgtttaaaaaattgatggatcagattgagatgccgcttgaaatgaagaattcaagggttttttcatctgctgatattgtggaagtgaaggtttatcctgagagtcggatttgggatttccgtttttcttttgagaccatcttaccaattgatttttatcaggagttaagaagcagattagtgacgagttttgaaacagctgatattaaggctgtttttgacattgaagtggagaatgctgaattttctaacgagcttttgcaggcttattatcaggaggcttttaagcagccgacttgcaatagtgctagttttaaaagctctttttcgcacttaactgtttcctatactgatgggaaagttcttatttcagcgccgcaatttgtcaataatgatcattttcgaaagaatcatttacctaatcttgaaaagcagtttgaagcgtttgggtttgggaaattaagttttgacattgtatctaatcaaaaaatgacagaggaaataaaacatcattttgaatcctctcgtcagcagcaaattcaaaaggctagtcaagaaacgctagaaattcaaaaatcattagaagcttcaataccgcctgaagaaattcctaaacccgtatccaatttcaaagagcgaatcaaggatcggcaagcagcttttgaaaaggctgagattacgcctatggctgaaattgaaactgaggaaaaccgcatcacatttgaagggcttgtttttgatgtggaacgcaagacaacaagaaccggacgtcatatcatcaattttaaaatgacggattatacctcaagttttccgatgcaaaagtgggctaaggatgatgaagaattaaagaaatatgacatgatttctaagggtgcttggttgcgcgtgcgtggcaatatcgagaataatccttttacaaaagccttaaccatgaatgtccaaaatgtcaagaccattgttcataaagagcgtaaggacttaatgccccaaggggaaaaacgtgttgaatttcacgctcataccaatatgtcaaccatggatgctttgccaacagttgagcaattagtggccaaggcggctcagtttggtcatcctgcggttgctattacggatcatggcaatgttcagagtttccctcatggctatcatgcaggtaaaaagaatggcattaaggttctctttggcttggaggctaatcttgttgaggaccgtgtacctattgtctacaatgaagttgatatggatatgaatgaagcgacctatgttgtttttgacgtggaaactacaggactttcagccatcaataatgatttgattcagattgcagcttctaagatgcataaaggaaatattgttgagcaatttgatgagtttattgatcccgggcatccgctcagtcagtttacaaccgatttaacagggatcacagatcagcatgtgaaaggggctaagcccatttcacaagtattgcaggaatttcagtccttttgtcaagatacagttttagttgcccataacgccacttttgacgttggctttatgaatgccaattatgaaaggcatgacctgccaaagattacgcagccagtcattgataccttggaatttgcacgaaatctttatccagaatacaagcgtcatggtttaggtcctttgactaaacgctttcaggtatcgcttgagcaccaccacatggctaattacgacgctgaggcaactggtcgtctgctctttatctttcttaaagaggcgaaagaaaagcatggggtcaacaatcttttagatcttaatactaaaattgttgatgataattcttacaagaaagctcgggtaaagcatgcaaccatttatgtcctgaatcaaaaagggttgaaaaatttatttaaattagtcagtctatccaatgttacttattttgcaggtgtggctagaataccaagaacgattcttgatcagtatcgtgatggcctcttactggggacagcctgctctgatggtgaagtttttgatacggttctctcaaaaggggttgaagatgctgtggaggtagccaagtattatgattttattgaagtcatgccacctgctctttatgaacctcttcttgctcgtgaattaatcaaagatgaagcaggaattcagcaaattattaaagatcttattgaagttggtcgtcgtttagataagcctgtcttggcaactggtgatgtccattatctggaaccggaagacgaaatttatcgtgaaatcattgttagaagtctgggacagggagctatgattaatcgtcctattgggcgtggtgaaaatgctcagccagctcctctgcccaaggctcattttagaacaaccaatgagatgttggatgaatttgcttttttaggcgaagatttagcccgtgacattgtcattaaaaatccaaatgagatggttgagcgttttgaagatgttgaagttgttaaaacagacctctatacgccttttattgagaattctgaagaaaaagtcgctgagatgacttatgaaaaggcctttgaaatttatggcaatcctcttccggatatcattgacttgcgtattgaaaaagagttgacttccattttggggaatggatttgcggtgatttatctggcttcacagatgctggtaaatcgttctaatgaacgtggttatctggttggttctagaggttcggttggttctagttttgtggcaaccatgattggtattacagaagtgaatcctatgccgccacactatatttgtcccaatccagactgtaaacattctgaatttatcacggatggttctgtgggttcaggctatgatttgcctgataaaatctgttcggaatgcggcactccgtacaagaaagatggtcaggatattccttttgagaccttccttggttttgacggagacaaagttcctgatattgacttgaacttttcaggtgatgatcagccgagtgctcacttagatgtgcgtgatatttttggtgaagaatacgcctttcgtgcaggaacagttggtacggttgcagatagaacggcttatggctttgtcaaaggctacgaaagagattatggcaagttttaccgcgatgcagaagttgataggctggcgcagggttcagccggtgtcaaacgaacaactggacagcaccccggtgggatcgttgttattccaaactatatggatgtttatgattttacacctgttcagtatcctgcggatgatttaacagccgaatggcaaacaacccactttaacttccatgatattgatgaaaatgttcttaaacttgatgtgcttggtcatgatgatcccaccatgattcgcaagttgcaggatttgtctggtattgatccaaaaacaattcctgctgacgatccagaagttatgaaactgttttcaggaacagaagtcttgggagttactgaggaagagattggaacaccgactggaatgctaggaattcctgaatttggaaccaactttgttcgtggaatggtggatgagacccatccaacgacatttgcggagcttttacaattatcaggactttcacatggtacagatgtgtggttgggcaatgcacaggatctcatcaaacaaggcattgcaacgctgtcaacggttattggttgtcgtgatgatattatggtttatcttatgcatgctggtttagaacctaagatggcctttactattatggagcgtgtacgtaaaggggcttggctgaagatttcggaggaagagcgaaacgggtatatctcagccatgcgtgagaataatgtgccggattggtatattgaatcctgcggaaaaattaaatacatgtttcctaaagcccatgcggcggcttatgtcttgatggctcttcgtgttgcttattttaaggtgcatcacccaatttattattactgtgcttatttctctattcgtgccaaggcttttgaattaaagacaatgagtgctggtttggatgctgttaaggcacgcatggctgatattagtcaaaagagaaaaatcaaccaagcttcaaatgttgagattgatctttttacaaccttagaaattgtcaatgaaatgttggagagaggtttcaaatttggacagctggacttgtatcgcagtgatgccactgaatttatcattgatggcgatacattgatacctccttttgtggctttggaaggtttgggcgaaaatgttgccaaacaaatcgtaaaagcacgtaatgaaggagagtttctttctaagacagaactgcgtaaacgcggcggtttgtcatcaactttggttgaaaagatgagcgatatgggaattttaggcagtatgcctgaagataatcaattgtcactttttgatgatttcttt

SEQ ID NO: 36345 - DNA, 447 bp, Streptococcus mutans
atggtcatagagaggagttgtatgggtgatttagataagaatcctgcagttaaagctatggttgtttttcgcaaggctatgcgaacaattgatgcgcaagttgctccaagctataaaaacaatggtttaacacaaacccagtttgccgttttggatgttctttatgctaaaggagagatgaccatcagtcgtttgattgcttctatactggcgacgtctggcaatatgacggttgtgattaaaaatatggaacgtaatggttggatttaccggagcccaaatccagatgacagacgtgcctcggttgttggtctgacggaagttggcaaacaattgattcaaaaagctttgcctgatcatattgctatggtagaagctgctttttctgtaatgacagaagaggagcagttagtcctaatagatctgttgaaaaagtttaaatctctt

SEQ ID NO: 36346 - DNA, 993 bp, Streptococcus mutans
atgtcagaaacaaaagtagtagccttacgggaagctatcaatcttgctatgagcgaggaaatgcgtaaggacgaaaaaattattttgatgggtgaagatgtcggtatttatggtggtgactttggaacttctgttggtatgctggctgaatttggtgaaaagcgtgttaaagatacccctatttcagaagcagccattgcaggatctgcagtaggtgccgctcaaactggacttcgtcctattgttgatttgacctttatggactttgtgactattgccatggatgctattgttaatcaaggtgctaaagccaattatatgtttggcggcggacttaaaacgcctgtaacctttcgtgtggcctcaggctcaggtatcggctcagcagcgcagcattctcagtcactagaagcttggttaactcatattccgggaatcaaggtggttgcgcctggcacagtcaatgatgctaaagccttgctcaaatctgctattcgtgataataatatcgttattttcatggaaccaaaagcgctttatggcaaaaaagaagaggtcaatttagatcctgatttttatattccgcttggtaaaggcgaaattaagcgcgagggaacagatgttaccattgtgtcttatggtcgtatgctggaacgcgttctcaaagccgctgaggaagtggcggctgaagatatcagtgttgaagttgttgacccgcgtacccttattccgcttgataaagacttaattattaattctgtgaaaaagacgggtaaggttatcctagttaatgatgcttataaaacaggtggtttcattggtgaaatagcatcagtgattactgaaagcgaagcatttgattatttagatgcaccagtgcttcgtctcgcttctgaggatgtgcctgttccctattctcatgttctcgaaacagccattttaccagatgtggcaaaaattaaagaagctatctataaacaagtcaggaaaaga

SEQ ID NO: 36347 - DNA, 1365 bp, Streptococcus mutans
atggcagtcgaaattattatgcctaaacttggtgttgatatgcaggaaggcgaaatcatcgagtggaaaaaacaagaaggtgatgaggtcaaagaaggggagatcctccttgagattatgtctgacaagaccaatatggaaatcgaagctgaggattcaggtgtcctgcttaagattgttaaaggaaatggtcaagttgttcctgtaactgaggtcattggttatattggtcaagcaggtgaagttcttgaaatagctgatgttcctgcaagtacagttcctaaagaaaatagtgcagcacctgctgaaaaaacaaaagcaatgtcttctccgacagttgcagcagcccctcaaggaaagattcgagcaacaccagcagctcgtaaggcggctcgtgatctgggagttaacctgaatcaggtttcagggacaggcgctaaaggccgtgttcacaaggaagatgttgaaagctttaaagcagctcagcctaaagcaacaccattagctaggaaaattgctatagataaaggtattgatctagccagtgtctcaggaacaggttttggcggcaaaattatcaaggaagatattttaaatctgtttgaggcagctcagcctgttaatgatgtgtcagatcctgctaaagaagcagctgccttaccagagggtgttgaagtcattaagatgtctgccatgcgtaaggcagtggctaaaagcatggtcaattcttacctgacagctccaacttttactctcaattatgacattgacatgactgagatgattgcgttgcgtaaaaagttaattgatcctatcatggaaaaaacaggttttaaagttagcttcacagatttgattggtctggcagtcgtaaaaaccttaatgaaaccagaacatcgttacctcaatgcttcactcattaatgacgcgactgagattgaacttcatcaatttgttaaccttggtatcgccgttggacttgatgaaggactgttagtacctgttgttcatggtgcagataagatgagcttgtcagattttgttatagcttcaaaggatgtcattaagaaagctcagaccggtaaattaaaagccactgaaatgtctggttcaaccttttccattacaaacttggggatgtttggcactaagactttcaaccccattatcaatcagccaaattcggctattttgggtgtaggagcaactatccaaacgccaactgttgtggatggtgaaattaagattcgtccaatcatggcactgtgcttgaccatcgatcaccgcttggttgatggcatgaacggcgctaagttcatggttgatcttaaaaaactgatggaaaatccatttacattattgatt

SEQ ID NO: 36348 - DNA, 1743 bp, Streptococcus mutans
atggcagtcgaaattattatgcctaaactcggtgttgatatgcaggaaggcgaaatcatcgagtggaaaaaacaagaaggtgatgaggtcaaagaaggggatatcctccttgaaatcatgtctgacaagaccaatatggaaattgaagctgaggattcaggtgtcctgctcaaaattgttaaaggaaatggtcaagttgtccctgtgactgaggtcattggttatattggttctgctggtgaaacgattgaaacaaatgcagcgccagcagcttcagctgatgatctcaaagcagcgggtcttgaagttcctgatactttaggcgagtcagcagcaccagcagctcaaaaaactccgcttgctgatgatgagtatgatatgattgtcgttggtggtggtcctgctggttattatgctgctattcgcggtgcacaattgggcggcaaggttgctatcgtcgaaaaatcagaatttggagggacttgtttaaataaaggctgcattccaactaaaacttatcttaagaatgctgaaatccttgatggcatcaaaattgcagcgggtcgcggtattaattttgcttcaaccaactataccattgacatggacaaaacggttgcctttaaagataccgttgttaaaacattgacaagtggggttcagggtcttcttaaagccaataaagtgactattttcaatggtctcggtcaggttaatcctgataagacagtgactgtcggttcggaaacgattaaaggacataatattatccttgcaacaggttcaaaagtgtctcgtattaatattccgggaattgattcacctcttgttttaacatcggatgatattcttgatcttcgtgaaattccaaagtcacttgctgttatgggcggtggtgttgtcggcattgaactcggtcttgtttacgcttcctatggtacagaagtgactgttattgaaatggctgatcgcattattcctgctatggacaaggaagtatcgcttgaactgcaaaaaattctatccaagaaaggaatgaacattaagacttctgttggtgtggctgaaattgttgaagctaacaatcaattaacgctgaaactcaatgacggctctgaagttgtggctgaaaaggccctgctttctattggtcgtgtcccacaattaagcggtttagaaaatcttaatctggaacttgaacgcggtcgcatcaaagtggacgattatcaggaaacctctatttcaggtatttatgccccgggtgatgttaatggaagaaagatgttagcgcatgctgcctatcgtatgggtgaagtagctgccgaaaatgctatctggggaaatgttcgtaaggctaacctgaaatatacaccagcagctgtttacacccatccagaggttgctatgtgcggtattactgaagaacaagcccgtcaagaatatggaaacgtcttagttgggaaatcctctttttcaggaaatggacgtgcgatcgcttctaatgaagcacaaggatttgtcaaagttgtcgcagatgctaaataccatgaaattcttggagtccatattattggaccagcagctgctgagatgattaatgaagcctcaacgattatggaaaatgagttgacggttgatgagctgctacgttctattcatggccatcctaccttctcggaggttatgtatgaagcctttgcagacgtccttggcgaagctatccataacccgccaaagcgtcgt

SEQ ID NO: 36349 - DNA, 2121 bp, Streptococcus mutans
atgacagttctaaaatatggactaggtattctcttaagcgctattattttagccattataattggaggtcttctgtttacctattatgtcagcagtactcctaaactatcagaagctaaacttaaagctactaattctagtttggtttatgatagcaataataatctgattgctgatttaggtgctgaaaagcgcgaaagtatttcttcagacagtattccaatgaagttagtaaatgccgttacctctattgaagatcaccgtttctttaaacatcgtggtgtcgacatttatcgtattattggtgcagcttggagtaatttacttcataaatcaactcaagggggatccactcttgatcagcagcttatcaagctggcctatttctctactaaagagtctgatcagaccttaaaacgtaaagctcaagaagtttggctgtctctacaaatggagaaaaaatacacgaaagaagagattctaactttttatgtcaataaggtttacatgggtaatgggaattacggaatgcgcactgctgcaaagtcttattatggcaaggatcttaaagacttatcaattgcccagctagcgacactcgcaggtattccgcaagcaccgacacaatatgatccttacgctcagccaaaggcagctacaagcagacgtaataccgttttgtcacagatgtataaacataaaaaaattacaaaacgagaatatgatgctgcagtagcaacaccaatttctgatggcctgcaagaactgaaacgctcctctagttatccaaaatatatggataattatctgaaacaggttatttcagaggtgaaaaaacgtactggtcaagatatcttttcagcaggcatgaaggtttatacaaatgttaatgccgatgcacagcaatatctctggaacatttataatacagatgaatatattgcttatcctgatgataatttccaagttgcttctactgttatggatgttactaatggtaaagttattgcacagcttggcggacgccatcaagataccaatgtttcttttggtaccaatcaggctgtcttaactgatcgtgactggggatcaaccatgaaacctatttcagcatatggccctgctcttgaaagcgaagcttttacgacaactgcacagatgctaaatgactcggtctattattatccaggtacaacaacacaagtctatgactgggatcatcgttataatggttggatgactatccaaacggctatccaacaatctcgtaatgtccctgctgtcagagctattgatgccgctggattagatactgccaaaggtttcttaagcggtctcggtattgattatcctgagatgcgttattcaaacgccatttcaagtaatacaagtagttcagaacaaaagtatggtgccagcagtgaaaaaatggccgccgcttatgctgctttttctaatggtggaacttattatgaaccacaatacgtcaataaaatagaatttaaggatggaacatcagagacctatgatgctaaaggcaatcgtgcgatgaaagaaacgacagcctacatgatgacagatatgttaaaaacagtattaacatatggtactggtactgaggctgctattcctggtctttatcaagcaggtaaaacaggaacatccaactatgatgacaatgaattggtagagatgtctgaaaaacttggtattaatccttatggacttggtactattgctccagatgaaaactttgttggttatacacctcagtattcaatggctgtttggacaggatataaaaatcgcttaatgcctgtttacggagacagtatgaaaattgctgcgcaagtctatcgtactatgatggcttatctttctagctcaggtaattctgattggaccatgcctgacggtctctatcgcagcggtggttatctttacctaaatggttcaagtgggtcaaatagtaggtatggtgcagctcctgcaacttcatcgtcatcttcttcatcatcttcttctgattcaaacaataacgatcaaaataataatcaaactacagaagcgtctagtgactcatcttcatcaagttctgatgctacgacatcttctaatcca

SEQ ID NO: 36350 - DNA, 336 bp, Streptococcus mutans
atggcaagtattatgtacacccctaaagatatttttgaacaagaatttaaatctagcatgcgtggctatgataaaaaagaagttgacgaattccttgacgatattattaaggattatgaaacctatatttccacaatcgaagaattgcgtcaagaaaatacgcgcttaaaagaagaagtaaaacaagctaaaaaacgtcaagaggccgctcaaacaacagtatctccagcagcttctgtaagttctagtcgtgtggcgactaccgctacaaattttgatattttaaaacgtatcagtcgtttagaaaaagaagtttttggtaaacaaattaccgaa

SEQ ID NO: 36351 - DNA, 1551 bp, Streptococcus mutans
atgaaaaagacaattttaagctgtctggctgcccttttcatgctgtttattggtgtgacaaatgctcaggcagacaactacctacgtgttggaatggaagcagcttatgcgcctttcaactggacccaagacaatagcagcaatggggctgtacctattgaaggaacaaagcaatacgcaaacggatacgatgttcaaacagccaaaaaaattgctaaaactctgggcaaaaaaccactcattgttaaaacaaaatgggaaggacttgtgccagccctaacatccggaaaaattgatctgattatcgctggaatgagtccaaccaaagaacgcaaaaaagaaattgccttttctaatagctactatactagcgagcctgttcttgttgtacgcaaagacagtaagtatgccaaagccaaaaatctcaatgacttctcaggcgcaaaggtgacctcccaacaaggtgtttatctttataatttgattaatcagattcctaaagtatctcggcaaacagctatgggagacttctctcagatgagacaggccttagcttctaatgttattgatgcttatgtctccgaacgtcctgaagcgctgtcatcaactaaagcaaattcaaactttaaaatggtctctttaaaaaacggttttaaagtaagcaaatccgatgttactattgctgttggtatgcgtaaaggtgatccacgaatagaacaagtcaacgctgccttggatcaatttcctctaaaagagcaaatatctttaatggataagatcatcccaatgcagcctagtcaaaataacagtgatcaaaaagaaagcaaatctaactttttcgaccaagtcagcaaaattgtcaaaaacaattggaaagctcttcttcgtgggacaggtgttactttactcatttcaattattggtacaattgccggtttgattatcggccttcttattggtgtttatcgtactgctccaaaagcatccaatcttatcttagcttggttacaaaagatttttggctggttactcacggtttatattgaagtcttccgaggaacacctatgattgtacaagccatggttatatactacggaacggctcaagcttttggggtctctcttgatcgcacacttgctgctatctttattgtctctatcaatacaggtgcttatatgagtgaaatcgttcgtggcggcatcttcgccgttgacaaaggacagtttgaggctgcaacagcacttggtttcacccacagacaaaccatgagaaagattgttcttccgcaagttgtccgcaacattctccctgcgacaggtaacgaatttgtcatcaacatcaaggatacctctgttttgaatgtcatttctgttgtagaactctatttttcaggtaatactgttgcaacccagacttatcaatacttccaaaccttctttattatcgctgtcatatacttcattttaaccttcacagtaacgcgtattcttcgtttggttgaaagaaaaatggaccaagataattacaccaaaattgaaggagaaacaaac

SEQ ID NO: 36352 - DNA, 1899 bp, Streptococcus mutans
atgaagaaattactgcttttcttagcaacttgtttatctttggtaacaactagctttgtttcagctaaggatgttgattataatatcagactttattggggaaggctgacacttaataaagataatacagcgacttttcaacaggatcttgtttatgattttgcttcatcctacaatggccaatacgttaccttgggttcagcaggcaatgtacctaaaggatttaaaattaatagcaatcctgaagtgaaagcctatgaggttaacgagcagggaaaattgacaaaacgcccgataaagaccaaaatagaacagctgtcagatggctatcgcgctaaagtctataatggcggacatagcggtgatcgtgttgtcctttctttaaagtggaaacttcaccatgtcacaactatttattctgatattgctgaacttaattggacaccgattagtgattgggatgctcctttggataaggtcgtcctgacagttaagggaccttcaaattcgctggctgtaagcaggttccatgctcatacaggctactttaaaaagcagcctaaagtcactcaaaaaaatggaaactatgaagttaatattgagggtcttggcaagaataaaaagttggaactgcatgcttattggaaacgttcggattttgctgctgccaccgacaagtcaagcaagagattatcaaagtttcaagctcttgaagctaaaattgccagacgtcagaaattttatcctcttttagtcggctggctgtttccgatggtcagcgccatccttatccttatttctattgttctctatgctacttggaaagtggtattaggacagagaaaaacagcaaggcatatgcatttattcagtccgccggctgacttatcccctttgattctttctcgttatgtttatgatttagaaattcaagagttatctcctttgaaaactaagcggaagcgatatgatttaggttttaaacagctgattcaagctagcctcttagatttgattgatcaaggaaaactagtcattgcagatgatcataaatctttttttgttcctgattggaatagactagaaagctatgaaaagagatttcttatttttgtttatggcgataataaaaagaccatgcctattgatggtgcttttgatgattataaaattgacaaaagcattttcaagggcagcaatgagacagaaattcgtagacggggcggtgatattctccatttgtttgaaaatcgtatggagaagttagataaggctgttaaaaataaaataagctctttgagtttgaatgatattcatcgtgagagaacgggcgaagaaaagactcagcttatcttggtttatttctttgcatctactgccatgttgtttgccttttttgtaggagcttttgctcttatcaagggttattggctggggcttgggaccaatctgttattgcttattgtagccagtctttttctgattttctatcgtcgaaaagatgattattataaggtttcaagtcttcttacgcaagaaggccttgctatcaaacagggttgggattcttttgagaatatgattcgtgacattaagagatttgatgatgtcgaacttgaaggggttattatctggaaccgtattttggtctatgccaccctttacggatatgctgaacgtgttcaaaattatttgaaagttaaaaatattcatttgcagaacccacaaatgaatacttatcttgagatcaacccgagttactatgtgggacagtcaaccgcagatttatcaacctatacctcaactgctacgagtgcttcaaacttttcggtatcgtctggcggctcaagcggcggtggtttctccggaggcggaggcggtggaggcggcggagccttc

SEQ ID NO: 36353 - DNA, 1605 bp, Streptococcus mutans
atgttaaatattcttttaactcttgttttctccctcattggtttggttattggttatgcagttatttcggctcgtttaaagaaagctaaagaaaccgcagaactgactcttttaaatgcagaacaagatgctgtcaatgctcgcagtaaagctgaaatggatgctgagcatatcaaaaaaacagcagaacgtgaaagtaaggcctataaaaaggaactgcttatagaagcaaaagaagaggctagaaaatatcgtgaagagattgaaaaagaatttaagtctgaaagacaagagctcaaacaaatggatgcgcgtttgacagagcgtgcagcatctcttgatcgtaaagatgaaaatctaagcagcaaagaacaattgcttgatagtaaagagcaaagtctatccgataaatctaggcatattgatgagcgtgaactacaagttaaacaattagaagttaaaaaggctgaggaacttgagaaaatagcgtccttaagtcaagaacaagcacgcggtattattctttcggaaacagagaaaaatttagcgcatgatattgcgaatcgtattaaagaagcagagcgtgaaatcaaagatagaacggataaaacggctaaagatttgttagctcaagctatgcaacgtctagcaggagattatgtagctgaacagaccattacgacagttcatctccctgatgatagcatgaaaggtcgtattatcggccgcgaaggtcgtaatatccgaacgcttgagagcttgacaggtattgatattattattgacgacacaccagaggtggttgttttatcaggctttgatcctattcgtcgagaaattgctcgtatgactttagaagcgcttatccaagatggccgtattcatcctgctcgaattgaagaattagttgagaagaatcgtctggaaatggacaatcggattcgtgaatatggtgaagctgccgcctttgaaattggcgctcccaatcttcaccctgatttgattaaactgatgggacgtttgcaatttagaacgtcttatggacaaaatgttcttcgtcattctgttgaagttggtaaattagctggacttttggccagtgagttaggtgaaaatgttgatttagctcgccgtgccggttttctacacgatattggaaaagctatcgaccgtgaggttgaaggcagtcatgttgagattggaacagaatttgctcgtaaatacaaggaaaatcctgttgtgattaacactattgctagtcaccatggtgatgtggaagctcaatcggtcattgctgttttagttgctgctgctgatgcgctcagttcagctcgtccgggtgctcgcaatgagtctatggaaaattacatcaaacgtctgcgtgatttagaagaaatagcaacaagctttgatggtgttcaaaatagctatgccttgcaagcaggccgtgaaattcgcattatggttcagccagaaaaactttctgatgatgatgtcaccattttagctcacaaggttcgtgaaaaaattgaaaacaatttggattatccaggtaatattaaagttacagtcattcgtgaacttcgtgcgattgattatgctaaa

SEQ ID NO: 36354 - DNA, 1158 bp, Streptococcus mutans
atgataccaattaccttaaaatttgttcttgtactaattgcgacgcttttgacttcacttgttttgactcctttagttagatttttcgcttttagggtgggggcagttgataatccaaatgcgagacggattaataaggttcctatgcctagtgctggcggacttgccattattatttcatttgtgattgcaacattggctcttatgcccatgattctaaaaacgcaaatcggaggaaaatcctattttgaatatatcttaccagttgttcttggtgccttagtgattgccttgacaggttttattgatgatgtttatgaactctcacctaaaataaaattcttaggtattttgcttggtgctgttattatttggatttttacagactttcgatttgatagttttaagattccttttggtggtcccatgctccactttaatcctttcttgagtttcttcttaacgattttgtgggttgttgccattactaatgctgttaatttgattgatggtttggatggtttggttagtggtgtttcgatgattagtctgaccactatgggattggtatcttatttttttctctatgataccgatatttttttaacacttactatttttgttttgatctttgctattgctggtttctttccttataattaccatcctgctattatctatcttggtgatactggtgctttatttattggttttatgatttcggttttatctcttcaagggttaaaaaatgcaacggcagttgctgttgtcacccctatcattgtcttaggagttcctattgttgatacgacggtcgccattatcagacgaaccttatcaggtcagaaattttacgaagctgataatatgcacttacatcatagattgcttgctatgggattcactcatcgcggagctgttttagtcgtctatggcattgctatgttcttctctttggtatctctgcttttaaatgtatccagtcgtctgggtgggatccttcttatgattggtgttgcctttgctttggaaatttttattgaaggtttagagatttggggacctaaaagaacaccactcttcagactattggcttttattggcaatagtgattaccgtcaagaagtagtagctaaatatcgccgtaagaagaaaaag

SEQ ID NO: 36355 - DNA, 768 bp, Streptococcus mutans
atgtctgtacttgaaataaaagatcttcatgtctctattgaagataaagaaattttaaaaggtgttaatctgaccttgaaaacaggtgaaattgcagccattatggggcctaacgggactgggaaatcaacgctttcagcagctattatgggaaatcccatttttgaagtgacacaaggagaaattttacttgacggtgaaaatattttggaaatggaagttgatgagcgagctcgcttagggctttttcttgccatgcaatatccgtctgaaattccaggaattactaatgcagaattcatccgtgcggcaatgaatgctggtaagaaagatgatgagaagatttctgttcgtgattttatcatgaaactggatgaaaaaatggaattgctgggtatgaaagaagaaatggcagagcgctaccttaacgaaggcttttctggtggtgagaaaaaacgcaatgaaatcttgcaattactgatgttagagcctaaatttgcccttctcgatgaaattgactctggccttgatattgatgcccttaaggtcgtttctaagggagttaatgccatgcgtggtgaaggctttggtgctatgattattacccactaccaacgtctgcttaattacatcacaccagatattgttcatgttatgatggatggtcgtgttgtattatctggcggaccagagctggcagctcgactcgaaaaagaaggttatgcccaaatcgctgaagaactcggtcttgaatacagcgaagaagtc

SEQ ID NO: 36356 - DNA, 1320 bp, Streptococcus mutans
gtgattattttgggaaataagcaaccaactgcacgtagtggtgccctttttgtcttaactgaaatttttgataagactgcctatagcaatatcgctttaaggcactatttaagcaagcacaaactttctcaggctgatagatccttactgactgagctcgtttatgggaccttgactcgcaagattaccttggaatggtatcttgctcattatattgaagatcgcaataaattagaaacttggatctattatttactaatgcttagcctttatcaaattctttatttagataaaattcctcagcatgctattgttaatgaagctgttgatctggcaaaaagcagaaatagaggtgctgaaaagttagtcaatgctgtgttaaggcagtttttacgccaaaaaagacctgacataactgtcattaaacgaaaaaataaacgttattccatcacctattctgtaccagtttggctagttaaaaaaatgattgaccaattcggtgaagatagggcaatcagcattttgaaaagtcttttagttcgaagtaaggctagtattcgtgtggttaatcctgatcaaatagaagtgatagcaaaagcaacaggagccaaaaaatcggttttatcaccttgtggtctggtcaaagcatcaggtcagttttttgatagtgatttatttaaacagggaaagatcaccattcaagatgagagcagtcagttagtagcgcccactttagctattaaaggaaatgagactgttctagatgcttgcagtgcccccgggggaaaagctgtccatatagcttcttatttgacgacaggccagattatagcacttgacttgtatgatcataaactaaaattaatcaaagataatgcagaccgtctaaaagccgccaattatataaagccgcaaaaattagatgctagaaaagtccataaatactttgctaaggatacatttgataaaattttagttgatgctccttgttcaggaattggcttgattaggcgtaaaccagatattaagtataataaggatagtaaggattttaccagcttacaaaaaattcagttagagattttagatagtgtttgccaaactataaaaaaaggtggtataataacatacagcacatgtactatttttgctgaagagaatcagatggtacttaaacaatttttggaacagcatccaaattttgaacaggtaaaattaaatcataaaaagaaagatattgtcgttgatggttgtcttcttattacacctgaacaatatctaacagacggtttttttatcagccaagttaagcgtatttcg

SEQ ID NO: 36357 - DNA, 432 bp, Streptococcus mutans
atggcactctctagattagatagtctttatatggcagttgtcggggatcattcgaaaaatcctcatcatcatggttttttagaagatgtggaacaggttaatcttaataatcccacttgcggtgatgtcatcagtttatcggttaaatttgatggtgataaaatatcagatattgcctttgcaggtgatggctgtacgatttcaaccgcttcatccagtatgatgacagacgctgtcattggcaagactaaaaaagaagcccttgaattagcagatatcttttctaaaatggttcaaggggaaaaagatgatagacaaaaggaattaggagatgcagcatttcttgcgggtgtttccaaatttcctcaacgtatcaaatgctcaaccttggcatggaatgcccttaagaaagctattgagcgacaagaaaat

SEQ ID NO: 36358 - DNA, 1848 bp, Streptococcus mutans
atgattcagattggcaaattatttgctggtcgttatcggattctccagtctatcggacgaggtgggatggcggatgtttatttagctaatgatttgattttagataatgaggaagtggccattaaggttctacgtacgaattatcagacagatcaggttgctgtgacacgttttcagcgggaagcacgtgccatggcagaacttaatcatcctaatattgtagccattcgtgacattggagaagaagacggtcagcaattccttgcaatggaatatgttgatggcgccgacttgaagaaatacattcaagatcacgctcctttatcaaatgctgaagtcattagaatcatgaaagaggttctttctgctatgactcttgcccaccaaaagggcattattcatcgggatttaaaacctcaaaatgttttactgaccaaagatggaacggctaaagtaacagactttggtattgctgtggcttttgctgaaacgagtttgacccaaaccaattcaatgctgggttcagtacattacttatctcctgaacaggcgcgtggttctaaggctactgttcaaagtgatatctatgcaatggggattatgctttttgaaatgctgacagggcatattccctatgatggcgatagtgctgttacaattgctttgcagcattttcaaaagcctttaccatctattattgctgagaataaaaatgtccctcaagctcttgaaaatgttgttattaaagcaacagctaaacgattaacggaccgctatcattcaacgcaggagatgttgcaggatttaagaacgtctctgcagccgaatcgcagccgtgaaagaaagcttgttttcagtgatgcttcagatacaaaaccactaccaaaactggaacaggcagcagcaaactctttagctgctcagtccttaaaaaacaaaacttccaatcaggataaagtagatcataaatctaagcctaaaaccaaaccacaacctaagcctaagaaaaaaagacattttttagctcgtttctttaaaatcttctttatattagttgccattggtattgctgttttgacctacctggttctgacaaaaccgagtactgtttcagttcctgacgtttcaggagataaattatcaacggccaagatgattattagaaaatcgggtcttaaggtgggtgacgttcaaaaaattgaggatgataacgttggtgctggaaaggtcgtaagaactaatccaagtgcaggcagtaaaaaacgtgaaggttctagtgttgatatttttgtagctagtgctaagggatttaagatggaggactataccggtcaagattacaaggatgctattgataatctgactaataattatggtgtttctagggacagtattgttcttaaggaagtttcatctgatgactacagtggtggaactgttatcggtcaatcaccaaaacccggaaagacctatcatcctagcagtgataaaaaaataactctcaaggttgtcaaagtcactatgccaaatcttaaaaattctacttatgaagaggctgtcagtactttaacagctatggggatttcttcaagccgtataaaagcttatgatgccagcgattactcatcagaaatttcatcaccatcatcttcgtcactcgttgtcggtcaaagtccttattatggtaatactgtcagtctgtcatctaatgatgatattatcttgtatgtttcaacatcaggtggctctcattctggttcgtcgtcgtctgaatcttcgaacagtgaaggaacaacatcaagcgaagcctcgacagactctagttcaagtgcgacgacaacttcacat

SEQ ID NO: 36359 - DNA, 1002 bp, Streptococcus mutans
atgaaaaaaaagacgatcttaatgatttttttatacgcggcagttaccatcatttccattgtttttgtcattattaacagtcttaatcttgatttgaaaagtttgttagctgattggcttgttcttgagcaatttattttatcgcttcttgctgcctttatttccttgacttttcttttactgttggtatggatgattttagatgataatagcaaacgccacctcaaccaaaatttaaaacgcattctgcttaatcaggccatcacacaggaagatgataccgaattagggaaaaacgttaatcgtctttctcgtaaaatgcagcagttaactaataatttgcaaaagacggaaaatacctatattgccagcagtcaggaaattgtcaaaaaggagagaaaacgcattgctcgagatttacatgacacagtgagtcaagaactgtttgcctcttctatgattttgtcaggtgtttctcataatcttgatcaattggaaaaaaaacaactgcagacacaattattagctattgaagatatgctcaacaatgctcagaatgacttgcgagtccttttactgcatttgcgtcctacagaattagaaggaaagacactttcagaaggacttgctatgattcttagagaattaactgataagagtaatattgaggttgtttataaggaagatattggggaacttcctaaaacgattgaaagcaattttttccgaattgctcaagaatttatcagcaatactcttaaacatgccaaggctagtcgtctagaagtttatttgtatcaaacttcttcaaaagttcagctgaagatgattgatgatggtattggttttgatatggatgtcgttcgagatttgagttacggcttgaaaaacatcgaagatcgcgttaatgatttagctgggacagtaaagtttttaagtgctgaaaataagggggttgttatggatatccatgtaccaataatgaaaggggatgctgatgag

SEQ ID NO: 36360 - DNA, 1050 bp, Streptococcus mutans
atgagtaaggaaaaaattttacaagtcaataacctccatgtcaattttcatacctatgcaggtgaagtaaaagctattcgcgatgttagtttttatttagaaaaaggggaaacgctggctattgttggcgaatctggttctggaaagtcggtaaccacacgaactttaatggggttgtcagcaaagaatgctgagattttcggagatattgagtttaagggacacaatctaaatgatttgaaggaagaagactgggttcatattcgcggaaatgatatttccatgattttccaagatcctatgacaagtttggatccaaccatgcgtattggccttcaaattgctgaacctattatcaagcatgaaaaagtaactaaaaaagaagctcttaagcgggctcttgacatgatggaaaaggttggtattcccaatgcgcaagaacacatcaacgattatcctcaccagtggtcaggcggtatgcgccagcgcgctgtcatagctattgctttggcaactaatcctgaaatccttgttgcagatgaaccaacgacggctcttgatgttaccattcaagcacaaattcttcatttaatgaaagaaatccaaaagaatactgactcttccattatctttatcactcatgatttgggtgtcgttgcaggtatggcagaccgtgttgctgttatgtatgcaggcaagattgtggaatatggtacagtagatgaggttttctacaacccacagcatccctacacttgggggcttctcaattcgatgcctacaactaatacagcttcaggcagtttgcattcaattcccggaacaccgcctgacttgttgcagccccctcaaggagatgcttttgctccaagaaatgaattcgctcttgatattgatcttaaggaggagccgccattttttaaagttagtgattcacattatgctgctacttggctgttagatgatcgtgctcctaagattactccgccggaaagaattttgcagcgttgggaaaaatggaagagcttacagggagaaaagcataatgac

SEQ ID NO: 36361 - DNA, 1008 bp, Streptococcus mutans
atgatcgtgctcctaagattactccgccggaaagaattttgcagcgttgggaaaaatggaagagcttacagggagaaaagcataatgactgaaaatcgtaaaaaactagttgaagtcaaaaatgtttctttgacattcaataaaggaaaagccaaccaagtaaaagcaatagataatgtcagctttaatatctatgaaggagaagtttttggacttgttggggaatctggctcaggtaagacgacaattggccgtgctattttaaaactttacaatattgataaaggagaaattgattttgaaggcgaaacgatttcaaaattaaagggaaaatcattgtttaattttcgtaagaaagcgcaaatgattttccaagatcctcaagccagcttgaatagtcgcatgaaagttagggatattattgctgaaggacttgatgttcataaattggttaaaaataaggcagaccgtgacgcaaaagttcaggatttactggatctggttgggttaaataaggatcatttaacacgttatccgcatgaattttcaggcggtcagcgtcaacggattgggattgctcgtgctttggcggttgagcctaaattcattattgctgatgagcccatctctgctttggatgtctctatccaagctcaggttgttaatctcatgcaaaaactgcagcatgaacagggactaacgtacctgttcattgctcatgatttatcaatggttaagtatatttcggatcgcattggtgtgatgcattggggaaaaattgtggaaattgggacatctgatgaggtttaccatcaccccattcatccttatactcaaagtctcttatcagctgttcctgaacccgatccagttttagaacgtcaacgtattcataaagtttatgacccagttgatgagttagatgggcaggaacgggaaatgagagaaattacaccggggcattttgttttagcaacagaagaagaggcaaaagcctataagaaaaaa

SEQ ID NO: 36362 - DNA, 1356 bp, Streptococcus mutans
atggaaggaaagaaaaaatttagtttatttagtgcagtactttctgttatttgtgtcgtctttgttgctgaagcggctgctccggtagctgctattgggaattctcaattcttttggtggctctttttattaattgcctttcttctaccttatggtttgatttcatctgaattgggaacaacttatattggtgatggtggtatctatgattgggtgaccaaggcttttggtcataaatggggctctcgagtggcttggtattattggattaattttccactctggctagcttctctggcagttatgacaccgggtttattaacaacagttactggacacaacttttcaactgttacagctattattgttgaactcatttttatttggctggttatttggattagtttttatcccgtgagtgatagtatttggattttaaatggtgcagctgtcattaaaatgttattggccttacttgttggtggcttgggcctttatgtggccctgaccaagggcatggcaaatgaaatgaccttaaagtcactgttgccttcttttaatctgaacagtctctcttatatttcagttattatttttaacctgctcggttttgaggttatttgtacttttgcaggagatatggaaaatcctaaaaagcaaattcctcaatctattattgttgcaggtctggtaattgcagctatctatattttttctgcttttggtattggcgtctcaattccaacggataagatttcaaccagcagtggtatgatggatagttttaaattattaacaggctcaacgggcggttggtttatcatgaccatggcttttctatttttattgaccttgtttggcaatatgatttcttggtctctcggtgttaataatacagcttcttatgctgcagaaaatggagacatgccccaattttttgctaaaagaagtcgcaaaagagatatgccaattggtgctgctcttgctaatggtattgttgctagcattgtggttgttattgccccatttttgcccaatcaagatttattctgggctttcttctccttaaacttagtcatgtttttattgtcttatgttcctgtatttccagcatttttcaagttgagaaaaatagatccggatacaccgcgtccttttaaggttagtggcaatgatagttttttgagattacttgttattttaccaatgattttaattatcatttccttgatttttactgctctaccactggcttttgattctgaaactttagcttcaaaattaccaataacaattggttctcttatttttatagggataggtgaacttattattatcatcaaaaaaataaagaaa

SEQ ID NO: 36363 - DNA, 1275 bp, Streptococcus mutans
atgaaaattgataagcggcatttgctgaattattcgatattattgccctatttaattttatcagtgttaggtttgattgttgtttattcaacaaccagtgctagcttaatacaaaatggtttaaatccttttcgttctgtcataaatcaggctgccttttgggttattagtttattggctatcctttttatttaccgcttaaaattaaattttttgaagaacagtggtgttttaactgttatgatgatgatagaagtggtgctgcttttaattgcgcgtttttggacacaggaagttaatggtgctcatggttggatagttattggtcccatcagctttcagccggctgagtatttaaaagttattatggtctggtttttggcttttacctttgctaggcggcagcaatctattgaaatttatgattatcaagctttgaccaaacgtaaatggtggccgaagcagttgagtgatctaaaggattggcgtttttattctttagttttgattcttttggttgcagcacagcccgatttgggaaatgcgaccattattgttttaacagctattattatgtattcagtcagtggtattggctatcgttggttttctgctttattaactgggattattacgttatcagcaatcttcttaggtctcatcaatatggttggtgttaaaacgatgagcaaggttccagtttttggctatgttgctaaacgctttagtgcttttttcaatccgtttaaggatgtgacagactctggacaccagttggctaattcctattatgctatgagtaatggtggttggctgggacgtggtttgggcaattctattgaaaagcgaggctatcttccagaggcacaaacggattttgtcttttcaattattattgaagaattaggactgattggagcaggactcattttagccttgattttctttttgattttgcgtattctgctagttggtgttaaagctaaaaatccttttaactccatgattgctttgggtattggttctatgatgctgatgcaggtatttgtcaatattggtggaatatccggccttattccttcaacaggtgtaacttttccctttctatcacagggaggaaacagtcttcttgttttgtcggtagctattggttttgtattaaatattgatgctaatgagaaacgagaagatatttatcaggaagtggaagaagccgagcgtgatgatacagatgtttttatagatcctcaatcgcaacaggagacttatggagaa

SEQ ID NO: 36364 - DNA, 2454 bp, Streptococcus mutans
atggtaattccgcttttaactcaaaagtacacaaatgatgttcaaaagaattctcaaaaacactttggttatttgacggaacgcatgtacagttatcgtgataaggtacttgataaaaagccttatattgatgccgaacgtgccatacttgctacagaagcctataaagaacatcaagaaaaaccaaatgtccttaagagggcttacatgcttaaaaacattttagaaaaaatgtcgctctatattgatgatgagacgatgattgttggaaatcaagcttctagtgataaagatgctccaatctttccggaatatacactcgaatttgttttgaatgaattggacctctttgaaaagcgtgacggtgacgttttctatatcacagaagaaaccaaaaagcagattcgtgacattgcccctttttgggaaaataataacttgcgtgctcgtgcaggtgcgatgctcccagatgaagtacaggtctatatggaaacaggcttctttggtatggaaggcaagatgaattctggtgatgctcatttagcagtcaattatcaaaagttgctggaattgggacttgtcggttttgaagaacggacacgtgaagctaaggccgatcttgacttaacagacccagctagtatcgataaatatcatttttatgattctattttagtgacaattgacgcagtcaaaacttatgcccaacgttttgtaactttagctaaagagatggcagaaactgcagcggctaagcgccgaagagaattactggagattgcagccatttgtgaacgggtgccttattatccagcacgcacctttgcagaagctgtgcaatcggtttggttcatccaatgtattttgcaaattgaatcaaacggtcattccctttcttacgggcgtttcgatcaatacatgtatccttatgttaaagcagatttagaagcaggtcgtgaaacggaagactccattgttgaacgtttgaccaatttatggattaagacacttaccatcaacaaggttcgcagtcaagcacatactttttcatctgctggctcaccgctttatcaaaatgtcactgttggaggtcagacgcgcgctaagaaggatgcagttaatcctttatctttccttgttttgaaatctgttgcgcagacacatttaccacagccaaatttgacggttcgttatcatgctggtctcaaccctgattttatgaatgaggcgattgaggtcatgaaacttggttttgggatgccggcctttaacaatgatgaaattattattccatcattcatcgctaagggtgtggcagaagaagacgcttacgattactcagcaatcggctgcgttgaaacggctgttcctggcaaatggggctatcgttgtacgggtatgagttatatgaattttcctaaaatattgcttattaccatgaacaatggtattgatccagcttctggcaaacgctttgcgcctgaatttgggcattttgtcgatatgacatcttacgaagatcttaagtctgcatgggataagacgattcgctatttgacgcgtatgagtgttattgtcgaaaacgctattgacctcagtttggaacgggaagttccagatattctttgttctgccttgacagatgattgtattggtcgtggcaaacatttaaaagaaggtggtgccgtttacgactatatttctggacttcaagttgggattgctaacctttcagattctcttgcagctgtcaaaaaattagtttttgaagaaaaacgcttaacaacagctgaactttgggaagctttgcaatcggattatgctggtgaacatggcggagaaattcgtcaaatgctgattaatgacgctcctaagtacggcaatgacaatgattatgctgatcaattggtatgtgattgttacgatgtttatgttgatgaaatcgctaaatatccaaatacacgctatggtcgaggcccaatcggtggtattcgttattcaggaacatcatccatttcagctaatgttggtcaaggacgtggaacactagcaactccggatggccgtcatgcaggggcaccgcttgcagaaggctgttcaccatctcataatatggataaaaacggtccaacttcggtactcaaatcagtatctaaattaccaaccgctgaaattgttggaggtgtccttctcaatcaaaaagtaaatccacaaaccttatcaaaagaagaagataagcaaaaactcattgcacttcttcgagctttctttaatcgtttacatggctatcatattcaatacaatgttgtctctcgtgaaactttgattgatgctcaaaagcaccctgagaaacatcgcgatttgatcgtacgggttgcgggctactcagccttcttcaatgttctttctaaagcaactcaagacgatattatcgctcgtacagaacatgcactt

SEQ ID NO: 36365 - DNA, 1194 bp, Streptococcus mutans
atggcaaaagaaaaatacgatcgtagtaaaccacacgttaacattggtactatcggacacgttgaccatggtaaaactaccttaactgcagctatcacaactgtactggcacgtcgtcttccaagtgcagtaaaccaaccaaaagattattcatctattgatgctgctcctgaagaacgcgaacgcggtatcactatcaatactgcgcacgttgagtatgaaactgaaaaacgtcactatgctcacattgatgctccaggacacgcggactatgttaaaaacatgatcactggtgctgcccaaatggatggtgctatccttgtagtagcttcaactgatggaccaatgccacaaactcgtgaacacattcttctttcacgtcaagttggtgttaaatacctcattgtcttcatgaataaagttgatttggttgacgatgaagaattgcttgaattggttgaaatggaaatccgtgatcttctttcagaatatgatttcccaggtgatgatattccagttattcaaggttcagctcttaaagctcttgaaggcgatactgctcaagaagatatcatcatggaattaatgcatactgttgatgactacattccagatccagaacgtgatactgacaagccgctccttcttccagtcgaagatgttttctcaatcactggtcgtggtactgttgcttcaggacgtattgatcgtggtactgttaaagttaacgatgaagttgaaatcgttggtatccgtgatgacattcaaaaagctgttgttactggtgttgaaatgttccgtaaacaattggatgaaggtattgcaggggataatgttggtgttctccttcgtggtatccaacgtgatgaaatcgaacgtggtcaagttcttgctaaaccaggttcaattcacccacatactaaattcaaaggtgaagtttatatccttactaaagaggaaggtggacgtcatacaccattcttcaataactatcgtccacaattctacttccgtacaactgacgtaactggttcaattgagttgccagcaggtactgaaatggttatgcctggtgataacgttactattgacgttgaattgatccatccaatcgctgttgaacaaggtactactttctctattcgtgaaggtggacgtactgttggttctggtatcgtttcagaaatcgaagct

SEQ ID NO: 36366 - DNA, 666 bp, Streptococcus mutans
atggaatttatgcttgatacactcaacttagcagacattgaaaaatgggcagcaatcctaccattagctggggtaacttccaacccatcaattgctaaaaaagaaggaaaaattgatttttttgagcaagtgaaaagggttcgtgccattattggtgaagaaccaagtattcatgcacaagtggttgcggcagatgtggaagggattattaaagatgcccacaaacttcaagatgaacttggcggcaatctctatgttaaagtgcctgtctctccaactggcttaacagcgatgaagcaactaaaagaagaaggatttcaaatcactgctacggctatttatacagtttttcaaggccttttagccattgaagctggcgcagactatcttgccccttactataatcgtatggaaaatcttaatatagacccaattgaggtgattggtcaacttgctcaggctattgagtgtcaacaagcttctgcaaaaatcttggcagcaagctttaaaaatgttactcaggttgccaaggctttagcagcgggtgctaaagccgttactgctggtgcagatatttttgctgctggttttgccaatccatccattcaaaaagctgttgatgattttgcagcagattgggaaagcacacaaggacgtccttatatt

SEQ ID NO: 36367 - DNA, 948 bp, Streptococcus mutans
atggcaaaaagaaaaattgtcattgcattagggggaaatgcaattttgtctagagatgcttctgccaaagcacagcaggcagcattggctcagactgccaaatatctggtccaattcattaaaaatggtgatgatttagtcattactcatgggaatggtccgcaggtaggtaatctgttattgcaacaaacagctgctgattcttatgacaatccagcgcttcccttggataccctagtggccatgacagaaggttccattagttattggttacaaaatgccttaatcaatgagttaaggaaacaatccattgataaggaagttgtgtctatggtaacagaagtacttgtatcagccgaagatcccgcttttgaccatcccagtaaacccatcggtccttttcttagtgaggaagaagcctatctgcaagaaaagatgactggtgctacttataaagtagatgcaggcagaggttggcgaaaagtagttgcttctcccaagccaattgccattcaggaaatagcaacgataaaatctttgcttaatacaggagctgttgttattacagcaggtggcggtggcattccggttattgaagaccctaaaacaaaagaattaatgggtgtggaagctgttattgataaagattttgccagtcaattattggccgaaaaaatcaaagctgatttatttattattttgactggtgttgatcatgtttatattcattatggtcaacctaatcaagaaaaattagaaaaagtaacagcaagtcagctaaaagcatggaaggatcaacaacaatttgcagcaggtagcatgctaccaaaagtagaagcagcaattgcctttgttgaagcacatcccagtggaaaagccattattacttctttagaaaatatagcaaatgttatttcagaaggaagtggcacacaaattacggctaat

SEQ ID NO: 36368 - DNA, 924 bp, Streptococcus mutans
atggcaaaaatttataacaacattactgaattaattggcaatacacctattgtaaaactcaacaatgttgttcctgaagatgcagctgatgtttatgttaaacttgaagctttcaatcctggttcttccgttaaagatcggattgctttaagcatgattgaagatgctgaaaaacgtggtctcatcaaacctggagataccattgtcgaaccgacaagtggtaatacaggtattggactttcatgggtcggcgctgccaaaggttacaatgtcattattacaatgcctgaaacaatgagcgttgaacgccgcaaaattatacaagcttacggtgccaaactcgtattgacaccaggaagtgctggtactaagggtgccattgacaaagctcacgagattgccaaagaagttggtggttgggtgcctctgcaatttgacaatccagctaatccaaaaattcacgaattgacaacaggtcctgagattctggaagcatttggttcacatggacttgatgctgtcgttgctggtattggtactggtggtacgattactgggatttcacgtgcccttaaaaaagacaatcctgacattaaaatctatggattggaagctgatgaatctgctgttttgtcaggtgacaaaccggggccccataaaatccaaggtatctcaacaggctttatcccagctgcattagatactcattcttatgatgaagttatccgtgttaaatctgatgatgctttggctactggtcgctacttcggcggtaaggaaggattcctacttggcatctccgcttctgctgctgtctgggccgcacttgaagtcgctaaaaaactcggtaagggtaaaaaagtcttggctattgcacctgataatggtgagcgttatctttcaaccgcactttatgaatttaac

SEQ ID NO: 36369 - DNA, 1323 bp, Streptococcus mutans
gtggagctgtttattgacagctcagtatcaagaattatgacttcagttgttgttgttggaacccagtggggagatgaaggtaaaggaaaaattaccgattttttatctgctgatgcagaagtgattgcacgttatcagggtggagacaatgcagggcataccattgttatcgatgggaaaaaatttaaactgcatttaattccgtcaggaattttctttcctgaaaaggtttctgttattggtaatgggatggttgtcaatcccaaatcattggttgaagaattagattatcttcatcaagaaggtgttgcaacagataatcttcgtatttctgatcgtgcccatattattttgccttatcatattaaacttgaccaattacaagaagcgtccaagggggataataaaatcgggactactaataaaggaatcggccctgcctatatggataaggctgcacgcgttggtattcggattgctgacttgcttgataaggacatttttgcagaacgtctaaaagcaaatttggcagaaaaaaatcgcctttttgaaaaaatgtatgagtcgtctccagtagcctttgatactatttttgatgagtactatgcttatggtcaaaagattaaagattatgtcactgatacctctgttatcctaaataaggctcttgataaagggagacgggttctctttgaaggagctcaaggagttatgcttgatattgaccaaggaacctatccatttgtaacttcatcaaatccagttgcaggtggcgttaccatcggatctggtgttggaccaagtaaaatcaataaggttgttggtgtctgcaaagcctataccagccgtgtaggtgatggtcctttccccacagaactttttgaccaaacgggagagcgcattcgtgaagttgggcatgaatacgggacaacaacagggcgtccgcgccgagttggttggtttgactcagttgttatgcgtcacagccgccgtgtatcaggcattaccaatttatctcttaactgtattgatgtactttcaggtcttgatatcgtaaaaatctgtgtagcctatgatttggatggaaaacggattgatcactaccctgccagtctcgaacaactcaaacgctgtaaacctatttatgaagaattgccgggctggtctgaagatattacaggggttcgcagtttagaagatcttcctgaaaatgctcgtaattatgtccgccgtgtaagtgaattagttggtgttcgtatttctactttctcggttggtccagatcgtgatcagactaatattttggaaagtgtctggggattg

SEQ ID NO: 36370 - DNA, 1819 bp, Streptococcus mutans
agaggaaaacatatgaatattcttattaatattctaacttggttctcgcaaaatattttgcaaaaaccggccttttttgtaggtatcttagtattaattggatacttgctcctcaaaaaaccattacacgatgtatttgctggtttcattaaggcaactgttggatatatgattctggatgttggtgctggcggtctagtgacaacctttcgtcccattttagcagcacttaattataaattcaaaattggtgcggcggttattgacccatattttgggctgacagcagcaaatgaaaagattgctcaagagttccctagatttattggtacagcaacaacagcgctcttgattggcttcttcttcaatattcttctggttgcccttcgtaagattactaagattcgtaccttgttcattacaggtcacatcatggtacaacaagctgcgacagttaccttgatggttatccttttaattccagcttttcgcaatcagttctggggaactttagctgtagggatcatctgtggtctttattgggcggttagttctaatatgactgttgagccaacacagcgcttaactggcggcggtggttttgctatcggacaccaacagcaatttgctatttggtttacagataagattgctccaaaacttggtaaaaaagaagaaaatttggacaacttgaaattgccagctttcttaaatatcttccatgatacagttgttgcctcagcaaccttgatgctcgtcttctttggtgctatcttggctatccttggtccggatatcatgtctaatccaaaggtgattacaacgggtaccttgtttgatccaaccaaacaagccttctttatgtacgttgttcaaacggcctttactttttctgtttatctttttgtcttgatgcaaggtgtgcggatgtttgtcggtgaactgaccaatgccttccaaggtatctctaacaaacttctccctggttctttcccagcagttgacgttgcggcgtcctatggttttggatcacctagtgcagtcctctttggttttgcaactggacttattggacagttaattacaatcgtgttattgattgtctttaagaatccagtcttgattatcacaggtttcgttccagtattctttgataatgctgcgattgctgtttatgccgacaaacgcggaggttggaaagcagcagttgttctgtcattcttatcaggtgtgcttcaagtggcacttggtgcagttgcagttgctcttctaggtctggcaggatttggcggttatcatggtaacattgactttgaaattccatgggtgccatttgcttatcttttcaaatatgcaggagttatcggttatgctcttgtggcagtcttcttacttgctatcccgcaaattcaatttgctaaagcaaaagataaggaagcctactatcgtggagatgctcaagcagaataatcagctaatatgaatttagcctatcattgtgttataataggcacgatcatttataggagggaaaattatggttaaagttcttacagcatgcggaaatggcatgggctcatcaatggttattaaaatgaaggttgaaaatgctttgcgtcaattaggtgtatcggatattgaatcagcatcatgttcagttggcgaagccaaaggtttagcttcaaattatgatattgttgtcgcttcgaaccacctcattcatgaattggacggccgtacgaatggtaaattaattggtcttgataatttaatggatgataatgaaattaagacaaaattggaagaagcattgaaataa

SEQ ID NO: 36371 - DNA, 483 bp, Streptococcus mutans
atgaacttagcacaagcctttaaagaaaatcattcaatccgattagggttaacagccaaagattggaaagaagctgttaaactgtctgtcacccctcttattgaaagcggtgcagtaaaacctgaatactataatgctattattgagtcaactgaaagttatggaccttattatatcttaatgccgggtatggctatgcctcatgctcgtccagaagcaggcgtgcagcgcgatgccttttcattagtgacattgacagagcccgttacctttacagatggcaaagaagttcaagttctccttgctcttgcagcgactagttcaaaaattcatacatcagtagctattccccaaatcattgcactttttgaattagatcattccattgaacgccttgttaattgcaaaacgccagaagaagtgcttgctatggtagaagaatctaaaagcagtccctatcttgaggggcttgaccttgattca

SEQ ID NO: 36372 - DNA, 1212 bp, Streptococcus mutans
atgtacacatataaaatcggaatttcaaaagaagaacatgataactttatcaaaaacagcagtcaaaccaatctactacaaagcagttcttgggcaaaagttaaagatgaatgggaaaatgagcgaataggtttttatcaagatagcaaacttgttgcctctgcctctattttaatcagacctttacctcttggtatgacaatgttttacattccaagaggtcccgttatgaactatcaagataaagatttggtgaattttgtattgacctccttaaaaaagtttgccaaaagaaaaagagccctatttattaagtttgatccttttattttgctgaaccatcatcaaattgatgaggaagccatcaataacccgcaagcacaaactattattgacactttaaagcatttaggctgtgaatggctgggacaaacaagtgatatgggagaaactattcagccgcgtttccaagccaatatctacgcagaagggttctctgaagctaacttatccaaaaaaatccgacaatccatccgtactgccaaaaataagggagttagcattcgctttggtggctatgaacttttggcagacttctccgatttaatgaaaaaaacagaagatcgcaaaagcattcaccttagaggcattgattactaccgcaaactcttagacaattatccccaacactctttcattactttggctagtctcaatttgaaagaaagacttaccgaactagaaagtcaaaggaaaaaagctcaaaataaccttgctaaatttggtgataatgttaaaccgagcaaaattgataatacaaaaaaagaaatcgaacgtctcagtgacgagattgcctttcttcaagagcatttatcccaaggtaaagataccgttcctctttcaggaacattatctcttgaattcggtaaaacatccgaaaatgtctatgctggtatggatgacgaatttcgccgttatcaagctgctatctatacttggtttgcaacggctaaccatgcctttgaaagaggcagtcactggcaaaatatgggaggtattgaaaatgacctctctggcggactttacaacttcaaatcaaaattcaaaccagaaattgaagaatttattggtgaatttaatttaccagtcagcccgctctataaattagctaatattgcctataccatacgtaaaaaacgaaggagcaagcat

SEQ ID NO: 36373 - DNA, 807 bp, Streptococcus mutans
atgtcaattaaattggttgctgtcgatattgacggcacattacttaatagtaagcgtgaagtaacacctgaagtttacactgctatccaagatgctaaaaaagccggcgtcaaggtcgttattgcaacaggccgccccattgctggtgtaaccgatttactagaaaaattaaatctcaaggatcaaggagattacgtgattacttttaacggtgctttagtacaagataccgcaactggtgaagacttgattaaagaaacgttaacttatgatgattatttagatattgaattgctcagtcgcaaattaggtgtgcacatgcatgctatctctaaagaaggtatttacactgccaatcgtgatatcggcaaatacactgtccatgaagcaagtttggttaacatgccagtctattatcgtactcctgaagaaatggttggcaaagagattgtgaaaataatgatgattgacgaacctgaaatgttagatgctgctattgctcaactgccagccagcctttatgaacactacacagttgtcaaatcaagacctttttatttagaaatcatgaataaaaaagtcagcaaaggcactgctatcgttcatttagcagaaaagttaggacttagcagagatgagacaatggctattggtgatgaggaaaatgatcgtgctatgctagaagctgttggaagccctgttgtgatggaaaatggtattcctgaactcaaaaaaatggctaagtacatcaccaaatcaaacgacaacagtggggtcgcttatgcaattaaaaagtgggtattaaac

SEQ ID NO: 36374 - DNA, 738 bp, Streptococcus mutans
atgactcagatttttgctcatagaggaagtaaagttgattgtccggaaaatacacttgctgcttttaaaaaggcgattcaggtggggtgtgatggcattgagatagatgttcaccgaacaaaagacaatcaacttgttgttattcatgatgaagcagttgatcgaaccagcaatggctctggattggtcagacaactgacattaaagcaaataagaatgcttgatgctggttcttggtttcatccagcttatttttgtgagaaaattccaaccttagaagaagttttaaattttttggaagagtctggttttcagggaactctcaatctagaaatcaaaaccaatagatatccttatcctaaaattgaaaagcaaattgcacaaactatgcaggctaaaaaacgttctttttcgcatatttattctagttttaatctttttagtttatatgtaatgagaaaacatgatcctaaggctgagttagcttatttaatgaaatttcatccttttcatttttggttggcacaacagttaaaatttattaagactgtccattcacacagttctttttatgaaaatcaagtgactaaaagaaaaaataaaaaaccatttcggctttggacggttaataatgatgatgacatgaaaaaattctttttgtctgggatagaaggaattataacagataaaccagaagaagctgttaaactcagaaaatcattacaaactaaaaaagaa

SEQ ID NO: 36375 - DNA, 732 bp, Streptococcus mutans
atgagatatattctagaagtaaatggtcttacgaaaatttatccagcttttgaactaaaaactactagctttcatattgaggctggcgaagttatgggattcataggtagaaacggtgcaggtaaaacaacagcgctaaaatctattctaaatcttgtacatcctgaagcgggcagtgttcgtattcttggaatgaactatctggataatgaggataaaattaaacagcagattggttatgcagtaggtggagtcagctattataaaaggaaaaagataaaagaaattgtggcaattactcgtgttttctataatagttgggatgacgaggagtatcaacattatctcactgtatttaatcttgacgaaaataaaaagattatggagctttctgagggtatgaaggtgaagttttatcttaccttggctctttcacatcatgcaaaacttttaattttagatgagccaacaagtggacttgacccagtatctagagatgagatgaatgaaattttccgaaaactggctaaaaaaggtgtagctattttattttccacccatatcaccagtgatttagataaatgtgcggatacgattacctacatcaaaaatggagaattacttttatcgacaaagaaagaagattttatccattattacgcaaaagaaataggtggtacaccgacacttgaagatattatggtgcatatcgaaagagaagaggtgaatctg

SEQ ID NO: 36376 - DNA, 1974 bp, Streptococcus mutans
atgtcagatttatcggttaatgccattcgctttttaggggtagatgctattgaaaagtctaagtcgggtcacccgggtgttgtcatgggcgctgccccaatggcttacagtctatatactaagcatttacgtgttaacccaagtcagccaaattggattaaccgtgaccgttttgttttgtcagctggtcatggctcaatgcttttatatgctctcttgcacttgtcgggatttgaagatatttctattgatgaaatcaaaaatttccgtcagtggggctctaaaacaccggggcaccctgagtatggccataccgtaggtgttgatgtgacaacaggccctcttggccaagggatttcaatggctgttggtttggctcaagctgaacgtttcttagctgctaaatacaatcgtgaaggctaccctatttttgatcactatacttatgttattgccggtgatggtgattttatggaaggtgtttctggcgaagcgtcatcctatgctgccaaacaaaatttggataaactgattgttctttatgattctaatgatatttgtttggatggtgaaaccaatgatgcgttcactgaaagtgttcgtgcacgatatgatgcttatggatggcatacaatcttagttgaagatggcaataatattgaagctattggacttgctattgaagaagcaaaggcagctggcaaaccttctcttattgaaattaaaactgtgattggctacggtgctccaactaaaggcggtaccaatgctgttcatggtgcaccacttggagctgaagaagcagctgctactcgtaaggctctcaattggggttatgctccttttgaagttcctcaagaggtttatgatgatttcaaagaaaatgttgcggatcgtggtgaagctgcttacgatgcttggtcaaatcttgttggagaatatcgacaagcttatcctaaagaggcgcgtgaagtggatgcaattattgatggaaaagatcctgtggaaatcaaagaagctgattttccagtctacgaaaatggtttctctcaagcaacgcgtaattctagtcaagatgccatcaatgctgcggcagacgtactacctaactttcttggaggatctgctgatcttgcgcattctaacatgacttacattaaagcagatgggcttcaagatgctgatcatccgcttaaccgtaacatccagtttggtgttcgtgaatttgctatgggtactgtcttaaatggtatggctcttcatggcggactgcgtgtttatggcggtaccttctttgtcttttcagactatctcaaagcagctgttcgtttgtcagcccttcaaggagtaccagtaacttatgtctttacccacgattcgattgccgttggtgaagatggccctactcatgaaccgattgaacacttggcaggtttacgtgccactcctaatttggttgtttttcgcccagctgatgcacgcgaaacacaggcagcatggcattatgctttgacaagccaaaacacaccaacagctcttgttttgacacgtcaaaatcttgatgttgaagctggttcaagctttacttcagttgctaagggagcttatgttacttatgaaacagattctgactttaataccattcttttggcatcaggttctgaagttaacttagcagtcaaagcagctaaggaattggaagcacaaggcgaaaaagtacgtgttgtttctgttccttctacagagctctttgatgagcaatctgctgcctacaaagaagctattttaccaaattcagtacgccgtcgtgtagccattgaaatggcagccagccaaccatggtataaatatgttggtcttgatggtgcggttatcggtattgataaatttggagcatcagctcctgctgctcaagtcattgaaaattatggctttacagtagataatgtggttaaagttgttaaggaactgaaa

SEQ ID NO: 36377 - DNA, 627 bp, Streptococcus mutans
ggtaaggtaacagtcaccattaatgaaaaaaatcatcaatatattaaaggaaattataacattcatgtctatgttgattatactgatggcactagtagcggaaccaatattggaaactatagcttgaatgctgataaacctgctgttgctctaccatcttactttattgatattagtagccacaatggaatcatttctgttgccgaattcaatagcttgaaacaacaaggtattcaaggagtggttgttaagttaacagaaggtacaagctacatcaatccatatgcaagttctcaaattgccaatgccagagctgccggtattaaggtttctgcttaccattatgctcactatacttctgcggccggggcacaagaagaagcccgttattttgctaatgcagccagatcctttggtttggaggcatcaactgtcatggtcaatgatatggaagaatcctctatggtgaacaatattaataataatgttcaagcttggcaagatgagatgaggcgtcaaggttatagcaacctgattcattatactatggctagttggttggatatacgcggtgggcaagtagacactgcaaggtttggcatcaataatttttgggttgctcattat

SEQ ID NO: 36378 - DNA, 90 bp, Streptococcus mutans
atgacgtcaaatcatcatgccccttatgacctgggctacacacgtgctacaatggtcggtacaacgagttgcgagccggtgacggcaagc

SEQ ID NO: 36379 - DNA, 522 bp, Streptococcus mutans
atggagaagaaaaccttaaagcaaattagtcgtattgctattttgtcagctttagccattgttttgcggcttgccttttcagctttgcccaatattcaacctatcactgctatctttctagtatgtgccgttttttatggtttttgggaaagttttttaatcatgactgtaaccatgttgattactagttttttgttgggattcggtccttgggtcttggggcaacttatcagctttggtctagttatttgcctttggaaattttgcctttatcctatgacaaaactttttcgatttggtaatattaatggtcttggtctgcagtctgttttggcagggttaatgggaattgtatatggtatcttgattgatacttattctgctctcttattttctactccaattttagcctatatcatagcaggaatgacttttaatttagctcatgctatctcgactttgttcttttacccaattatattatcaatctttaggaggttattgtctcatgaaaaaaataat

SEQ ID NO: 36380 - DNA, 1071 bp, Streptococcus mutans
atgaataagaagaatgaaaaaataaaaagtttaccatataatgctggaatagatttcttacgtatttttgccatgtttatgattgtggtgacgcatgttttggggaaaggcggcattcgctcaactgtaaaagagaattttgacctttattattttgtgacatggggaattcaagtatctgcctatagtgcggttaattgctatgctttgattagtggttacgttggtgttgattcaccttatcgttattcaaaatgtctctcattgtggttacaggtcttcttctatactttattatttatcttattttttacttttttgcaaaagcctataacataccatgattggatacaggctttcttccctattatcacaggtcaatattggtatgtaacagcttattttggactcttgatttttatgcctattttgaatctagctttaagaaagttgaatactaaagatttgaaacatattgtccttttagcgattatcttcttttctgttcttcctgcattattgaataccaaagtagatgaattttcatttgctaagggttttagtatgaactggttgagtgtactgtacattattggagcttatttgaagcggcttgacttaaagcgtttattcagtcgtaaatttttactttttctgtgtttaatggcaatggcagtgacttttataaccaaagtatttattggagatatctggtactggtatacctctcccactcttctttgtgaggcagtgactatttttatcttttttgtcactttagatattaaaaagactggtagattgtttagaataattaaacgaatggcgccggcaacattaggagtttatctttttcatctaaatccccttttggttaaatttcttttaaaagatggttttgagtcatttgtgactgctcctatatggctttttccttttttgattttagggatggcgctccttatttatctcatttcgactctagttgagcttttacggataaaactttttacttatcttaaggtcagacaccttattcttaaattggatacttatctgccgtttgacaat

SEQ ID NO: 36381 - DNA, 466 bp, Streptococcus mutans; identical to SEQ ID NO: 36015

SEQ ID NO: 36382 - DNA, 1554 bp, Streptococcus mutans
atgcgctattcacaaatttgtcgtaaaagtttggctttgctggctacaggaatgattttaactacctcaaccttacctagtataagtattctagctgaggacagtactggagcacctgctaggccagatggacaagctcctgctggaggtggtgctaacaccacaacttatgattacagcggaatcaacagtggtgttctagttgctaatggtagcaaggtcacttccagttccaaaaccaaatcaactacttccgcccaaaatacagctcttgttcaaaacggtggtagtttaacactgcataaagcgaatttaataaaatccggtgatgataacaatggtgacaatgataatttttacggtattaattctattttactagcagtcaatgaaaggtcaaaagcttatgtttcgaattccaaactaaaagctagtagctctggcagtaatgggatttttgcaactgataaggcaaccatctacgctaataaaacaagcattgcgactacagctgataattcacggggacttgatgccacttacaatggcaatattattgctaataagatggccatttctacaaaaggtgctcacagcgctgctattgcaactgaccgtggtggcggcaatatttccaccactaattccagtttaaatactagtggctctggctcacctcttctttattcaacaggcaatattcaagttaatcacgttacaggaacatctagtaacagccaaattgctggtatggaaggtcttaataccattcttattcataattctaatttaattagtaccatgacaaacaaaactgccagtgacccgattgccaatggcgttatcatctatcagtcacaatccggtgatgccgaagcaacaacggggcaaagtgcccacttcgagctcagcaagtctaaattaacttcttccattacttcaggttctatgttctacctgacgaatacctctgcaaacattatccttaatcaatccaccttgaattttgatgcaaataaggctaaacttttgactgtagcaggcaatagtgccaataattggggaacccccggtagtaatggggcaacagttaactttactggccataagcagacacttaaaggggatgttgatgtggatagtatttcgaccttaaatatgtacctgcttgataaaaccaactacactggcaaaactgctgtatcaaccaacagtaccaatatatccccaagcacgtctcctattaccatgaatatttctaaaaattccaaatgggtgctaactggtcattcgacagtaaccaatctcaatgctgaaaaaggtgctaaaattgttgataaagacggaaaaaccgtcagcgtcatctcttcaagcggacaaaaacttgttaaaggtaaaagcaaatatagcctaacagtcacaggaacttacagtcaaaaggtaacaaccagctcaagtaacaaacccagcagcagttacattaaccgtagtgacttcgataattattttaaaacaacaacagcctttgtaaataataccaaaaatacaagtaat

SEQ ID NO: 36383 - DNA, 708 bp, Streptococcus mutans
atgttaattaataacggaaataaagcaggacagacagcagattgtatggtgaaattttacgctactgaacagtctcaaaaaaagtatgaattactcttagaatatccaatagaaacacaggaaattgaggagggacaaattaaagttgtagctttggttgactatttgaataactttaagcaatattttgaagagaatgataatgttagaggtattagggttgaagtcattagaaatgagaaagtcttatttgacgatggacaaggctataatagagaacaaggaagatttgtgaaaccattaggagggactggaattcctataaatcttaacaagactctgttcagagtacccagaggatttaaatttgaaaaagaattaattcaaaaatgtcatcagcccttaaatattggtacaaacacaattgatttttacattctaacagaagaaacagcttctttaaactatgaagttgaattaataagtggaaataaacgtatctgtcctcctcaaaatgaaggtaagattaaacttgatgtttttgttccttgttacaaagttttggataatcatacttatggaaaattttatgaggtacttgaaaaacagggaattaggtgtgatgatatatttacagtaacagatatgaaattaattaaggaagacctagtatataatatatacgaaccattggaaaagatggattgg

SEQ ID NO: 36384 - DNA, 90 bp, Streptococcus mutans; identical to SEQ ID NO: 36378

SEQ ID NO: 36385 - DNA, 407 bp, Streptococcus mutans; identical to SEQ ID NO: 36016

SEQ ID NO: 36386 - DNA, 444 bp, Streptococcus mutans
atgaaaatactcaaacagattattacttacagttttattggtataggaatcggttctttaatgaattatttcatagccatcttctttttcccaaatagtaatccacttggtgtcccaagttttgttcaacttttttcatcagtttcacaggcaacagcagtccaacttttcatttttgctcttctaggcgttttacaaggatttgctagcagcctctttaaaaatgaaaaactcagtctactaaccacaagcttgattcactatttattcattgtcctaccacttctcttagccggatcttatttacactggttttacatgactcggaaatatttcgttttttctttccttttagtttctattatttatatactcatttacttattctgctattttgaaaataaaaaaaacattcaaaaaatcaataagaagctgcatcaaata

SEQ ID NO: 36387 - DNA, 834 bp, Streptococcus mutans
ttggtaacggagttttctttagacattcttctaaagattattaagctcgctcgttcaacctattattaccacttaaagcagctagataaaagcaataaagatcatgctattaaagctgaaattcaagctatttttactgagcacaaaggaaattatggttatcgtcgaatgactcttgaattgagaaatcgtggcttcttggtaaatcataaaaaggttcaacgtctaatgaaagttcttggtttggaggctcgtattcgtcgcaaacggaagtattcttcctaccaaggagaggtgggcaagaaagcagacaaccttattcaacgccaatttgaagcatcaaaaccaatggaaaagtgctacacagatgtgacagaatttgccattccagcaagcggtcaaaagctctatttgtcaccagttttagatggtttcaacagtgaaattattgcttataacctttctacgtcaccgaacttgatacaagtgaaagctatgctagaacaggctttcacagagaaacattacacaaatactattcttcatagtgaccaaggctggcaataccagcatgatttttatcatcaatttttagagaacaaggggattcagccgtccatgtcacgtaaaggaaacagcccagataatggcatgatggaatctttctttggcattttgaaatccgaaatgttttacggttatgagaagacatttaagtcacttaagcaattggaacaagctattgtagactatattgattattacaacaacaaacgtattaaggtaaaactaaaaggacttagtcctgtacagtacagaacgaaatcctttact

SEQ ID NO: 36388 - DNA, 174 bp, Streptococcus mutans
atgaaattcattggtggcgttttttcagttctaaagcatacgacatggccaacacgtaaacaatcttggcatgattttatttcaattctggagtattcagcattctttgctcttgtcatctttatttttgataagctgttaactctgggattggctgaattattaaaacgtttt

SEQ ID NO: 36389 - DNA, 407 bp, Streptococcus mutans; identical to SEQ ID NO: 36016

SEQ ID NO: 36390 - DNA, 466 bp, Streptococcus mutans; identical to SEQ ID NO: 36015

SEQ ID NO: 36391 - DNA, 1434 bp, Streptococcus mutans
atggcagatccgtttggatttttaaagtatgagcgcaaggacaatccctatcgtcctgttaatgagcgtatcaaagattttgaagaattgcagacaactttatcagttgaggaacgtcaaaagcaagctgctcgctgtatgaattgtgggatccctttctgtcatgagggaactttctatggtggcggtcgtgctgtttcaggttgtcccaatgacaatttaatccctgaatggaatgatttgatttataagggcgatttcagacgtgcttttgaacgcttgacacgaactaaccctttaccagaaatgacaggtcgtgtctgcccggcaccttgtgaaaaggcctgtacagaaggcttaaatggttcgggtgttaccattcatgataatgaacgttttattattgataatgcatttgaagaaggctgggtagctgattctggtcgccctattgagcgtacaggttttaaagtagctgtcgtaggttcaggtcctgctggcctgtcagctgcttggcgtcttaaccagttgggtcacagtgtaactgtgtttgagcgttctgatcgctttggtggtttgctcatgtatggtattcccaatatgaaattggataagaaaattgtgcaacgccgtattgatacgatggcttcaattggtattaattttgttgccaatacagaaattggtcgtgatattacagcagaagaattattagaaaaatttgaccgtgtaatcttggcaactggagctagcgttcctcgtgacttggatattccaggccgtgacttaaaaggcattcgatttgctgttgatttcttaacagaaacgactaaaaatcttttggacagtgacacacacgaattaccgcccttgcttgaaggaaaacatgtcttagttattggcggtggcgatactggaaatgactgtatcggtacggctgttcgtttgggagctgctagtgttagacaattagaaattacgccgcaactgcctgaaaagcgtctgccaacaaatccatggccacaatatcctatgattaatcgtacaggctatggacaggaagaagccgattttgttcaacagactgatttgacggactatatcacgtcaacagtagaatttcttggtgaaaatggccaagtgactgcggtgaagacaattaaggttggacctggtttcaaagccattgaaggaactgaagaggtaattaaggcagatcttgttcttcttgctatgggcttcacaggtgctgaaaaagcgctctttgaccaattccgagttgaatgtgtttatgatgactattcaactcgaaatgagaaggtttttgttgcaggtgatgcacgccgtggtcctagtcttgttatttggggaattcgagaaggacgcaaaacagcagagaaaattgatcaaaacctcagaatgatggttacagag

SEQ ID NO: 36392 - DNA, 466 bp, Streptococcus mutans; identical to SEQ ID NO: 36015

SEQ ID NO: 36393 - DNA, 543 bp, Streptococcus mutans
atgaaattctatatcattcgccatgcaaaagttaatatgcggtggcctaaaaagtgtacttcggatgaatttaatcaagcctgtaaaaaatatgatggagcagatattgttgcttttcaaggttccttagagttgcccgtctctaatatatataccagtgaacttatccgaaccaagcaaacagctcagcaactgtttcccttgcagtcttatcagatagataaaaggctcaatgaagttcctttaaaagcagccttttcttctaagataaagctgcccttgatcttttggaatattctaggtagattgcagtggctctttaattctagtaaacaagagggaatcaaagccagcaaggaaagagcagaaaagttttgtgatgatttaatttataagggcgaagatgctatccttatcactcatggtttttttatgataactctattaaaagaattgaaaaagagaggattcattgaaaaagataatggcttcaattttgacaatttgcaagtaatagaagtaaaaaaaagactgttagtttat

SEQ ID NO: 36394 - DNA, 93 bp, Streptococcus mutans
atggcaaacgtaaaactatttgaccaaactggtaaagaagctggtgaagtaacacttaacgacgctatcttcggtatcgaaccaaatgaatcg

SEQ ID NO: 36395 - DNA, 516 bp, Streptococcus mutans; identical to SEQ ID NO: 36291

SEQ ID NO: 36396 - DNA, 366 bp, Streptococcus mutans; identical to SEQ ID NO: 36014

SEQ ID NO: 36397 - DNA, 516 bp, Streptococcus mutans; identical to SEQ ID NO: 36291

SEQ ID NO: 36398 - DNA, 366 bp, Streptococcus mutans; identical to SEQ ID NO: 36014

SEQ ID NO: 36399 - DNA, 573 bp, Streptococcus mutans
gtgaactgcaccccaaaagttagacagaaaaaatctaacttttggggtgtttttattatgaaattgacttatgaagataaagttctcatctatgaactgaaaaaccaagggtatagcttagagcagctttcaaataaatttgggataaaaatttctaatcttagctacatgattaaattgattgatcattacggaatagagatcgtcaaaaaaggaaagaatcgttactattctcctgaactaaaacaagaaatcattgataaagttcttcttgaaggtcgttcacaaataagggtgtctctagattatgctcttccaagtcatggaatgttgcctaattggatagcacaatacaagaaaaataggtatactattgttgagaaaacaagagggagaccacctaaaatgggacgtaagccaaagaagaaatcggaagaaatgacagagctagagcaacttcagaaagaattagaatatctgagagcggagaatgctgttctaaaaaagttgagagaactccgattgagggaagaaaaagagcaagaagaaaaacggaaattgtccgaggattgg

SEQ ID NO: 36400 - DNA, 366 bp, Streptococcus mutans; identical to SEQ ID NO: 36014

SEQ ID NO: 36401 - DNA, 90 bp, Streptococcus mutans; identical to SEQ ID NO: 36378

SEQ ID NO: 36402 - DNA, 366 bp, Streptococcus mutans; identical to SEQ ID NO: 36014

SEQ ID NO: 36403 - DNA, 1638 bp, Streptococcus mutans
atggttacacgccaacatttttcagaagattcaatgcgtaaaaacaattcttatttttcagcattaaaagctactattgaaactgctttttacgaaaatcatgtggtgcctttgaaggagttggcagaagcttatcggttagctgcaaaatctcctaacactattgttttagatacacccgttgctcatgctgaggatttaggtcttccgaaagatgcaaaaattttattggaaaattcaggcggaattgttggacgtactgccaaggctcgtcgaatttttggacaggatagtaaagaagacgcaaaaattcttcaaattattcgtgaagccatttttcaggctaggcatcgtactttttatcgcgcagatgcagttgtagggcttgatgaagcttttatgttacgtgctcatctaatggtaccacaagatgatattaataatctctactcttggcttaataattttcaagttcttaatgatacttatcgtgagcgtttaaagaaatcaaaacgctatgaagagactgatatttatattttttctgatccagagtggagtcatcctgattatccagatggtttggtttattttgataccaatcacaattgtgctgctattctgggactccattattttggagaattaaaaaaagcaaccttgactttggcttggggaacagctaatcgtaataaatatgttgcctgtcatggtggtttgaaaatttttgaaaaagaaggacaaaaaccttatgtggcctccttttttggcctatctggttctggcaagtcaactctcacacatgctaaacataatgggaaatatcggatagatgtcttgcatgatgacgcttttgttatttctgaagaggacggctcaacaattgccctagagcctgcttattttgataagacaaatgactacccagctggtcatcgcgaacagaagtattttgtagcggttcaaaattgcggtgcggctttggataaggaagggcatcttcgccttgttactgaggatatcagaaatggaaatggtcgaaccattaagtctcgtttttcaacacctaaccgtgtggatcgtattaatcaccctattcagtccattttttggataatgaaggatgattctttaccacctcttattagggttaccgaccctattatggcttcaattatggggtgtactttggttacgacgcgatcaacggctgaaaatacgactgacagtttagatgcgttaattattgaaccttatgctaatcctttccgtgtctatccattggtggaagattatattaagtttcaacatttatttgaatcaggagtaaactgttatattatcaatacaggttcttatttgggacaagatattcctaaagagactacgttggatgttattgaacaagtggttgatggtactgcaaaatttgagccttttggttccgtcaaaggctttgaatacctctcttcttctcactataagattcctaattttgataaggcttatgtcaaaattatccgccaacggatgaaaatccgattgcaatatttggaagcttttaatcgaaaaaatcctaaattgtctttgcctgatgaagcaatctcacatttgaaagatgtcttggctaatttaggt

SEQ ID NO: 36404 - DNA, 407 bp, Streptococcus mutans; identical to SEQ ID NO: 36016

SEQ ID NO: 36405 - DNA, 243 bp, Streptococcus mutans
ttgcctatggataccattgaaaatctgattatcgctattgtgaaacctttaatttcacaaccagataattttaccataaaaattgaagatacacctgagtttttggagtatcatcttgacttagattctagtgatattggccgaattatcggtaaaaaaggtcgcaccatcacagcgataagatcgattgtctattcggttccaactcaaggtaaaaaagtgagacttgtgattgatgaaaag

SEQ ID NO: 36406 - DNA, 90 bp, Streptococcus mutans; identical to SEQ ID NO: 36378

SEQ ID NO: 36407 - DNA, 516 bp, Streptococcus mutans; identical to SEQ ID NO: 36291

SEQ ID NO: 36408 - DNA, 183 bp, Streptococcus mutans
ttggctaaaaaatctatggttgctaagagcaaacgcccagcaaaattctctacgcaagcttacactcgttgtgaaaaatgcggtcgaccacactctgtttaccgcaagtttaaactttgtcgtgtttgcttccgtgaattagcatacaaaggacaaattccgggcgtaacaaaagcttcttgg

SEQ ID NO: 36409 - DNA, 90 bp, Streptococcus mutans; identical to SEQ ID NO: 36378

SEQ ID NO: 36410 - DNA, 564 bp, Streptococcus mutans
atgaaaattttaattgtttacacacatccaaatccaactagttttaatgctgaaattctcaaacaagttcaaacaaatctttccaaagaacacactgttagtactttagatttgtacgctgagcatttcgaccccgttttgcaatttaatgaaactcataaacgacgtgatttggctaaggttgctgaaatggagaaataccgcgacttagttacttgggcagatcatctgatcttcatctttcctatctggtggagcggtatgccggctatactcaaaggctttattgaccgagtctttgtagctgactttgcttattcttataaaaaagttggtcttgaagggcatttacaaggaaaatctgcttggatcatcacgactcacaacacaccatcttttgctatgcctttcgtccaagactatggtaaagtcttgaaaaagcaaattctaaaaccttgtgctatctcaccagtgaaattaactgaattaaccagtatcgaaaaaatatctgatgacgagcgccagaaattattgcataaagtagctcaaataacgcgtaatatt

SEQ ID NO: 36411 - DNA, 407 bp, Streptococcus mutans; identical to SEQ ID NO: 36016

SEQ ID NO: 36412 - DNA, 834 bp, Streptococcus mutans; identical to SEQ ID NO: 36387

SEQ ID NO: 36413 - DNA, 834 bp, Streptococcus mutans; identical to SEQ ID NO: 36387

SEQ ID NO: 36414 - DNA, 466 bp, Streptococcus mutans; identical to SEQ ID NO: 36015

SEQ ID NO: 36415 - DNA, 834 bp, Streptococcus mutans; identical to SEQ ID NO: 36387

SEQ ID NO: 36416 - DNA, 132 bp, Streptococcus mutans
gtgaaacgtacttttcaaccaagtaaaatccgtcgtcaacgtaaacatggatttcgtcaccgtatgtcaacgaaaaatggtcgtcgcgtcttagctgcgcgtcgtcgtaagggacgtaaagtcttgtcagcc

SEQ ID NO: 36417 - DNA, 474 bp, Streptococcus mutans
ttgattctgcaggatgcaagaatagatgttccttatactgttgtcagtatcaatttgcctgaagacagtgtgagacatctttccaatctcggtttaaaagtaggcagccgtcttgaattgatttcaaaaacgaaatccagtgctatcgttatgctgaaatccagtcgtttagcttttgatgattcaattttaagtaagattgatgttagcgaaagtcaggaaacggttgaaacattgcctttatctgagttagaagtaggtcaatttgcatatattgacaatatctttgctgttaatgaagctaagcgccgccttatggatatggggttgacgcgtcatacaaagatttatttgaggaaggtagctcctttaggagatccaatagaaatcagtttacgtggttatgagttgaccttgagaaaatctgaagcacagatgattagtgttgttaagatagacaatcaggaggaaaaa

SEQ ID NO: 36418 - DNA, 198 bp, Streptococcus mutans
atgaaattgaggggagtgagatacatgtcaaagacagtagtgcgcaaaaatgaatcacttgacgatgctcttcgtcgtttcaaacgttctgtaactaaagctggtacacttcaagaatcacgcaaacgtgaattctacgaaaaaccttctgtaaagcgcaaacgtaaatcagaagcagctcgcaaacgtaaaaaattc

SEQ ID NO: 36419 - DNA, 1026 bp, Streptococcus mutans
atgacaaaatattcaaccccaaatgccctcggacttggacttattttattcatcatatcagtgagcttggtagcctgttcaaagtcctctacttcgacatctaaaaactataatgcttctgaaaaagattcttatatcctaaaaatttctgaaaactctgatctttgcggcgccccccaacagatagctattgaaaaaggcttttttgatgatgttggcttgaaatacaaggttgttaaaatcggacaggatacttctaatcttgatgctttaaatgctggcaagattgatgcctctaactctttgatggcaagtattattcagcctctagctaatggtgctaagctaaaaatcactaccggcctgcatactggctgtctgcagatattaacaaaaaatggcaaaatcaagtctgctgccgagctaaaagggaagaagatcggggtaactgctgttgcgggcagtcccgctatctttgctaaacgtgttctggcaaaatctggtttaaaagtctctgatgagaaaggtgatgtcagttttgttacttaccaaagcgatcagttagggcaggttctggacaaaggcgaagttgatgccattgccctcggtgatccagatactgaagttctgaaaaaacaatacggctttaaaacattagctaattcatcaactgacaaaggttttaaaaacgaatattgctgtgtcgcttatgtatcaaacgatatagtcaagaaacatccagctgttgctgctaaatatactcttgccatgcaaaaagcagccaattgggtgcaaaagcacaaagaagaaacggttgatattcagttaaatcaaaactatgttgctggcagtaaagacagcaatcttaccagtctaaacagctatacttttaaacctagctattcaggtgcttatgatagcttcgatactgtagccagcgacttgcgaaaaattggtattttatctaatgatgttgacctaaaagctttaagaatcaattccttcttaaaagtgaaaaatgttaaa

SEQ ID NO: 36420 - DNA, 1521 bp, Streptococcus mutans
atggaacagaagatttttagcaaacgaaaaagtaagattgctgggctttgtggagctattttaacgactacagttgttgcccttgcgtcaggtactgtaatcgaggctgatgagacaatagaacagcctgtcgcagctgagactgtctcgcaagctgatggggacaatcccgaacaaacaacaagcgttcaacaagaaactgctcctcaacaaacgaaaacttctcaaagctcagacgcaaccgtagatagtgaagagtcagcaacttccccatctgatgaacagaccgtaagtcaaaatgattcaaactcatcatctcaaattgatcaaacgatagctgatacgaatcgctctgactctgatcatatttcaaaaacatcagccgctacaactgaagatcaagaagagaaagttaattctgcaaaagcacaaactgctgccgcaaccaacaatcaagacactcgttatagtgcgaaagatgcttatggcaattccaattttaacaagacattaactgaatttggaaaaaatgctaatgttgctgatgtaacctataatggcgtgagggatgaatatattgtagttaacgatcctagtgctccttacgttcctaatgcaaacgaaattgcaaaatacttaaaggaatatttaacagaactccgcaacatcaataatattgctattcctgtgccttctgttgatcaggttatgcaaaaatacgcacaagatcgggctaacgaagaagccaatgaaaaaaacggcttggatcatgatactaatttacctatccctaataatttaacttgggttgccgaagatggacatttggatatggatagcagcattcaatccaaaagtcaagaaggctatacacttgcttctgataaagcaaccgcctactatctagcgcttaactggttttctgactattttaatatttacgatgaccccaacgatggcctcaaatcgtttggacacgctgtcagtattttgtcagacgggggaactggaatgggcttaggtcttgcttcaggtcaagataatgaaaagggaatgtggtacgcacaattggaatttggtggtaacgataacgaagataataccaacgatttttcatctttaaaaaacggcaagggagaatgggtattatattataaaggaagtcctgttaagtttcttcctaacactaccttttggtatgtaaaaaaaggcacttcccctgatgcagcttctactcctcacaacagtgataaaccttcattccagtcatctaaagatcttgaccctaatttcaaggccgataatagattccaagaaggaaaggaagcctctgttcatcaggctattcctgcaacatttaaatctcatcgcgatgaagttggtaataaagaccaaaattctctttctgctcaactacctgatacaggagttcaaaaaaataatcaattagccttgatagctttaggaacaggcttgattttactttccggacttcttctttcaaaaagaaaatccttaaaa

SEQ ID NO: 36421 - DNA, 252 bp, Streptococcus mutans
atggaggtaataaagacattggcaaatattaaatcagctattaaacgtgctgaacttaacgttaaacaaaataaccgcaattcagctcaaaaatcagctatgcgttcagctattaaagcttttgaagcaaatcctaatgaagagcttttccgcgctgcttcttcaagtatcgacaaagctaaatcaaaaggtttgattcacaaaaataaggcaagccgcgataaagcacgtcttgcaagcaaattagccaaa

SEQ ID NO: 36422 - DNA, 201 bp, Streptococcus mutans
atgttgaatttaaagattttagcacttgggattgctgttttaggcgttagccttggtgaaggaattttagttgctaatattgcaaaatctgcagctcgtcagcctgaaatgtatggtaaattacaaacgctcatgattatgggtgttgcctttattgaaggtacctttttcgtgcttcttgcttcaacattctttgttggc

SEQ ID NO: 36423 - DNA, 246 bp, Streptococcus mutans
atgactaatgaagagatttttgacaggatttctaatctcattaaagaacagctgcacaatgaaaaaatagaagttactgtgaagaccaatattcaagaggacttaggaattgattccattgcacttatggagtttatcattacgcttgaagatgaatttaatctgaacattcctgatgaagatgtggaagatattcagaccatgggagaattagtcgactatctttctaggcgtttaaagagttct

SEQ ID NO: 36424 - DNA, 180 bp, Streptococcus mutans
atggcacagattaaaattactttgactaagtctccaatcggtcgcattcctgcacaacgtaaaacagttgttgcccttggacttggtaaattaaatagttcagttatcaaagaagataatgccgctattcgtggtatggttaatgcagtttcacatttggtaactgtagaagatgtcaag

SEQ ID NO: 36425 - DNA, 207 bp, Streptococcus mutans
atgaaacttcaagaaattaaagattttgttaaagagcttcgtggtctttctcaagaagaacttgctaagaaagaaaacgaacttaagaaagaacttttcgatcttcgtttccaagctgcagcaggtcaacttgatcaaactgcccgtttgaacgaagtgaaaaagcaaattgcacgtgttaaaaccgtgcaagcagaaacgaaagaa

SEQ ID NO: 36426 - DNA, 120 bp, Streptococcus mutans
atgaatcgtaaacatgttcctgtttacattcaagaggacatggtaggtcacaagcttggtgagtttgcaccgactcgtacttacaaaggtcatgcaactgatgataagaaaacacgtcgt

SEQ ID NO: 36427 - DNA, 990 bp, Streptococcus mutans
atgacagtaataacaaacacccagccctttattggacaacattgtgaaagcacaacaataggcaccctgcttactcaactaagcatttatctcagtgaaccgatgatttttggacttggcgaaggactagggtttgctattttcaacatgaaaacacttgatttcccttttattggcggacgaattaaacctgatttgctgacagtgaatttaagcaaaaaccttggaataaagctaataacgaacgaaacaaattcaaaaaataaagcttggaaaaccgtaaaatcactgattgacaacaataaggctgtaggattaaaactagactgctatcatttggattatttttcaaatcctatacattttgctgctcatcatgttgcgatgcttggctatgatgataaaaaggcttaccttgttgacaccaaacagcaaggaacaaaaactgcaacttcccttgaaagtctagccttagcaagaaacgaaaaaggtcccatgtcatctcgaaacaagtattatatttttgaaaaagaaactgctttgattccgattgagacagctattttgaaagctgtccgtcataatagcgaaacttatcttaaccctcctattaaaaatttgggttacaaaggaattgaaaaagcaagcagagaaatcatcaaatggtttaaacaatctaaagatattcaaaaggaatttgcaatgtctgctctgctgatgaaaagtgcgggcactggcggagcgctctttcgtaatttttaccgtgactttttgaaggaagcctatgaatggactggacattctgctatcaaaatagcttatgagatttttaaagatagtgctaaaaactggtcgcggcttattcttctatttgaaaaagctggaaaaacaggtgatatacagtatgttctagaagcttctaagttattaaaggatctttcactgcaggaaaaagagggtatgcaacttctcaattcaataaaacaaatg

SEQ ID NO: 36428 - DNA, 186 bp, Streptococcus mutans
atggctaaagtatgttattttacaggacgtaaaactgtatcagcaaataaccgttcacatgcgatgaacaaaacaaaacgtgttgcaaaaccaaatcttcaaaaggtaactgttcttattgacggtaaacctaaaaaagtttgggcttcagctcgtgctcttaagtctggtaaagttgagcgtgta

SEQ ID NO: 36429 - DNA, 1377 bp, Streptococcus mutans
atgaaagaagggataaaaatgacgaaacatttacaagatttttttataacagttatcgcaggtatgggaatgttattatccacccttgatacaggtattatcaatgttgcattatcctttttgaggggacaatttcaaaccacaactaacattgcctcttttacaataactggatatactttagcattagctatctctatcttacctttaggagtattaagcgataaatttggaaagttaaagatttcctacttaggatttgtactttttggactgagctccttattttgtggatttgctaatagtattggctggctcattactggccggattattcaaggaatgggagcggcggctttgcaagctacttcagcagctctgattaccactttagtttccgaagaccgcaaaaacagtgctattagtattttaggagtcatgattggtttagggcctgttctaggaccatccttgggaggtgtcttactttctttaaatctttggcgctttattttctggattaatgttccctttgctcttattgtcatcatttgtaatcactatctccttactaaagtctccgaacaaactagtgagtggacattagattctcttggaacagttctcaatgcttctatgttggtttgtcttctcttaggactatccttactcagtaagcctcacctattaggtatcagtcttattttgatcatcattagtttcttgatcgggatttggttttaccgtcttgaatgcagcaaagagagtgctcttgtcaatgtcaaggggctgagcgagaatcctcgagtactttcttatctttttcaaacggtcgcttttggttttgcctctgcaatgatattcttacttccacccttcatttttgaacaattatatcatttaggagtggggcagacaggctttcttgtactaggagcacctgcaggcctggttcttttttcaagaatatctggtaaaatcaatgatggcagtaaaaataaatcatttagccatattggtttgggtatcattattttatccttaattttcctcctacttctcacgcctagctggccctatttattcttaactttaggattatttatttatggtattggcggaggatactttcagcctgctaatatggctagtattatgctagctagtcctatgaaaatgcaaggtagcacaggagcattgcaacgaatggtacaaaacattgctatttcagctggttcagccattggatcaacttgcttaaatctttggtcaaataatctattattagctactcgaattggctggggaattacactcgttcttgttattttcagtttaaaagaactaacaccatttaaaatgactaataaaacaaaa

SEQ ID NO: 36430 - DNA, 261 bp, Streptococcus mutans
atggcttcaaaagattttcacattgttgcagaaacaggaattcatgcacgcccagctactttgcttgttcaaacagcaagtaagtttgcctcagatattacacttgattacaaaggaaaagcagtaaaccttaagtcaattatgggtgttatgagccttggtgttggtcaaggtgctgatgttacaatcactgctgaaggtgcagatgcagatgatgcaattgcagctattaatgaaacgatgactaaagaaggattggct

SEQ ID NO: 36431 - DNA, 675 bp, Salmonella paratyphi A
  misc_feature (442)..(442): n=g, a, t or c
cttgatgagctttaccattccgaactctttttccttcccgtcatggatgaaaacgctcggcttgttggtttagagattattgcaacgtttgccgctgaagacggcgccgtgggatgccgactgagttggtagcgcctcgcctttcggtggaggaacaatactgtctgtttgttgaaaaactggcgttgttagaaacctgtcagcacttttttattcagcataaacttattgcatggcttaatttaccgcctgcaattagtgacttattattattagatagcgaacttttttcccgggcagcgcgctttccgtttcttgaattagctataaatgagaattatcctgggttaaaccagggcaaaaacaatgaaacgttagctaatctggcaatgcatttcccattaatgctggcaaatttcggggcaggcgaggcgtcgactanagctattttcgatgggcttctcaacgagtcatgttggataaaaattttattcagcagcgagctgaaatgatctcattcgaaccattcatgcacgccatcgttgcccagatctcctccagctgcgagtcgctgatgattgccggtattgatactgaggcgatgtgtgcgcgcgcggatatgtgggatgtagcgcattccagggcggactactggctgcgttgccgggacgctgc

SEQ ID NO: 36432 - DNA, 852 bp, Salmonella paratyphi A
atgactcttttagcgctcggtattaaccataaaacggcacctgtatcgctgcgagaacgcgtaacgttttcgccggacacgcttgatcaggcgctggacagcctgcttgcgcaccagatggtgcagggcggggtcgtgctgtcaacctgtaaccgtacagagctgtatctgagcgtggaagagcaggataacctgcaagaagcgctgatccgctggttatgcgattaccataacctgaacgaggacgatctgcgcaacagtctgtactggcatcaggacaatgacgccgtcagccacctgatgcgcgtcgccagcggtctggattcactggtgctgggcgaaccgcaaatcctcggtcaggtgaaaaaagcgtttgcgattcgcaaagaggccaccttaacgccagcgcgctgagcaagtgtttcagaagtctttttccgtcgccaagagagtgcggactgaaaccgatatcgcgccagcgcttccgtcgcgtttgccgcctgtacgctcgcccgccaaatctttgaatcgctctcgagcggtcactgtactgttagttggcgcgggcgaaaccagttgaactggtggcgcgtcacctgcgcgagcataaagtagcaaaagatgattatcgccaaccgaacccgcgagcgcgcgcaagccctggcggagtgagggttggcgctgaggttagtctcgctcagcagtagtcgagcgcccgttgtgcaggatgccgagtattagtcatcagttgcgagccgccagccgcgctgccgagttatcggtagaaggcagtggttggagcgcgcagttaggaaggccgttcgcaagccagtcggagtgcgcctgggtgga

SEQ ID NO: 36433 - DNA, 176 bp, Salmonella paratyphi A
ttacttaagttttgcgcccgtttttcgcagcttcaccgctttacgcttcgtcagcctgtccgctgggcgccagaatgcccgctggaaaatatcgtcagcgaggcgctgatattcgacgatgaagcatttgcgcaggcgccacatgggagtgagcaatctcggcgttttaccaacag

SEQ ID NO: 36434 - DNA, 329 bp, Salmonella paratyphi A
gcgctcggtattacgccgtatggcgtggcggacgtgccaaattataagctgtgggttagcgaaccgccgttgccggattcggtgattgatgtggggcttcgcactgaacccaatctcgaactgctgacggagatgaagccgtcgtttatggtctggtcggcaggttacggaccctcgccggagaaactggcgcggcactcggggcgcgggttcgattttagcgacgcaaaaagcgctggcgtggcccgacgctcgctggttgaactggccagacgctgaatctggaagctgcggcagaaaaacatctggcgcaatacgatcgcttcagg

SEQ ID NO: 36435 - DNA, 1191 bp, Salmonella paratyphi A
ttcatcgaccagttgttgcaccgcctgtggatgaggcccgtttcgatcagattgccgatctggcgctgcgctcgtcggcggctatggacgccgcgaactgcatccgctgtccgatattgatctgctcattttaagccgcaaaaagctgcccgatgaacaggcgcaaaaggtcggcgagctgctgactttactttgggacgtcaagctggatgtcgggcatagcgtacgtacgctggaagagtgtctgctggaaggtctgtctgatttaaccgttgcaacaaacctcatcgaaacgcgcctgctgatcggtgatgtcgctctgtttctggcactacaaaaacatattttcagcgaaggtttttggccgtccgacaaattttacgccgccaaagtagaagagcagaacccacgccaccagcgctatcacggtaccagctataatctggagccggatattaaaagcagccccggcggcctgcgcgatatccatacattgcagtgggtcgcccgacgtcacttcggcgccacctcgctcgatgagatggtgggattcggctttttaaccccggctgagcgccggagctcaacgagtgcctgcatatcctgtggcgcattcgtttgcgctacatctggtggtcagccgctacgataaccgcctgctgttcgaccgccagttaagcgtcgtcaacgccttaactacagcggcgagggcaatgatccggttgagcggatgatgaaagactacttccgggttacgcgtcgggtgagcgaacttaatcagatgctgcttcactattttgacgaggcgattctgggcgctgctggcgagtgaaaaaccacgtcctgttgacgatgagtttcaactgcgcggcacgtcatgtgatctggctgacgacacctgttttatccgcgaaccgcaagcggattgcctgcggatggttttatatgatggtgcgcaatacgcatgcagccgggcatctactctacggacgttacgccacttggcggccaactcccgccgccacctgaggcaactcgctgtgtttacatcccggaggcggcgcactctgtttttcgagttatggctacgcatttccgggccgtgttcaccgcgccttgtgcttgctccatgtcattgcgcaacaagtaagctggtgggctttatattggcggcagtgtgtgcgcactttc

SEQ ID NO: 36436 - DNA, 791 bp, Salmonella paratyphi A
aagactatagatattctgaacgttgacgtggtgactaagcctttcaactctgaagacaaaaagcgcatgacatctgcggaacaggatatcaccgagctgtccaagcatgtgaactcgttgatcaccatcccgaacgacaagctgctgaaagtgctgggccgtggcatctccctgctcgaagcgttcggcgcggctaacgacgtgctgaaaggcgcggttcagggtatcgcagagctgatcacccgcccgggcctgatgaacgtcgactttgctgacgtgcgtaccgtgatgtctgaaatggctacgcaatgatgggctccggcgtggcgagcggtgaagatcgtgcggaagaagcggctgaaatggctatttcttctccgctgctggaagatatcgatctgtccggacgccgcggcgtgttggtcaacattacggcgggcttcgacctgcgtctggacgagtttgaaaccgtcggcaacaccattcgcgcgtttgcgtcggataacgccaccgtggttatcggtacttctctggacccggatatgaatgatgaactgcgcgtgacggtagtggcgaccggtattggtatgacaaacgtccggaaatcactctggtcaccaataaacaggtcagcagccggtgttggatcgttatcagcagcacggtatggcgctgacgcaggagcaaaaaacggtcgcgaaagtggttaacgacaatacaccacaggcggcgaaagagccggattatctggatatacacgcattccgcgtaagcaagcgattaagaattag

SEQ ID NO: 36437 - DNA, 1046 bp, Salmonella paratyphi A
  misc_feature (234)..(234): n=g, a, t or c
  misc_feature (439)..(439): n=g, a, t or c
atgaaaaaatatcaacgtctggcggacgaaattagagaacaaatcgcctctggtcttggcaacccggcgatcgattaccctcgctgagggagcaggtcgccagtagcggcatgagttttatgactgtcggtcatgcgtaccagttgctggaaagtcagggacggattatcgcccgtccgcaatctggttattatgtcgcgccgcatccggtttgtcggtcagtcgcgacggcangcgcacgttattcgggatgaagccgtagatatcaatacctatatttttgagatgctgcaggcgagccgtgatacctctgtggtgccctttgcctcagcgtttcccgatccgcgtctgtttcccttgccgcaattgaaccgctctctggcgcaggtcagtaaaaccgcgacggcaatgagcgtcatcgaaaacttgccgccagtanatgcagaattgcgctatgcgatacacgccgttacgcgcacaggggattaccgtttctcctgacgagattgtcattaccgccggcgcgctggaagcgttgaatcttagtttacaggcggtgacggcgccgggagactgggtggtggtggagaacccctgtttctacggtgcgctacaggccctggagcgattgcgcctgaaagcgttgtcgatacctaccgatgttaaagaaggtatcgatcttatggcgctggaacaggcgttacaggaatatccggtgaaagcgtgctggttaatgaccaacagccagaatccgttagggttcacgctgagtgctgagaaaaaagcgcggctggttgcgttactcacgcaccataacgtgacgctaattgaagacgatgtttatagcgaactctactttggccgcgagaaacctctgcctgccaaagcatgggatcgcgacgataccgtgttgcattgttcgtctttttccaaatgtctggttcccggttttcgcattggctgggttgcgggaggaagccatgccagacaaattcagcgtttgcagttaatgagcacattatccaccagttcccccatgcaattgg

SEQ ID NO: 36438 - DNA, 937 bp, Salmonella paratyphi A
gtggcggagcaaaaggcgtggatggagcttatcgcggaagtgcagggcgaaggccaaattttttaccgtcgccgccgccgccgtatgaaacgcaaaagcggcaatattgacgatttttgccgccgctggggcaatcagtacagctatatggtggtgctggacgcggactcagtgatgagcggcgagtgtctgagcggcttggtgcgcctgatggaagcgaatccaaacgccgggattatccagtcttcgccgaaagcgtcggggatggatactctgtatgcccgctgccaacagttcgcgacccgcgtctatgggccgctgtttaccgccgggctgcacttctggcagttgggggagtcgcactactgggggcacaatgccattatccgcgtgaagccgtttatcgagcactcggctctggcgccgctgccgggagaaggttcgttcgccggatcgattctttcccacgactttgtggaggcggcgctaatgcgtcgggcagggtggggcgtctggattgcctacgatctccccggctcctatgaagagctgccgccaaacctgctggatgagcttaaacgcgaccgccgctggtgtcacggcaacctgatgaactttcgtctgttcctggtgaaaggaatgcacccggtgtgcgcgcgctgttcctgacgggggtaatgtcatatctgtccgcgccgttatggtttatgttcctcgcgctttctaccgcgctgcaggtcgttcatgcgttaacagagccgcaatatttccttcagccgcgccagctttttccggtctggccgcagtggcgtccggaactggcaatcgcgctgtttgcgtcaacgatggtgctgctgtttctgccgaagctgctcagtattatgctgatctggtgtagaggagcaaagagtatggcggtttctggcgcgttagctgt

SEQ ID NO: 36439 - DNA, 165 bp, Salmonella paratyphi A
atgacgactcaggtacgtaagaatgtcatggatatgtttatcgatggcgcacgccgcggttttaccatcgccacgaccaacctgttacccaatgtggtcatggcatttgtcattattcgggatcctctagagtcgacctgcagcatgacaagattggggtccaca

SEQ ID NO: 36440 - DNA, 1031 bp, Salmonella paratyphi A
  misc_feature (361)..(361): n=g, a, t or c
aaactgttaattacgactcaggcgcacgtggcgcgctttcacgatattccggggatggaatatttgtgttatagccaaccgctaccggtcagtgacgccactccgctggggctgtcgctaccgcatcataccgcttacatcattttcacctctggttcgacgggcaggccgaaagggtgatggtgggacaaacggcgatagtcaaccggctgctgtggatgcaggatcactatccgttgacggcggatgatgtagtagcgcaaaaaacaccgtgcagttttgacgtctcagtatgggagtttttctggccgtttatcgccggggcgaaactggtgatggctgaaccggaagcgcaccggantccgctcgcgatgcagcggttctttgcgcaatacggcgtcacgaccacccattttgtgccgtcgatgctggcggcctttattgcctcgctcacgccagcgtcggcggggaaaagctgccttccttaaagcgcgttttctgtagcggcgaggccactccgacgggctgtgccgcgaatgggagacgttaacaacgcgccgctacacaatctgtacgggccaacggaggccgcggtggatgtgagctggtatccggcctgtggcgatgagctggcggctgttgacggcaacagcatcccgattggttatcccgtctggaataccggtttacgtattctcgatgcgcatactgcagccggtagcgccgggcgtggctggcgatctctatcttaccggtatccaactggccagggctatctggggcgtccggatcttaccgccagccgttttatcgccgatccttttgcccaggcgaacggatgatacgtaccggagatgtggccgctggctggattccggcgcggtggagtacctggggcgcagcgaacgaatcagtctctaaaattacgggggcaacgtattgaactgggcgagattgaacgcgtcatgcaaacgctgccggatgttgaacaggcggtagcacatccgcgtcttaggggatcttagagtcga

SEQ ID NO: 36441 - DNA, 374 bp, Salmonella paratyphi A
atggcttacagcgaaaaagtaatcgatcactatgagaacccgcgtaacgtagggtcgtttgacaacaacgacgataacgtgggaagcggtatggttggcgcccccgcgtgcggcgacgtcatgaagttgcagattaaagttaacgatgaaggtatcattgaagacgcgcgcttcaagacttacggctgcggtctcctatcgcctccagttctctggtaacggagtgggtgaaagggaaatccctggacgaagccaggcgattaaaaacaccgacattgcagacgaactggagtgccgccggtgaaaattcactgctctattctggcggaagacgcgattaaagcgctattgcggattacaggggatcctctaga

SEQ ID NO: 36442 - DNA, 588 bp, Salmonella paratyphi A
atgactgatttaaaagcaagcagcctggtgcgctcaaactgatggatctgaccactctgaacgatgacgacaccaatgaaaaagtgatcgcgttgtgtcatcaggcaaaaactccggtcgggaatacggcggcgatttgtatttacccgcgttttatcccgattgcgcgtaaaactctgaaagaacaaggtacgccggacatccgcattgcaacggtgactaacttcccgcatggcaatgatgacatcgatattgcgctggcggaaacccgtgcggcgatctacggcgccgacgaagtggacgtggtattcccgtaccgcgcgttgatcgccggtaacgagcaggtgggttttgacctggtaaaagcctgtaaagacgcttgtgccgcagcgaacgtattgctgaaagtgatcatcgaaaccggcgagctgaaagaagaggcgctgattcgtaaagcctctgaaatctccattaaagccggtgcggatttcatcaaaacctctaccggtaaagtgccggtaaacctacccggaaagcgcgcgcatcatgatggaagtgatccgcgacatgggtgtttccaggggatcc

SEQ ID NO: 36443 - DNA, 919 bp, Salmonella paratyphi A
  misc_feature (113)..(114): n=g, a, t or c
  misc_feature (117)..(117): n=g, a, t or c
  misc_feature (825)..(825): n=g, a, t or c
gtgtttatcggatttgattacggtacggcaaactgctcggtcgccattatgcgcgacgggcatccacagttgctgacaatggagaataacagcgcattactgccgtctatgcnntgntcgccgacgcgcgaagcggtgagcgagtggctgtatcgccatcatgatgtgccggcaacggacgaagaaacccaggggtgtacgccgcgcgatacgctacaaccgcgaggaagatattgaggttggcgccaaagcgtacagtttggtctggcgtcgtggcgcactatattgacgatccccaggaggtctggtttgtcaaatcgccgaaatcctttttaggcccagcggcctgaaaccgcagcaggtcgcgctgtttgaagatttagtctgcgccatgatggtacatattcgtcatacggcgcacagccaattgccggaggccattacccaggcggtgatcgtcgcccgatcaactttcagggactgggcggcgatgacgcgaaccgccaggcgcagggtattctggagcgggcggcaaaacgcgccggttttcaggaggtggtattccagtacgaaccggttgcggcgggcctggactacgagctacgctgcgggaagagaagcgtgtgctggtcgtggatattggcggcggcaccaccgactgctccatgctgctgatggggcccagtggcgtcagcgcgccgatcgtgaaaacagcctgttggggcacagcggttgcgcgtgggcggaaacgatctggatatcgcgctggcctttaaaaatctgatgcctttgctgggcatgggcggcgaaaccgaaaaaggtatncgcctgccggtgctgccgtggtggaacgccgtcgcgattaacgacgtcccggccaaagcgatttttacagtagcgcgaatggtcgtctgttgaa

SEQ ID NO: 36444 - DNA, 234 bp, Salmonella paratyphi A
atgggcgacgggattaacgatgctccggcgttgcgggcggcggatattggtatctcggtagatggcgcggtggacatcccccgtgaggcggccgatattatcctgctggaaaagagcctgatggtgctggaagaaggcgtcattgaaggtcgtcgtactttttctaatatgttgaaatatatcaagatgacggccagctcaaatttcggtaacgtgtttagcgtgctggtggcg

SEQ ID NO: 36445 - DNA, 213 bp, Salmonella paratyphi A
atgccggtaattaaagtacgtgaaaacgagccgttcgacgtagctctgcgtcgcttcaagcgttcctgcgaaaaagcaggtgttctggcggaagttcgtcgtcgtgagttctatgaaaaaccgacgaccgaacgtaagcgcgctaaagcttctgcagtgaaacgtcacgcgaagaaactggctcgcgaaaacgcacgccgtactcgtctgtac

SEQ ID NO: 36446 - DNA, 1043 bp, Salmonella paratyphi A
gaaatgacggtggcggatatcccaacaatccggtgattgcctatgaagaggactgcgtgacgcgcctgattcaggacgacgtcaacgaaacggcctataaccggattaaaaactggagcatcagcgaactgcgcgaatacgtgctgagcgatgaaacctccgtggacgacatcgcgtttacccgcaaaggcctgacctccgaagtggtggcggcagtggcgaaaatctgctccaacgccgacctgatctacggcggtaagaaaatgccggtgatcaaaaaagccaataccaccatcggtattccgggcacctttagctgccgtttgcagccgaacgatacccgtgatgatgtacagagtatcgccgcgcaaatctacgaagggctttctttcggcgcaggcgatgcggtgatcggtgttaaccggtgaccgatgacgtggagaacctgacccgcgtgctcgacaccgtttacggcgttatcgataaattcaatattccgacccagggctgcgtgctggcgcacgtcaccacccagattgaagcgattgctcgcggcgcgccgggcggactgattttccagagcatttgcggcagcgagaagggtttaaaagagttcggcgtcgagctggcgatgctcgacgaagcgcgtgctgtgggggcggagttcaaccgcatcgccggggaaaactgcctgtactttgaaaccggacagggctcggcgctgtacggtggcgcgaactttggtgccgaccaggtgacgatggaagcgcgtaactacgggctggctcgccactacgatccgttcctggtgaacaccgtggtgggctttatcgggccggagtatctctacaacgacaggcagattatccgcgccggtctcgaagatcactttatgggcaagctgagcggcatctcgatgggctgcgactgctgctataccaaccatgccgatgccgaccagaaccttaacgaaaacctgatgattctgctcgccactgccggctgtaactacatcatggggatgccgctcggcgacgacatca

SEQ ID NO: 36447 - DNA, 686 bp, Salmonella paratyphi A
  misc_feature (98)..(98): n=g, a, t or c
  misc_feature (112)..(112): n=g, a, t or c
  misc_feature (146)..(146): n=g, a, t or c
  misc_feature (293)..(293): n=g, a, t or c
  misc_feature (675)..(676): n=g, a, t or c
aaaaattataaaagaaccaaactggttccggcccaggaaagaaaaccggccgagaaagtacgcgtctgtgggttcatgaaaaggggagccttcaacgntatgcccggttggntgccgcccgcgtttgaaattcgcgtttcatgggncgactcaaatggggttctgtccgtttggccaacgcttcgtttatcgccgttgaacaggcgcctgaaagacaactgtccgttagtgtgtttctctgctttccgcggcgcgcgtatgcaagaagcgttgatgttgctgatgcagatgcngaaaacctctctgcgctggcgaaaatgcaggaacgtggtctgccctacatttcgtattgaccgatccgacaatgggacggtttccgccagttttgcgatgctggcgatctcaacatcgccgagccaaaagccctgattcgttcgccggcccgcgcgttatcgaacaaaccgttcgtgagaacgtcccgccaggattccagcgcagtgagttcctgatcgaaaaaggcgctattgatatgatcgtccgccgcccggaaatgcgcctgaagctggcgagcattctggcgaagctgatgaatctgcccgcgccgaacccggaccccgcgtgaaggcgtggtgtcgtcggcgccggatcaggagtctgaggtctgataactgaaannagcagggcgc

SEQ ID NO: 36448 - DNA, 754 bp, Salmonella paratyphi A
  misc_feature (126)..(126): n=g, a, t or c
atggcggaacttagcgaccaggagatgtgcgctataaccgacaaattattctgcgcggcttcgattttgaagggcaggaagcgttaaaagatgcgcgggtattagtggtcgggctgggcggactcnggtgcgcggcaacgcagtatctggccggcgctggcgtcgggcaactgacgctactcgattttgataccgtttccgtttccaatctccagcgtcaaaccctgcacagcgacgccacggtcgggcagccaaaggttgagtccgcccgcgacgctggcgcgaatcaacccgcatattaccattacgcccgttaacgcgcggctggacgacgacgctatgaccagcctgattgccgggcattcgctggtactggactgtactgataacgttagcgtacgtaatcaacttaacgccgggtgctataccgcgaaagtgccgctaatctccgcgcggccattcgtatggaaggacaagttaccgtctttacgtatcgggaaaacgaaccctgttaccgctgcctgagccgtctgtttggcgaaaacgctctgacctgcgtagaggcaggggtgatggcgccgctgattggcgtgatcggttcgctacaggcaatggaggccattaagctgtggcgcattacggtcaacctgccagcggaaaaatcgtcatgtacgatgcgatgacctgtcagttccgcgaaatgaagttgatgcgcaaccccggctgtgaggtctgcgggcagtagtcactttac

SEQ ID NO: 36449 - DNA, 733 bp, Salmonella paratyphi A
cgattgcgacgtgctgagacgtatttccaccggtgatcgggttgctgcccataaaggtggcgtttacaaaacctcagtttctgttcatcttgctcaggatctggctctgaaggggctacgtgttttgctcgtggaaggtaacgacccccagggaacagcctcaatgtatcacggatgggtaccagatcttcatattcatgcagaagacactctcctgcctttctatcttggggaaaaggacgatgtcacttatgcaataaagcccacttgctggccggggcttgacattattccttcctgtctggctctgcaccgtattgaaactgagttaatgggcaaatttgatgaaggtaaactgcccaccgatccacacctgatgctccgactggccattgaaactgttgctcatgactatgatgtcatagttattgacagcgcgcctaacctgggtatcggcacgattaatgtcgtatgtgctgctgatgtgctgattgttcccacgcctgctgagttgtttgactacacctccgcactgcagtttttcgatatgcttcgtgatctgctcaagaacgttgatcttaaagggttcgagcctgatgtacgtattttgcttaccaaatacagcaatagtaatggctctcagtccccgtggatggaggagcaaattcgggatgcctggggaagcatggttctaaaaaatgttgtacgtgaaacggatgaagtggggatcctc

SEQ ID NO: 36450 - DNA, 744 bp, Salmonella paratyphi A
  misc_feature (180)..(180): n=g, a, t or c
ctgattttttcgcaaacgcttagcggctctaacgatattcccatgtgggatcgcctgtttgcgccgttaatggcggcacggcggggtcactcaccaccagcctgttctttcatccgcatttttcgttacccatcgcccattacacgcagatgcggctggtggacattgccagcggagttncgtcgcggcgatcgcattgccgcaggatggtcgccgtctggtgccttccgcgtctgcacgagttgctgcaccgactaaaaaatccggtcctgattctcggcattggcggttttatactgggtattctgggcgtcattggcgggccgcttaccctgtttaaaggcctggacgaaatgcaacaaatggcgtttagccagacgttgggcgcgggagattattttaccttagccgtcgtcaaactcgccgcgctggtcatcgcggcggcgagcggctttcgcggcgggcgcatttttccggctgtgtttatcggcgcggcgctggggctcatgctccatgcccatgttgaggccgtacccgcggcgattaccgtctcctgcgcgattcttggcttagtgctggtagtgacgcgtgacggctggctcagtctgtttatggcggcagtcgtcgtaccggataccaatctgctgccgctgctctgcattgtgatgctccccgcctggctattgctggcggaaaaaccgttgctgccgccaacgtcacgaaccctaatcggcgcagcggggc

SEQ ID NO: 36451 - DNA, 943 bp, Salmonella paratyphi A
gtgaccattgctattgttataggcacacatggttgggcgcagagcagttacttaaaacagccgaaatgctgttaggcgagcaggaaaacgtcggctggatcgatttcgttccaggcgaaaatgccgaaacgctgatcgaaaagtacaacgctcagttggctaaactcgataccagtaaaggcgtgctatttctcgttgatacatggggaggcagtccgtttaatgctgccagccgcattgtcgtcgataaagagcgctatgaagttattgccggcgtcaacatcccgatgctggtcgaaacgtttatggctcgtgacgacgatccgagctttgacgagctggtcgcactggcggtagaaaccggtcgtgaaggcgtaaaagcgctgaaagcgaaaccggtagaaaaagccgcgccagcgcacagtcgccgccgcgccaaaagcgccgcaccgcaaaaccgatgggcccgaatgattatatggttatcgggcttgcccgtattgatgaccgcctcattcacggtcaggtcgctacccgctggaccaaagagaccaatgtcagccgtattattgttgtgagcgatgaagtcgcggcggataccgtacgtaaaacgctgctgacgcaagttgcgccgccgggcgttacggcgcatgtggttgacgtcgcgaaaatgattcgcgtctacaataacccgaaatacgccggtgaacgcgtgatgcttctgtttaccaatcctaccgacgtcgagcgcatcgttgagggcggcgtgaaagtcacttccgtgaacattggcggtatggcctatcgtcaaggtaaaacgcaggtgaacaacgccgtttccgtcgatgaaaaggatatcgaagcctttaataagctcaacgagcgcggcatcgagcttgaggtgcgtaaagttttcaccgatccgaaactgaaaatgatggat

SEQ ID NO: 36452 - DNA, 778 bp, Salmonella paratyphi A
atgaagagttcttccgcgaacgtcaacaagcacgttacggcggcgatggcaaaggcggtatgcgctgttgttaatggagagactatgaccccgattgcagttaccctacttaccggttttcttggtgccggcaaaaccaccctactacgccatatcctcaacgaacaacatggttttaaaatcgccgttatcgaaaacgaatttggcgaagtctccgttgacgatcaactgattggcgatcgcgctacacagatcaaaaccctgactaacggctgcatctgttgtacccgctccaacgagctggaagatgcgctattagacctgctcgacagccgcgaccgcggcgatattgcttttgaccgtctggtgattgaatgcaccggcatggctgaccccggcccgattattcagacctttttctcccatgacgtattatgcgaacgctacctgttagacggcgtgattgcgctggtcgacgcggtgcacgctaacgagcagatgaaccagttcaccatcgcccagtcgcagataggctacgccgaccgcattctgttgaccaaaaccgacgtggcaggcgacagcgagaaactggcgagcggtgcgcgtatcaacgccgcgccccggtttatactggtacacggcgatattgacctgagtcagttgtttaataccagcggctttatgctggaagagaacgtgcgcaagccaaccgcgtttccactttattgccgataaacagaacgatgtgtcgtcaattgtggtggagctggattacccg

SEQ ID NO: 36453 - DNA, 1325 bp, Salmonella paratyphi A
atggcctggcatggcgctggcacctaccgttctattgatggtcgtggcggcgcgggtcgtggtcaacagcgttttgcgccgcttaactcctggccggataacgtcagcctggataaggcgcgtcgtttgctgtggccgattaagcagaaatatggccagaaaatttcctgggccgacctgtttattctggcgggtaacgtggcgctggaaaactccggcttccgtaccttcggtttcggcgccgggcgtgaagatgtctgggaaccggatctggatgtgaactggggcgatgaaaaagcctggttgactcaccgacaccctgaagcgctggcaaaagcgcgctgggcgcgaccgagatgggccttatctacgttaacccggaggggccggcatcacagcggcgaaccactttctgccgccgccgctattcgcgctacctttggcaatatggggatgaacgacgaagagaccgtggcgttgatcgctggcgggcataccctcggtaaaacccacggcgcggcagcggcatcccatgtaggggccgatccggaagccgcgccgattgaagcgcagggcttaggttgggccagcagctatggtagcggcgttggtgcggatgctattacctccgggctggaagtggtctggacgcagacgccgacccagtggagcaactatttcttcgagaacctgttcaaatatgagtgggtacaaacccgtagtccggctggcgctatccagtttgaagcggtagacgcgccggatatcattccggacccgttcgatccgtcgaaaaaacgtaagccaaccatgctggtcaccgacgtgacgctgcgttttgatccggagttcgagaagatttcccgtcgtttccttaacgatccgcagcctttaatgaagcctttgctcgtgcctggttcaaactgacgcacagagatatgggaccaaaagcgcgttacatcggaccggaagtgccgaaagaagatctgatctggcaggacccgttgccgcaaccgctctaccagccaacgcaggaagacattatcaacctgaaagcggcgatcgctgcatccgggctttctattagcgagatggtttcggttgcctgggcatccgcgtctactttccgcggcggcgataagcgtggcgacgctaacggcgcgatcgtgtgcattagcgcctcagggacttaggggaggtcaacgccgttgcgctccgcgtttctgccggtattagaagcgctccagaaaacgacgaataaggcctcgctggccgatattattgtgctggcgggcgtagtcggtagtgagcaggcgaccgcgctg

SEQ ID NO: 36454 - DNA, 1012 bp, Salmonella paratyphi A
gatgccgatattaacgggccgggaaaagccgttgggccttatttcgacgagacgccgctaaaagactcgcttggctcgacgctggggagtccaattagatggcgatgtgaatgctcgcttacatcttgatattccgctggatggcgaacaggttaccgctgagggcgatgtctcgttgcgtaacaacagcctgtttattaagccgctaaacagcacgctcaaaaatctgaacggtaaattcagctttgtgaatggcgcgctaaaaagcgggccgctgacggaaactggtttaatcagccgcttaacctggatttcagtacgacggaaggggcaaaagcctatcaggtcgccgtcaacctgaacggtaactggcagccaacgcgtatgggcgtcttaccgccgcaactgaatgatgccctgagcggcagagaacgtggaatagtaaagtcggcatcgatcttccgtatcacgctgacaccacttatcacatcgagctgaacggcgatctgagaaatgtgagtagtcacttaccttctccgctaaataaacccgcagcgaagcattccggtgaacattcaggctgacggcaacctgaaaagttttgcgctaacggggagcgcagggagtaaaaatcactttaacagccgctggttattaaatcagaagctgacgttggatcgggctatctggacgacggacagccggacgattccgccattacctgctcaacaaggcgttgagctcaatctgccggcgctggatggtgcgcagtggctggcgttattccagaaaggcgcggcggataacgtgagcagttcggccgagtttcctcaacgcgtcacgttgcgtactcccgcgctatcgctgggcggccagcagtggaacaatttgagcgtcgtttcagcgccctcgctgaacggaacaaaaattgaagcgcagggccgtgaggtgaacgccacgctgctcatgcgcaaccatgcgcgtggctggcgaacattaagtacctgtatta

SEQ ID NO: 36455 - DNA, 965 bp, Salmonella paratyphi A
ataacgcctatcgcccagttccagatcccctgtctgattaaaaataccggcaatccgcagcgccaggaacgctgatcggcgcgtccagcgacgatgataatctgccggttaaagggatctctaaccttaacaacatggcgatgtttagcgtctccggcccgggaatgaaagggatgattgggatggcggcgcgtgttttcgccgccatgtctcgcgccgggatctcggtggtgctcattacccagtcctcctctgagtacagcatcagcttctgtgtgccgcagagtgactgcgcgcgtgcccgccgtgcgatgcaggatgagttctatctggagctgaaagaggggctgctggagcgctggcggttactgagcggttggcgattatctctgttgtcggcgacggtatgcgcacgctacgcggcatttcagcgaaattcttcgccgcgctggcgcgggccaatatcaatatcgtggcgatcgctcagggatcttctgagcgttccatttctgtggtggtgaataacgacgatgccaccaccggcgtgcgggtaacgcaccagatgctgttcaataccgatcaggtgattgaagtatttgtcattggcgtcggcggcgtcggcggcgcgctactggaacagcttaaacgtcagcaaacctggttgaagaacaagcacatcgatctacgtgtgtgcggcgtggcgaactcaaaggcgttgctaaccaatgtgcatggcctgaatctggacaactggcaggcggaactgggcaagcgaacgcgccgttcaatctgggacgcttaattcgcctggtgaaagaatatcatctacatcggtgattgttgattgtacctccagtcaggcggtggccgaccagtatgccgacttcctgcgtgaaggattccatgtggtgacgccgaacaagaaagcgaacacctcgtcgatggactactaccatcagctacgt

SEQ ID NO: 36456 - DNA, 977 bp, Salmonella paratyphi A
gtgaatccactgtcttacgccattctggagtcctgcggacgtctgcgttctacccagcccaacctcagtgtgcgttatcacgccggaatgagtaacgatttccttgacgcctgcgtccaggtcatccgctgcggctttgggatgccggcgtttaacaatgatgaaatcgtcatcccggaatttatcaagttggggatcgaaccgcagaacgcttacgattacgcggcgatcggctgtatcgaaaccgccgtcggcggaaatggggttatcgctgcaccggcatgagctttattaacttcgcccgcgtcatgctggcggcgctggaaggcggtcgcgacgccaccagcggtaaggtatttctgccgcagaaaaggcgctctccgcaggcaactttaacaattttgacgaagtgatggccgcctgggatacccaaattcgctactacacgcgcaaatcgatcgaaattgagtatgtggtcgacaccatgctggaagagaatgtccacgatattctctgctcagcgctggtagacgactgtattgaacgcgcgaagagtatcaagcaaggcggcgctaaatatgactgggtatccggtcttcaggtcggtatcgccaacctgggtaacagcctcgccgccgtgaaaaaactggtcttcgaacagggcgttatcggtcaacagcagcttgccgccgcgctggccaatgactttgacgggctgacccatgagcagtgcgccagcgtctgattaacgcgcgccgaagtacggtaacgacgatgacagtgtcgataccctgctggcgcgcgcttatcagacctatattgatgagctgaagcaataccataacccgcgctatggtcgtgcgcctgtgggcggcaactattacgccggtacgtcctctatctcagcaaacgtgccatttggcgccgcaactatggctaccccggatggtcgcaggggatcctctagagtcgacctc

SEQ ID NO: 36457 - DNA, 1011 bp, Salmonella paratyphi A
atggctgatacaaaggcaaaaatcacccttactggtgatactgctattgaactggatgtgctaaaaggtacactcggtcaagatgttattgatattcgtagtctcggttcaaaaggaatttttacttttgaccctgtttcacctctagccatcctgcgaatctaaaatcaccttcatcgacggcgacgaaggcattttgttgcatcgcgtttcccgattgaccagcttgctaccgattccaactatctggaagtctgttacatcctgctgtacggcgaaaaaccgacgcaggaggagtatgacgagttcagaacgacagtcacccgccatacgatgatccatgagcaaatcactcgcctgttccatgctttccgtcgcgactcacatccgatggcggtaatgtgcgggatcactggcgcgctggcagcgttctaccacgactcgctggatgtaaacaatccgcgccaccgtgaaatcgcggcgttccgcctgctgtccaaaatgccgaccatggcggcgatgtgttacaaatactcaatcggtcagccgtttgtttatccgcgcaacgacctttcctacgccggtaacttcctgaacatgatgttctccacgccgtgtgaaacctatgaagtgaatccggtactggagcgcgcgatggatcgtattctgatcctgcacgctgaccatgagcagaacgcctctacgtcaacggtacgtaccgcaggttcaagcggcgccaacccgttcgcctgcattgccgccgggatcgcctccctgtggggacccgcgcacggcgcgcaaacgaagccgcgctgaaaatgctggaagaaatcagctctgttaaacacattccggaatttgttcgtcgtgcgaaagacaagaatgattctttcgcctgatgggcttcggtcaccgtgtttacaaaaaccacgatccgcgcgccaccgtgatgcgtgaaacctgcacgaagtgctgaaagagctgggcaccaaagggggatcctctagagtc

SEQ ID NO: 36458 - DNA, 807 bp, Salmonella paratyphi A
caccgactgctgggcgcacagcggcagaccagcgattacgccatcatgcgggcaacccgttgcatctggacgtgctggtggtcgatgaagcatcaatgattgatttgccgatgatgtcacgtttgattgacgctctgccgccgcacgggcgggtcatttttcttggcgatcgcgatcagttggcatccgttgaggcgggcgctgtgttgggcgatatttgcgcctatgtcaacgcagggtttacggcggaacgcgcccgacagctaagccgactcacagggagcgccattccggcggggccggaacgcaagccgcgtctttacgcgatagcctctgtttattgcaaaagagctaccgtttcggcagcgattctggcatcggcaagctggcggcggcgattaactgcggcgacaggtcggcaatccaggctgtttttcagcaggggtttagcgatatagagaagcgtacattgcaaagcagcgacgattatgccgggatgctggatgaagcgctggcgggctatggtcgctacttgcggttgctgcatgagaaagcgacgcggaggcaatccttcaggctttcaatgagtatcaactgctttgcgcgctgcgtgaaggcccatttggcgtgaggggactgaatgaccgcattgagcaggcgatggtgcagcaacgaaaaattcagcggcacccgcattctcgctggtatgaagggcgtccggtaatgattgcgcgcaacgatagcgcgttggggctatttaacggcgatattggtattgcgctcgatcgcggacaggggtttttcacg

SEQ ID NO: 36459 - DNA, 495 bp, Salmonella paratyphi A
atgagactgacatctaaagggcgttatgccgtgaccgcaatgttagacgttgcgctcaactccgaagcgggcccggtaccgttggctgatatttctgaacgtcaggggatttccctttcttatctggaacagctattttcccgtttacgtaaaaacggtctggtttccagcgtacgcgggccgggcggcggttatctgctgggtaaagatgctggcagtattgcggtcggcgaagtgatcagcgcggttgatgaatccgttgacgcgacccgttgccagggcaaaggcggctgcagggcggcgataaatgcctgacccatgcgctgtggcgtgatttaagcgatcgcctgaccggttttctcaacaatattaccttaggcgagctggtgaataaccaggaagttctggatgtgtctggtcgccagcacacgcatgacgcgccggcgcagcggtcgtgcgcaggacgctatcgacgttaaattacgcgcttaatta

SEQ ID NO: 36460 - DNA, 995 bp, Salmonella paratyphi A
  misc_feature (885)..(885): n=g, a, t or c
gacatttacgctttccgcgtgatcgttcatgactccgatacctgctatcgcgtactcggccagatgcacagtctctataagccgcgtccgggacgcgtgaaagactatatcgccattcccaaagcgaacggctatcagtctttgcacacctcgatgatcggcccgcacggcgttcctgttgaagtccagatccgtaccgaagacatggatcagatggcggaaatgggggttgcggcgcactgggcgtataaagagcacggtgagaccagcaccacggcgcagatccgcgccaggctggatgcagagcctgctggagctacaacagagcgccggtagttcgtttgaatttatcgaaagcgtaaaatccgatctcttcccggatgagatttacgttttcaccccggaaggcgcattgtcgaactgcccgctggcgctacgccggtggattttgcctatgcagtgcataccgacatcggccacgctgcgtcggcgcgcgtgtcgaccggcagccttatccgctgtcacagccgcttagcagcgtcagaccgtcgaaattattaccgcgccggcggtcccaacgccgctgcgtgaactttgtcgtcagctctaaagcgcgcgctaaaattcgtcagttgctgaaaaacctcaaacgtgatgactccgtaagcctgggccgtcgtctgcttaaccatgctttaggcggcagtcgtaagctggcgtaaattccgaggaatagtattcagcgcgaattggatcgtatgaagctggcaacgcttgacgatctgctggcggaaatcggtctcggcaacgcgatgagtcagttgttgcgcgaaaaatctggcagcaaggcgatagtgtgtggccgtaccgtttgcgcaatcgaantcacggccacctgcgcattaaaggcgcggatgggtggcgttatcaccttgtgcgaagtgtttgttcgtccgatcccagggcgacccgattcattcgcttctgtgcagtcc

SEQ ID NO: 36461 - DNA, 1177 bp, Salmonella paratyphi A
gtgtcaaaggcaaccgaacaaaacgacaagctcaaacgggcgataattatttcagccgtgctgcatatcatcttatttgcagtgctgatctggagttcgtttgatgagcatatagaggcttctgccgccggggcgagcggttccgctatcgacgcggtgatggtcgatcctggcgccgttgtgcagcagtacaaccgtcagcaggatcaacaggccagcgccagacgcgcggtaagaagagcgtaaaaagctgcaacagcagcaagcagaggagctgcagcagaagcaggctgccgaacaggagcggttgaaacaacttgagaaagaacgtttagcggctcaggagcagcaaaagcaggctgaagaagcggcaaaactggcgcaacagcagcagcaacaggccgaagaagcggcggcagacgcgaagaaaaaagcggagccgaggcggcgaaagcggcggcggacgcgaagaaaaaagcagaggccgaggcggtaaaagcggcggcggacgcgaagaagaaagcggaagccgaagcggcgaaagcggcggcggacgcgaagaagaaagcagaggccgaagcggcgaaagcagcggcggaggcgaagaagaaagcggaggccgaagcggcgaaagcagcggcggacgctaagaagaaagcggatgccgaggcggcgaaagcggcggcggaggcgaagaagaaagcggatgcgcggcggcgaaagcagcggcggacgctaagaagaaagcggctgccgaaaatagcggccgccgcagaaggcgtcgacgatctgcttggcgatctcagctcgggtaagaatgcgccgaaaaccggcggcggcgcgaaagggaatggtcagccatcgaaagatagcggtacatcgggcgctaacggtgggacggcacgctgatatcagcgcctacgcgaaacagattcaggtcgccattcagagccgtctgtatgatgcgagcctgtatcagggcaaacaatgtgtcttgcatattagcctggcgccggatggctcattaaaaagcattacgtctgagggcggcgatccggcgctttgtcaggcggcgttaatggcggcaaaaaccgcgaaaattcctaaaccgccaagccaggctgtttatgagaaaataaaggatgccaaactagactttaaactgtagatacttttc

SEQ ID NO: 36462 - DNA, 584 bp, Salmonella paratyphi A
  misc_feature (55)..(55): n=g, a, t or c
  misc_feature (57)..(57): n=g, a, t or c
atgagcagtaacttcagacatcacctgttgagtctgtcgttactcggttcggccnanccgcctgggccgcttttgctcaggcgccaatcagtagtgtcggctcaggctcggtcgaagaccgcgtcactcaacttgagcgtatctctaacgctcacagccagcttttaacccaacttcagcagcagctctccgataatcagtccgatatcgattctttgcgcggccaaatccaggaaaatcagtatcaactgaatcaggtgatggagcgccagaagcaaattatgctgcagctggggagcttgaataatggcggcgcagcgcagccagcagctggtgaccagagcgggacggcaaccactgcgacccccgccccggatgcggtacggcaacctcaggggcgccggtacaaagtggcgatgcgaataccgattacaatgcggcaattgcgctggtgcaggataagtctcgccaggatgatgcgattgtggcgtttcagaacttcatcaagaaataccctgattctacttatcagccgaacgccaattattggctgggccagttgaattacaacaagggtaaaaaag

SEQ ID NO: 36463 - DNA, 270 bp, Salmonella paratyphi A
agctttcagtttgaacaaatcggcgttattcgctccccctataaagaaaaattcgccgttccgcgccagcctggtctggtcaaaagccgcggcgaactgcatctgatagcgccttacaaccaggccgatgccgttcgcggcctggaagcgttcagccatttgtgggtacttttcgtttttcatcagacgatggacggcggctgcggccaacagttcgccgccccgtcttgcggtaacgccagaatgggcgtttttgccacgtcgctccag

SEQ ID NO: 36464 - DNA, 931 bp, Salmonella paratyphi A
atgacgatgccaacctcacaatgtccctggcgaatgcaggtgcatcacatccgtcaggagacgccggatgtatggacaattgcgctattatgccatgactactacccttatcgcgccgggcagtatgcgctggtgagcgtgcgtaattcagcggaaacctgcgcgcctacaccctttcgtctacgccgggcgtcagtgaatatatcacgctgaccgttcgtcggattgaagatggcacgggttcacagtggttgacccatgacatcaagcgcggcgattacatctggctgtctgatgcaatgggcgattttacctgtgacgataaaacagaagataagtttctgctgctcgccgccggttgtggcgtaacgccaatcatgtcgatgcgtcgctggctggcaaaataccgcccacaggccgatgtgcaggtcatctttaacgtccgttcgccggatgatgtgatttttgccgacgagtggcgacagtatccggtcacgctagtggcggaaaatcatgccacggaaggttttgtcgcgggccgtctgaccacggaattattacagcgcgtaccggatttggcatcgcgcaccatcatgacctgcggcccggcgccctatatggatttcgtcgaacagggagtgaaagcgcttggcgtaacgcgcttctttaaagagaagttcttcagccggtggcggaaacggcaaccagcggcctgaaattcaccaaactacagccagcgcaggaattttatgccccgatcggtacaacgctgttggaggcgctggagagtaataaagtaccggttgccgctgctgtcgggcaggtgtttgcggctgctgtaaaaccaaagtcgtttccggcgactatacggtgagcagcaccatgacctgagcgaggcggagattgccgaaggttacgtacgggatcgtgt

SEQ ID NO: 36465 - DNA, 942 bp, Salmonella paratyphi A
atgtcacatctcgcagagctggttgccaatgcagcggccgccattaaccaggcgtcagatgttgccgcgttagacaatgtacgcgtcgaatatttgggcaagaaagggcatttaacccttcagatgacgaccctacgcgatctgccgccggaagagcgtccggcagccggggcagtcattaacgccgcgaaagagcaggtacaacaggctcttaacgcgcgtaaagccgagctggaaagcgcagcgcttaacgcccgtctggctgctgaaaccatcgatatctccctgccggggcgccgtattgagaacggcggtctgcatccggtcacgcgtaccattgaccgtattgaaagtttcttcggcgagcttggttttaccgtggcgactggcccggaaatcgaagatgactaccataacttcgatgcgttaaacattccgggtcatcatccggcccgcgccgatcatgataccttctggtttgacgcgacccgtctgctgcggacccagacgtctggcgtccagatccggacgatgaaagcgcagcaaccgccgatccgtattattgcgccgggccgtgtataccgtaatgactacgaccagacgcatactccgatgttccatcagatggaaggtctgattgttgataccaacatcagcttcaccaacctcaaaggtacgctgcacgacttcctgcgtaatttctttgaggaggatctgcagattcgcttccgtccttcttattttccgtttaccgaaccttctgcggaagtggatgtgatgggtaaaaacggtaaatggctggaggtgctgggctgcgggatggtgcatccgaatgtgctgcgtaatgtcggtatcgatccggaaatctattctggcttcgcttttggtatggggatggaacgtctgaccatgttgcgttacggcgtcaccgacctgcgttca

SEQ ID NO: 36466 - DNA, 549 bp, Salmonella paratyphi A
atgagtgacgaaaaacaaaaaatgatcgctggggcactgtattgcccgaccgatgaaactttatgccaggatcgactgcgggcgcgtcaactcatccatcaatacaattatactacgcctgatgaaataaataagcgtcaggcgattttacgcgacctgttgggtcgatgcgaagacgcctatattgaaccttccttccgttgcgactacggctataatatttttcttggtcactccttttacgctaacttcgactgcgtcatgcttgatgtttgcccaattcatattggcgataattgtatgcgcgcgccaggggtacatatctataccgccacgcacccgctggacgccgtcgaacgcaacagcggcagagaattaggtaaacccgtcactatcggaaataacgtctggataggcggacgagccgtcgttaatcctggcgtaaccatcggcgataacgtcgtcgtcgcttcaggcgctgtggtgacaaaaaacgtaccgccagacgtcgtggtaggcggaaatccggcgcgaatcattaaaaaattg

SEQ ID NO: 36467 - DNA, 411 bp, Salmonella paratyphi A
gtgcgaaccgttgaggtgacgctgcgtcagttagataaactcaattcgctgctggacggcgcgctgaaggcgggtttgaacgagattcgttcggtatcgctgggcgtggcgcaaccggacgcctataaagacaaggcccgcaaagccgccattgatgacgcgattcatcaggcgcaagcgctggcagccggttttaacagtaaattggggccagtttacagcgttcgttaccatgtctctaattatcagccgagtccggtggtgcgaatgatgaaagccgcggatgctgcgccggtatctgcgcaggaaacttacgagcagccgaccattcagttcgacgatcaggtcgatgtggtcttccagcttgaacctggaaccgggcagacgtcgacaacggccgccagcacgcag

SEQ ID NO: 36468 - DNA, 699 bp, Salmonella paratyphi A
gtggtatcgtttagcgctttttaaaaaatatcgacaacctttgaggggattttcgtaatgcgtattattctgcttggcgctccgggcggaggtaaaggaactcaggctcagttcatcacggagaaatatggtattccgcaaatctccactggcgatatgctgcgcgccgcagtgaaatcaggctccgagttgggcaaacaggcgaaagatatcatggacgccggtaaactggtgaccgatgagctggtgatcgcgctggttaaagagcgtattgcccaggaagactgccgtaacggttttctgctggacggtttcccgcgcacgatcccgcagcgtgacgcaatgaaagaagcgggtattgtggtggattacgtgctggaattcgacgtaccggacgaactgatcgttgaccgtattgtgggtcgtcggtacgaccgctctggccgcgtttaccacgttaagtttaatccgccgaaagtggaaggcaaagatgacgtcaccggcgaagatctgacgacccgtaaagacgatcaggaagagaccgttcgcaaacgtctggtggaatatcatcagatgaccggccgctgattggctactaccagaaagaagcggaagcgggcaacaccaaatacgctaaagttgacggtacgcaggccgttgccgacgtgcgcagcgctggaaaaaatcctcggttaattt

SEQ ID NO: 36469 - DNA, 693 bp, Salmonella paratyphi A
atgcgacttgataaatttatcgctcagcagcttggcgtcagccgcgctattgccgggcgtgaaattcgtggtaaccgcgttaccgtcgatggcgacatcattaaaaatgcggccttcaaactgctcccggaacatgcggttgcgtatgacggcaatcccttagcgcagcaacacgggccacgctattttatgcttaacaagccgcagggatacgtttgttcaaccgatgatcccgatcatccaacggtgctgtatttcctggatgagccggtggcgtataagctgcatgccgcaggacgtctggatatcgatactaccggtctggtgttaatgacagatgacggtcagtggtcgcaccgcattacgtcgccgcgccatcactgtgaaaaaacctatctggtgaccctggagtcgccggtggccgacgatacggcagcgcaatttgcgaaaggcgtgcagttgcataatgaaaaagatctcactaaacccgctacgctggaggtgataacgcctgtgcaggtccggctgaccatcagcgaaggccgttatcatcaggtgaagcggatgtttgccgcagtaggcaatcacgttgtggaactgcaccgcgaacggattggcgccattacgctggatgagaatctggctcccggcgagtaccgcccgttgactgaagaagaaattgccagcgtcggc

SEQ ID NO: 36470 - DNA, 642 bp, Salmonella paratyphi A
  misc_feature (628)..(628): n=g, a, t or c
gtgaccacccggcagcactcttcctttgctattgtctttattcttggcctgttggccatgttaatgccgctgtcgattgatatgtatcttccagcgctgccggtgatttctgcgcaattcggcgtgcctgccggtagcgcgcagatgacgctcagcacctatattctggggtttgcgctgggtcagcttatctatggaccgatggcggatagcctcgggcgtaagccggtcatcctgggcgggacgctggtatttgccgctgcggcggtcgcctgtgcgttggcgcagactatcgatcaactgatcgtgatgcgttttttccacggtttggcggccgcggcggcaagcgtcgtcatcaatgcgctgatgcgggatatttatccaaaggaagagttttcgcgcatgatgtcatttgtcatgctggtcactacgatagcgccgttaatggcgcccattgttggcggctgggtgttggtatggttaagctggcactatatcttctggatactggccattgcggcgattctggcgtcagtcatgatctttgctctgattaaagagacgctgccgttgagcgcgtcagccttttcatattcgtaccacaataggggatcctctagagtcgacnctcaggcatcagct

SEQ ID NO: 36471 - DNA, 934 bp, Salmonella paratyphi A
  misc_feature (769)..(769): n=g, a, t or c
gtggcattctcattttcaggaggaatcatgtctcaggttcaaagtggcattttgccggaacattgccgtgcggcaatttggattgaagccaatgtgaaaggcgacctggacgccctgcgcgcggccagcagaacatttgccgataaactggcgaccttcgaagtcaaatttccggacgcccatcttggggccgttgtggcgtttggcaacaacacctggcgcgccctgagcgcggcgtcggggcggaagaactgaaagattttattccttatggtaaagggctggcgccggccacgcagtatgacgtgctgatccatatcctttccctgcgccacgatgtgaatttttctgttgcccaggcggcgatggaagccttcggcgactgtatcgacgtgaaagaagaagttcacggtttccgttgggtggaagaacgcgatctgagcggctttgtcgacgggacagagaacccggcgggcgaagagacgcgccgtgaagtggcggtgatcaaagatggcgtggatgccggcggcagttatgtgttcgtgcagcgttgggaacacaatctcaagcaacttaaccggatgagtattcacgatcaggagatgatgatcgggcgtaccaaagaagccaatgaagagattgacggcgatgcgcgtccggcaacgtctcacctgagccgcgtcgatctcaaagaagatggcaaagggctgaagattgtacgccagagacctgcatacggcacgccagcggtactcatggtctctatttnactttactgcgcacgtctgcacaatatcgaacagcagcttttgagtatgttcggcgataccgacggtaaacgcgaaccgatcggcgcttcaccaaaccggtaaccggtggctattactttgccccgtcgctggaccgcctgttagcgctataaggtaaaaccctg

SEQ ID NO: 36472 - DNA, 779 bp, Salmonella paratyphi A
gctcgccacccacgctggacactgtcgcaagtaaccgaattatttgaaaaaccactgctggaattgctgtttgaagcgcagcaaattcatcgccagcatttcgatccgcagcaggtacaggttagtacgctgttgtcgatcaaaaccggcgcctgcccggaggattgtaaatactgcccgcagagctcgcgctataaaaccgggctggaagccgagcgtttaatggaggtagagcaggtactggactccgcccgtaaagcgaaaaacgctggttcgacccgcttctgtatgggggcggcctggaagaatccgcatgaacgcgatatgccttatctggagcagattgtacagggcgtcaaagcgatggggctggaaacctgtatgacgctcggcatgttgaacgagagccaggcgcagcgtctggctaacgccgggctggattactacaaccacaacctcgatacctcgccggagttttacggcaatatcatcactacccgtacctatcaggagcgcctcgacacgctggaaaaagtccgtgaagcagggattaaagtgtgctccggcggcattgtgggtctgggcgaaacggttaccgatcgcgccggactgttgttgcagttggcgaacctgccgacgccgccggaaagcgtgccaatcaacatgctggtgaaggtgaaaggcacaccgcttgcggataacgatgacgtggatgcgtttgattttattcgtactatgccgtggcgcgatcatgatgccgacctcatacgtgcgtctta

SEQ ID NO: 36473 - DNA, 1537 bp, Salmonella paratyphi A
  misc_feature (1093)..(1093): n=g, a, t or c
ggagctgctgcgggttaccgctacgatgaggcgggacggctgaacggggtggtggacaacgcaggtcagtatcagcgcgagtttgcgtacgacgacaacgactgcatgacgatgcaccgggagccgggcggcgaacggtattactacacctgggcgtggtttgaaggcccggacgatgcggcgtggcgggtgacgggccatcatacggacagcggcgagcagtaccgtctggactggaatctggcagaacgctcctgtgcgtgacggatagcctggggcgttacgcgctgccactggtgggatgcgcagggcctggtgacggcgtaccgggacgaggccgggcagatgaccactttccgctggagcgatgaagagcgtttactgctggggatgacggacgcgcagggcggcaaatggcgttatgtctatgaccgtctcgtccactgacggagacgcatgacccgctgggccgggttgagcagacgcagtggcatccggtgtgccaccagccggaaacggaggtggtactcgcgggggcggcgtggcgttatgagtatgatgagcggggcaacctgcaggcggtcagcgacccgctgcaccagcgcacggtatacgggtacgaccggcacggtcaggtggtgcggataaccgacgcgcggggcggagataaatacctgcagtggaacgaagacgggcagcttatgcgccacacggactgttctggctcgcagacggcatggttttatgatgaacgcacgcggctggaaagggtgacggacgcggagagtaacagtacgcgttacagctatgacggcaacggacatctgacggaggtcatgttcgcggacgggcgtacggagcgttaccagccggatgcggcgggacgctggtgaaatacaccagcccggcggggcagataacacgctggcagcgggacggccaggggcgggtgcgcaggcagacggatgcgacgggtcgcaggacggcgtatgagtacgacgcttacgggcggctgaccacgctcacgaacgagaacggggaaagctaccggttccggtacgatgttctggaccggttgacggaacagacggtnaaaccgccagccgccgggcatacgggtataacgcgctgaatgcggtgacggcggtgatatacggcggggagcgcgggggagaaatccgtcacggtctggagcgtgatgcggcggggaggctgtacgcgaaaaccacgccggagacgcgcacggaataccggtacgacgcggcggaccgtctgctggaaaatcgcaggcggcatgatgcggcggaaggcggagagccggaagttatccggttcagctacgacagtgcgggtaacctgctgagcgaggagacgggcagggcgctgcagcaccggtacgatgttcagggcaaccgcacagaaaccagatgccggacgggcggacgctgcggtacctgtactacgggagcggccatctccagcaaatcaacctggggcggatgtcatcagcgagttcaggggatcctctagagtcgac

SEQ ID NO: 36474 - DNA, 1144 bp, Salmonella paratyphi A
gtggcgacgctgatgctgctggcggcgcggtcggtaaatctgcgcagcttccgttgcagacctggcttgccgacgcgatggccggtccgacgccggtctccgcgctgatccacgccgccaccatggttaccgccggtgtctacctgattgcacgcacgcatggcctgttcctgatgaccccggaaattctgcatctggtgggtattatcggggcgattacgctggtaatggcaggtttcgccgcgctggtgcagaccgacatcaaacgcgtgctggcctattccaccatgagccagattggctacatgttcctggcgctgggcgtgcaggcgtgggatgcggcgattttccacctgatgacgcacgccttctttaaagcgctgctgttcctggcgtccggttccgtcattctggcctgccatcacgaacagaacatctttaagatgggcggtctgcgtaagtccattccgctggtgtatgcctgcttcctggtggggggcgcggcgctgtcggcgtgccgctggtcactgcgggcttcttcagtaaggatgagatcctggctggcgcgatggcgaacggtcatatcaatctgatggtggcgggtctggttggcgcgttcatgacctccctgtacaccttccggatgattttcatcgtattccacggtaaagaacaaattcatgctcatgcagggaaggggattacccaccatctgccgctgattgtcctgatgattctgtctacctttgttggcgcgctgattgtgccgccattgcagggggtgctgccgcagacaactgaactggcgcatggtcgtgtgttgaccctggaaattacctctggcgtagtggcgattgccggtatcctgattgccgcatggctgtggctgggtaaacgcacgctggtgacgtcgatcgccaacagcgcgccgggccgtctgctgggcacctggtggtatacacgcctggggctttgactggctgtacgacaaagtattcgtcaagccattcctcggtatcgcctggctgctgaagcgcgaccccttaatgcgttgatgaacattccggctatcctttcccgttttgcagcaaaggcctggtactgagcgagaacggttatttgcgctggtatgtggcatccatga

SEQ ID NO: 36475 - DNA, 636 bp, Salmonella paratyphi A
atgtatcagcctgatttcccgaccgtaccgttccgcctcgggctttacccggtggtagacagcgttgaatggattgaacgcctgctggagggggcgtacgcacgatcccagttgcgtatcaaagataaacgcgatgaagaggtggaagccgacgttatcgccgccatcgcgttggggcgtcgttatgaccgggactcgtttatcaacgattactggcggctggcaatgaagcacaacgcctacggtgtacatttgggccaggaagatctcgaaaccactgacctgaaggcgattcaggcggcggggttacgcctgggcgtatcgacccacgatgatatggagatagacatcgcactcgccgctaagccttcttatatcgcgctgggtcatgtcttccccacgcaaaccaagcagatgccttccgccccgcagtggccgacacgtggtgcggcatattgaacgactggcggattatcccaccgtggcgatcggcggcatcagccttgaacacgctccggcggtactggcgaccggcgtcggcagtattgccgtggtcagcgccattactcaggctgccgactggcgcgacgctaccgccagttactggcaatcgcgggagtgggcgatgaatgaccg

SEQ ID NO: 36476 - DNA, 553 bp, Salmonella paratyphi A
atgcaggaaaaccacattcattccgataccacctttgcgctgcgaagcgtcgcctttcgtgtgccgggccgcacgcttttacaccccctctcgttaacgtttcccgcaggtcgcgtcaccggacttatcggccataatggttccggtaaatccacgctgttaaaaatgctggccgccatcagccgccttccgaaggggatattctgctcgacaatcagcgctggcgagctggagcggcaagcgtttgcccgcaaagttgcctatctgcctcaacaatctgccaagcggaaggaatgacggtgcgcgaactggtggcgattggccgctatccgtggcacggcgcgctggacgctttggctcgcggaccgggaaaaagtagacgaggcgattacgctggtcggcttaaaaccgtggcgcatcgtctggtcgatacgctgatccgcggtgaacgccagcgagcgtggattgccatgtggtcgcgcaggacagccgttgtctgctgctggatgagccgacgtcagcgctggataggggatcctctagagtcgggcgg

SEQ ID NO: 36477 - DNA, 1062 bp, Salmonella paratyphi A
ttgcaaagtaaatttgccaccggtgaggtggatcacacgctgctgaccggcgtcgactttatgcgtatgcgtaacgatatcaatgcctggtttggctacgacgactccgtacctctgcttgacctctataacccggtgtacactgatttcgactttgcttcacgagatccggcaacatccggcccgtaccagattttgaataagcaaaagcaaacgggtctgtacgtccaggaccaggcacagtgggataaagtcctggtaacattgggggggcgttacgactgggccgatcaagagtctcttaaccgcactactggcatcacatctaaacgtgatgataagcagtttacctggcgtggtggcgttaactacctgtttgataatggaataacgccttacttcagttatagtgaatcgtttgagccagcttcacagacgggagagaacggtaaaatattcgcaccttcgaaaggtaagcagtatgaagcgggggttaaatatgtaccgaatgatcggccgatagtcattaccggtgcggtctatcagttgaccaaaaccaacaacctgatggctgatcctgcggggtctttcttctcggttgaaggcggtgaaattcgcgcccgcggcgtggaattagaagcgaaagcggcgctttctgcaagcattaacgtcgtgggttcttacacctatactgacgccgaatacacgacggatacgacctataaaggtaatactcctgcacaggtgccaaagcatatggcgtcgttgtggggcgattacactttctttgatggcccattgtccggtttaacgctggggaccggcgggcgtttcacggggtcaagctatggcgatccggcaaactcctttaaagtaggaagttatacggttgtcgatgcattggtacgttatgaccttgcgcgcgtaggcatggcaggctccaacgttgctctccatgtcaataatctgtttgatcgcgaatacgtcgccagctgcttccagacgtacggctgtttctggggcgcagaacgtcaggtcgttgcaacggcaaccttccgtttc

SEQ ID NO: 36478 - DNA, 1251 bp, Salmonella paratyphi A
attggaattaacgaaatcatcaggtacaacatgatgttctttattgcgaattgcgccggtgacaggattccgtcgcgtttcgcgggtcgcgcgctttctcgtaaaatcggcaagagtatcaaggggtcttgcggcaatttgaagagggcttatggcgattggcgcgcttgggctggcgatggttcggtatgaccgcgcttggccgggtgctggcgaatgtacttggggccggttaattatcccggtatacgaaatgctgggcgcgaacccaatccatgttcgcgggtacgctgctgggcctgtgatattgggcggattcttcctcgccaaagagctggccggcggtgatgtcgcggcgtggctatactcagggttaatacttgggtcgatgatgggcgcgaccattgtgttctccattccggtggcgctcggcattatcgaaccgtctgaccgccgctacctggcgcttggcgtactcgcgggtatcgtcaccattcccattggctgcattgcggggggggtgatcgccatgtactcaggcgtgcagatcaatggtcagcccgtggaatttaccttcgcgctgatcctgatgaacatgatcccggtattgatcgtcgcggtgctggtagcgctggggctgaagttcatcccggaaaaaatgatcaacggtttccagattttcgccaaatttctggtggcgctgatcaccatcggtctggcggctgcggtggttaaattcctgttgggttgggagttgattccgggactcgacccgatctttatggcgccaggcgacaaacccggcgaagtgatgcgcgccattgaagtgatcggctctatctcctgcgtgctgctcggcgcgtatccgatggtgctattactgacccgctggtttgaaaaaccgttgatgaatgtcggtaagctgctgaacgtaaataatattgcggcggcaggcatggtagcgaccctggcgaacaatatcccgatgttcggcatgatgaagcagatggatacccgcggcaaagtgattaactgcgcatttgccgtctctgcggcattcgctctgggcgaccatttacgttcgccgccgccaacatgaacgccatgatcttcccgatgattgtcggcaagctgatcggcggcgtgacggcgattggcgtggcgatgatgctggtgccgaaagatgacgccgcccaggtgaaaaccgaagcggaggcgcaatcgtgaacactcgccagctactgagcgtcg

SEQ ID NO: 36479 - DNA, 1122 bp, Salmonella paratyphi A
atggctatcgaaatcaaagtaccggacatcgggacagatgaagttgaaatcaccgagattctggtcaaagtgggcgacaaagttgaagctgaacagtcgctgatcaccgtagaaggcgacaaagcctctatggaagtcccgtctccgcaggctggcgtcgtgaaagagatcaaagtctctgtcggcgacaaaactgagaccggtgcacttatcatgattttcgattccgccgacggtcgctgacgtgcgcctgctaaggcagaagagaagaaagaagcggctccggcacagcacctgctgcggcagcggcgaaagacgttcacgttccggatatcggcagtgacgaagttgaagtgactgaagtgatggtgaaagtgggcgacaccgttgaagctgaacagtcgctgatcaccgtcgaaggcgacaaggcctctatggaagtgccggcgccgttcgcgggcaccgtgaaagagatcaaagtgaacaccggtgataaagtgtctaccggctcactgattatggtcttcgaagtggcgggtgaagcaggcgcagcagcaccagcgaaagcggaagcgctccggctgcggctgctccagcagcagcgacgggcgtgaaagacgttaacgtaccggacatcggcggcgacgaagttgaagtcaccgaagtgatggtcaaagtcggcgataaagttgccgctgaacagtcgctgatcaccgtggaaggcgacaaagctctatggaagtgcctgcgccgttcgcggcaccgtgaaagaaatcaaaatcagcaccggcgataaagtgaaaaccggctcgctgattatggtcttcgaagtggaaggcgcacgcctgcggccgctccggctaaacaggaagcggcggccgggctccggcgcgaaactgagaagcctgctgccccggctgccaaagcggaaggcaaatctgagttcgctgaaaacgacgcgtacgttcacgctactccgctgattcgccgtctggccgcgagtatggcgtcaactggcgaagtgaagggactgccgtaagccgtattctgcgcgagacgttcaggctacgtgaagacgctatcaacgcgcggactgcaccggctgctgcggcgggcgtatcc

SEQ ID NO: 36480 - DNA, 932 bp, Salmonella paratyphi A
atggtgaaagtgtatgccccggcttccagcgcgaacatgagcgtcggtttcgacgtgttgggcgcagcgtcacacccgttgacggcacgttgctgggcgatgtggtatccgttgaagcagcggaccatttccgtctgcataacctggggcgatttgccgataaactgccgccggagccgcgtgaaaatattgtttatcagtgctgggaacgtttttgccaggcattggggaaaaccatcccggtggcgatgacgctggaaaaaaatatgccgattggttccgggttagggtccagcgcctgttccgtcgtcgccgcgctggtcgcgatgaatgagcactgcggcaaaccgttaaacgacacgcgtctgttggcgctgatgggcgagctggaaggccgtatctccggcagcatccattacgataacgtcgcgccgtgctttcttggcggtatgcagctgatgattgaagaaaacggcattattagtcagcaggtgccgggctttgatgagtggctatgggtactggcttatccgggcattaaagtttccaccgcagaagcacgggccattttgcctgcgcagtatcgccgtcaggattgcattgcgcatggacggcatctggccggttttattcacgcctgttactcgcggcagccgcagcttgcgccgcgctgatgaaagatgttattgccgaaccataccgcgcgcgtttactgccgggctttagccaggcgcggcaggcggtgtcggagatcggcgcgctggcgagcgggatttcaggatcggggccgacgctgtttgcctatgcgataaaccggagacggcgcaggcgtcgcggactggctgagcaaacattatctgcaaaatcaggaaggcttcgttcatatttgccggctggatacggcgggcgcacgagtagtgggataatcaatg

SEQ ID NO: 36481 - DNA, 751 bp, Salmonella paratyphi A
  misc_feature (264)..(264): n=g, a, t or c
atcccctcgctaatctgatcggaaggccagatacagcttaaagatgccgaggcctgtatggtctgttgaaagacgagatgggcgagattctggcgaaggtagacgaaccgcttaatattgaaggtaaaacgccttttgttattctgatggttggcgtgaacggcgtggtaaaaccaccactatcggtaaactggcgcgccagtttgagcagcagggtaaatcagtgatgctggcggcgggggatactttccgcgcggcgcggtncgaacagctacaggtctggggacagcgtaacaacattccggttatcgcccagcataccggcgcggactccccttcggtgatttttgacgctatccaggccgcgaaggcgcgtaatgtggatgtgttaattgccgatacggcagggcgtctgcagaacaagtcgcacctgatggaagagctgaaaaaaatcgttcgcgtcatgaaaaagctggacgaagaagcgccacatgaagttatgctgaccattgacgccagcaccggacagaacgcggtaagccaggccaaactgttccatgaagcggtaggcttaaccggtattaccctgaccaagctggacggtacggcgaaaggcggggtgattttctcggtagctgaccagtttggcattcctatccgttacattggcgtgggcgaacgtatcgaggatttgcgtccgtttaaggcgggcgattttattgaggcactttttgcccgagaggattaacaa

SEQ ID NO: 36482 - DNA, 1049 bp, Salmonella paratyphi A
  misc_feature (843)..(844): n=g, a, t or c
atgttcatggaattttccgccggattaatgccgcttgaaacggcgctgacccagatgctttcacgtataacccccgtcaccgctgtagaaacgttgccgctggtgaactgctttggccgcatcctggcgaccgatatcgtttctcccctcgatgtccccggctttgataattcagctatggatggttatgcggtaccgtgcggatttgtccgccgataagccgctgcccgtcgccggcaaagcatttgccgttcagccctaccagggagagtggcctgcgggaacctgcattcgcattatgaccggcgccccggtaccggcagtgtgcgaggcggtagtcatgcaagagcagacggaacaaaccgatgacggcgtgcgttttaccgccgatgttcgttgcggacaaaacatccgccgccgcgcgaggatattcgccaggatgcggtggtctttccggccggtacgcgcctgactactgccgaactgccggtgctggcgtcgctgggaattgccgatgcgcaggttgtacgtaaagtacgcgtagcgctgttctcgaccggcgacgagctccagcttccgggccagccgctggaggcgggacaaatttatgacactaaccgtctaactatacatttgatgctgcaacagcttggctgcgaagtgatcaatttaggcattattcctgacgatcccggtaacgttgcgccgcatttatcgacgccgacagccaggccgatgtagtgataagctcggcggcgtctcggttggtgaagcggactataccaaaaccatccttgaggagctgcgaaatcgccttctggaagtgctatcaagccaggcaannaccttcggcaaactcagtaatagctggttctgtggctgccggggaatccagtctctgcggcgctcacgttttatcaactggttcagcccttactggcgaagcttggcggcaatacgcgcaacgctgtaccgcgcccacgtgtacgcacaacatctcgcctgaagaaacacagggcgtctcgatttccagcgcgcatcctgcaacg

SEQ ID NO: 36483 - DNA, 526 bp, Salmonella paratyphi A
ctggacatcgatcttaacgatccgctcgccgtacgtgaccgggcgatgctggaggtcatgtacggcgcggggctgcgtttatccgaactggttggcctggatataaagcacctcgatcttgataccggcgaagtgtgggtaatgggtaaaggcagcaaagagcgacgcctgccgattggccgtaacgcggtgacgtggattgagcactggctggatctgcgcggcctgttcgccagcgatgaagaggcgttattcctgtcgaagctcggcaagcgtatctccgcgcgcaatgtccaaaaacggttcgccgaatggggcataaagcaggggctaaacagccacgtgcatccacataagctgcgccattcgttcgcgacccatatgctggaatcgagcggcgatctgcgcggcgtgcaagagctgctgggtcatgccaacctttccactacccaaatttatactcatcttgattttcaacatcttgcttcagtgtacgacgcgatccgcgcgctaaacgggggaaata

SEQ ID NO: 36484 - DNA, 714 bp, Salmonella paratyphi A
atgcgtttttaccggcctttggggcgtattgccgcgctcacctttgacctggatgataccctttatgataaccgtccggtgattttgcgtactgagcaggaagcgctcgcttttatgcaaaattatcacccgtcgctacgttcgtttcaaaacgtcgatttacagcggatacggcaggcggtgcgtgaagcggagccggaaatctatcatgacgttacccgctggcgccatcgtgcgatagagcaggccatgcgggatgcgggattatcggcgcaggaggccattgccggcgcgaatgcggcgatgatgcattttgccaaatggcgcagccagattgaggttccgcaggctacccatgagacgttacagcagcttgcgaaaaaatggccgctggtggcgatcactaacggcaatgcccagccggaactgtttggcctcggcgattactttaagtttgtactgcgcgccggcccggatggacgttccaagccgtttagcgacatgtatttcctggcggcggaaaaactgcatgtgccgatcggcgagatcctgcatgtcggcgatgatctgactaccgatgtggctggcgctattcgctgtgggatgcaggcctgctggattaaacctgaaaatgccgacctgatgcggacgcaggacagccgtttactgccgcatatcgaaatttcgcggttggcatctctcacctcgctgata

SEQ ID NO: 36485 - DNA, 2181 bp, Salmonella paratyphi A
cgatcccggggctgcaccttcgctggcccatacagcgccgatataaaagctgagcttggcgttaaggagctgaatcttgacgccgccatcgatgacgcagggctggatatatgcgctgccagggctgggcggcatggcaaaaggaatcgttaaagtccgcggtacggtagaagcgccgcagttgttggcggatatcaccgccgcgcttgcgctggcaggagctgtctgtcgcccaggcgcgcattgagggcgatattaaatccaccgatcagatagcgggccatctcaacgttcgcgtagagcggatttcgcagcccgacgttaacatcaatctggtgacgcttgacgccaaaggcagcgagaagcagcatcagctacagctccgtgttcagggagaaccggtatccggtcaactctccctgacaggcagttttgatcgcgaggcggcgcgctggaaagggacgttaagcgacacccgtttccagacgccagtggggccatggtcgttgaccgcgcgattgcgctggactaccgtaataaagaacagaaaatcagtatcgggccgcattgttggctgaacccgaacgccgagctgtggtaccgcaaaccattgatgcgggcgccgcaggacgggcggtggtcaatctcaaccgctttgatctggcgatgctgaagccatttatgcctgataccactcaggccagcgggatctttagcggaaaagcggacgtgtcgttggacaccaccaggagtgattgtcgcagggaaggtcacgctttcggtcgtaatgtgaaggtcacgcagaccgtcaatgacgcgccgttaccggtcgcgtttgagacgctgaacctcagcgccgatctgcacaataatcgcgccgagctgggatggctgattcgcctgacgaacaatggtcaattcgatggccaggtgcaggtaaccgatcctcaggggcggcgcaatctcggcggtaacgtcaacatgcgcaatctcaatctggcgatggtcaaccctgtcttttcgcgcggcgaaaaagcggcgggaatgttaaacgccagactacgcctgggcggcgatgtacaaagcccgcagttgtttggtcagttgcagcttagcgcgctggatattgacggtaattttatgccgtttgagatgcagccgagccagctcaccatgaactttagcggtacgcgttcgacgctcgccggtatcgtgcgaacacaacaagggcaaattaacctgaacggtaacgccgactggagccagattgacaactggcgcgcgcgggtgacggcgaaaggcagccgggtgcggattaccgttccgccgatggtgcgcctggatgtctcgccggatgtggtctttgacgcgacgccttcgctgttcacgttggatgggcgtgtggacgttccgtgggcgcgaattgtggtgcacgacctgccagagagtgcggttggcgtctccagcgatgtggttatgctcaataatgacctgcaaccagaaacgccgcagaccgcgtctattcccatcaacagtaatctgacggttcacgtcggcaacaacgtgcgtatcgcacgcttcgggcttaaagcgcgtttgaccggcgatttgaaagtcgcgcaggataagcaggggctggggctaaatggtcaaatcaatattcctgacggccgattcccgccgtacggccaggacctgcttgttcgtaaaggcgagctgctgtttctcggcccgccggatcagccgctgctcaatatcgaagcgatccgtaaccctgacgccaccgaagacgatgtcattgcgggcgtgcgcgtcacaggcacagctgatgaacccaaagcggaaatcttctccgatccggcgatgcgcaggctgaagcgctttcttatctgctgcgtgggcaggggttggacagcaatcagagtgatagcgcagcaatgacttccatgcttattggcctgggggttgcgcaaagtggtcaggttgtgggtaaaatcggagagacattcggtgtaagtaatctggcgctggacacgcaaggggtgggcgattcgtccccaggttgtggtcagcggctatgtactgccgggtctacaggtgaagtatggtgtagggatatttgactctctggcgacgctcacgttacgttatcgcctgaggggatcctctagagtcgacctc

SEQ ID NO: 36486 - DNA, 195 bp, Salmonella paratyphi A
atgttcgatacgctttcgaaagccggaaaatatctgggacaggccgcaaaaatgatgattggcgtgccagactacgacaactatgtggaacatatgcgcataacgcatccggatcagacgccgatgacctatgaagaatttttccgcgagcggcaggatgcgcgctatggtggaaaaggcggcgcgcgttgctgc

SEQ ID NO: 36487 - DNA, 857 bp, Salmonella paratyphi A
gtgagcgaaatggttgatatgactaaaactaccaccgagaaaaaactcactccgagcgatattcgcggcgtatttcttcgttctaacctgttccaggggtcatggaacttcgaacgtatgcaagcgctgggcttctgcttctctatggtgccggcgattcgtcgcctgtatccggagaataatgacgcgcgtaaacaggcgattaaacgtcacctggagttctttaacacccatccttacgttgcggcgccggtactgggcgtgaccctggcaatggaagaaaagcgtgcgaacggcgcagagattgacgatggtgctatcaacggtatcaaagtcggtctgatgggaccgctggcaggcgtcggcgaccctatcttctggggtaccgtccgtccggtattcgcggcgctgggcaggatattgcgatgagcggcagctcgcttggtccgctgctgtttttcatcctgtttaacctggtgcgcctggcgactcgttattatggcgtggcttatggctaccgcaaaggcgtcgatatcgttaaagatatgggcggcacgttcctgcaaaaactgactgagggggcgtcaatcctcggcctgtttgtcatgggggcattggttaacaagtggacgcatgtgaatatcccgctggtggtttccaccatcactggtcaggatggtcagacacgcgttaccaccgtgcaaaccattctcgaccagctgatgccgggtctggttccgctactgttgacctttgcctgtatgtggctgctgcgtaagaaagttaacccgctgtggattatcgtgggcttcttcgtcattggtatcgccggctactccgtaggactgctgggccag

SEQ ID NO: 36488 - DNA, 770 bp, Salmonella paratyphi A
atggcctacagcaaaatccgccaaccaaaactctccgatgtgatcagagcagcagctggagtttttaatccttgagggaacattgcgtcccggagaaaaactcccaccggaacgtgaactggcaaaacagttcgacgtctcccgtccctccttgcgcgaggcgattcaacgtctcgaagcgaagggattgttgcttcgtcgccagggcgcggaaccttcgtgcagagcagcctgtggcagagctttagcgaccgctggtggaactgctctccgatcaccctgaatcccagtttgacctgctcgaaacgcgccatgctctggaaggcattgcggcttattacgcggcgctgcgcagcaccgatgaagataaagaccgtattcgcgagctgcaccatgctattgagctggcgcaagagtccggcgatctggatgccgagtccgaagccgtgctccagtatcaaatcgccgtcaccgaagcggcgcacaacgtggtattgcttcatctgctaaggtgtatggagccgatgctggcgcaaaacgtgcggcagaacttcgaattgctgtatgcgcgtcgggagatgctgccgctggtgagtacgcatcgcacccgtatatttgaagccattatggccggaaaaccagaagaagcgcgtgaagcgtcacaccgacatctggcgtttatcgaagagattatgctggacagaagccgtgaggagagccgtcgtgaacgcgctttacgccgcctggaacagcgcaagaattagtttttt

SEQ ID NO: 36489 - DNA, 1470 bp, Salmonella paratyphi A
ttacagccctaccagggggtaacagcgaacagcccgtggttgccagtgaaacggaaaagcgtcggcgtaaaatttgtgactcgcttgaagaggctatccgtcgttccgggcttaaaaatggcatgacgatatccttccaccatgcgtttcgtggtggcgacaaagtcgtcaatatggtgatggcgaagctggcggaaatgggattccgcgatctgacgcttgcctccagctcattaattgatgcccactggccgcttatcgaacacattaaaaatggcgtggtgcggcagatttacacctccgggctgcgcggcaagttaggggaagagatctccgctggcctgatggaaaacccggtacagatccactctcacggcggccgcgtaaaactgattcagagcggtgagctgaatattgatgtcgctttcctcggcgtgccgtgctgcgacgaatttggtaatgcgaacggctttagcggcaagtcacgctgcggctctttggggtatgcgcaggttgatgcgcagtacgctaaatgtgtggtgctcctgactgaagagtgggtcgaattccccaattatccggccagtatcgcgcaggatcaggttgatttaatcgtgcaggtggatgaggtaggggatccggaaaaaatcaccgcgggcgcgattcgtctgtccagcaacccgcgtgaactgttgatcgcccggcaggcggccaatgtgatcgaacactcaggttatttttgtgacggtttctcgctgcaaaccggcaccggtggcgcatctctggcggtcacccgtttcctggaagacaaaatgcgtcgccacaacattacggcgagttttggcctgggcgggatcaccggcacgatggtggatctgcatgagaaagggttgatcaaagcgttgctggatacgcaatcattcgatggcgatgcgctcgttcgctggcgcagaacccgcatcatattgaaatctcaaccaatcaatacgcgaaccccgcctctaaaggcgcggcatcgaacgcctgaacgtggtgatgctgagcgcactggaaattgacgtgaatttcaacgttaacgtgatgaccggttcaaacggcgtactgcgtggcgcatcgggcggccatagcgatacggcagcaggggccgatctcaccattattaccgcaccgctggtccgtggccgaatcccatgcgtagtggaaaaagtgctgactaccgtcacgccaggggcaagtgttgatgtgctggttaccgaccatggtattgcggtgaaccctgcgcgtcaggatctgcttgataacctgcgtgctgcgggcgtggcgctgacgaccatcgaacaactgcaacagcgcgctgagcaactgaccggtaaaccgcagccgattgagtttaccgatcgggtggtggctgtggtgcgttatcgcgacggttcagtgattgacgtgattcgccaggttaaaggctgatga

SEQ ID NO: 36490 - DNA, 336 bp, Salmonella paratyphi A
catattattacgacggcggagatcgcgaaaatcctgacctctgaaaataaccatcaggtgtggtttaaagtgcaggatgcgtccctgatgaagtatatcctgtacaaaggctttatcggcgtcgacggcatcagtttgaccgtcggcgaggtaacgccaacgcgcttctgcgtgcatctcattccggaaacgctggaacgtactacgtttggcagaaaaaaactgggtgagcgtgtgaatatcgagatcgatccgcaaacgcaggcggttgtcgataccgtagaacgcgtactggctacacgagaaaatgtggtcagaaatcaggccgacattggc

SEQ ID NO: 36491 - DNA, 1184 bp, Salmonella paratyphi A
atgagtactgaaatcaaaactcaggtcgtggtacttggggcgggcccggcaggctattctgccgctttccgttgcgctgatttaggtctggaaaccgtaattgtagaacgctacaactcccttggcggtgtttgtctgaacgtcggctgtatcccttctaaagcgctgctgcacgtagcaaaagttatcgaagaagccaaagcgctggctgaacacggtatcgtcttcggtgagccgaaaaccgatatcgacaagattcgtacctggaaagagaaagtgatcacgcagctgaccggcggtctggcgggtatgccaaaggccgtaaggtgaaagtggtcaacggtctgggtaaattcaccggggcgaacaccctggaagttgaaggcgaaaacggcaaaaccgtgatcaacttcgacaacgcgatcatcgcggcaggttctcgtccgatccaattaccgtttattccgcatgaagacccgcgcgtatgggattctaccgacgctctggaactgaaagaagtgccgaagcgtatgctggtcatgggcggcggtatcatcggtctggaaatgggtaccgtataccacgcactgggttcagagattgacgtggttgaaatgttcgaccaggttatcccggcggctgataaagacatcgttaaagtcttcaccaagcgcatcagcaagaaattcaacctgatgctggaaaccaaagtgactgccgttgaagcgaaagaagacggtatctacgtttcgatggaaggcaaaaaagccccggctgaagcgcagcgttatgatgcggttctggtagcgatcggtcgtgtgccgaacggtaaaaacctcgacgcgggcaaagcaggcgtggaagttgacgaccgtggctttatccgcgtggacaaacagctgcgcaccaacgtgccgcacatcttgctatcggcgatatcgtcggtcagccatgctggcgcacaaaggcgttcacgaaggtcacgttgccgctgaagttatcgccggtaagaaacactacttcgatccgaaagttatcccgtctatcgcgtacaccgagccagaagtggcatgggttggcctgaccgagaaagaagcgaaagaaaaaggcatcagctatgaaaccgccaccttcccgtgggcagcttctggccgctgatcgcttctgactgcgcagacggtatg

SEQ ID NO: 36492 - DNA, 505 bp, Salmonella paratyphi A
gcggtaaaccagctccgggacagcgacagccccacgcgcgacgccgagatcctgcttgagtacgttacgggcaaggggcggacgtatatcatggcctttgcgaaacgccgcttaccgacgtccagcaacaacagctcgcggacctgctgcagcggcgtagacagggcgaacctattgcgtactgacggcgttacgcgaattttggcgtgccgctcttcgtttctcacgccacgctaatcccgcgcccggataccgaatgtctggtggaacaggcgttggcgcgattgccggtcaaaacctgtcgtattctggatttaggcaccggaaccggcgcgattgcgtggcgctggcctgcgagcgaccggattgcgaggtgactgcggtcgatcgtatgcctgatgcggttgcgctggcgatacgcaacgcggaacatttggctatccagaatgtgcgtatactgcaaagttgttggttcagcgcgctatcggggcagcagttcgacagg

SEQ ID NO: 36493 - DNA, 1094 bp, Salmonella paratyphi A
  misc_feature (99)..(99): n=g, a, t or c
atgaagccttctatcgttgccaaactggaagccctgcacgaacgccatgaggaagttcaggcgttgctgggcgatgcgggaattatcgccgaccagggnacccctttcgcattgtcgcgcgaatatgcgcaattaagcgacgtttctcgctgttttacggactggcaacaggttcaggacgatatcgagacggctcagatgatgctcgacgatcctgaaatgcgggaaatggcgcaggaagaactgccgaagcgaaagaaaaaagcgaacaactggagcaacagttacaggtactgctgctgccgaaagatccggacgatgaacgaaacgcgttccttgaggttcggcccggcaccggcggcgacgaagccgcgctgtttgccggcgatctgttccgcatgtacagccgttatgccgaagcgctggcgcgtggagatcatgagcatgagcgaaggcgagcatggcggttataaagagatcatcgccaaaatcagcggcgacggcgtgtatggccgactgaaatttgagtccgcgggacaccgcgtacagcgtgttccgcgaccgagtcgcaggggcgtatccatacctccgcctgtaccgtcgccgtgatgccggagctgccggaagccgagctgccggatattaacccggcggatctgcgcattgatacgtttcgttcttccggcgcgggcggtcagcacgttaacaccaccgactcctctatccgtattacccacttgccgaccggcatcgtggtggaatgccaggacgaggcgttcgcagcataaaaacaaagcgaaagcgctctcggtgctcggggcgcgcattcacgccgccgaaacgcaaaacgccagcaggccgaggcgtcaaccgccgcaacctgcttggcagcggcgatcgcagcgatcgtaaccggacctataatttccgcaggggcgctgaccgatcatcgtattaatctgacgttatatcgccttgatgaaacgatggaaggtaagctggatatgctgattgagccgattgttcaggaacaccaggctgacctgttagccgccttatccgagcaggaataatggattttcagcactggctac

SEQ ID NO: 36494 - DNA, 507 bp, Salmonella paratyphi A
aggcattattggcacgctgacgtgggtggtcttcttgttgcccagggcgggcgctgggcgaaagcaggcgtctatttgatctctcggttcgtggcccgaatttacgactgtatcaaggcgcgtagtccgctagagccgtatgtcgtggaggaagatcccggcgtgaaatcggtacgcaatatctacgattactttaaacagcatcgctatgaaaccatcgtgatgggcgcaagtttccgccgtactgagcaaatcctcgcgctaaccggctgcgatcgactgactatctctcctaacctgcttaaagagctgaaagaaaaagaagaaccggtgatccgtaaactggtgccttcctcgcagatgttccaccgtcctacgtcaatgacggaagcggagttccgctgggaacataatcaggacgcgatggccgtagagaagctgtcggaaggtatccgtctttttgccgttgaccagcgcaaactggaagacctgcttgccgccaaacta

SEQ ID NO: 36495 - DNA, 735 bp, Salmonella paratyphi A
atggcgaacatgtttgccctgattctggtgatagccacactggtgacgggcattttatggtgcgttgataagtttgttttcgcgccaaaacgtcgggcgcgccaggctgccgcgcaaacggcgtcgggagatgcgctggataacgctacgctcaataaagtggcgcctaagccgggctggctggagaccggggcgtcggttttcccggttctggcgatcgttctgatcgttcgttcatttctttatgaaccctttcagatcccgtcaggctcaatgatgccgacactgcttatcggcgattttattctggtggaggaatttgcctacggcattaaagatccgatctaccagaaaaccctgattgaaaccggtaatccgaagcgcggggatattgtggtatttaaatatccggaaaatcctaagttagattgcatcaaacgcgcagtcggtgttgccgggcgataaaatcacttatgatccagttgcgaaagaagtgacgattcagcctggctgtagctccggtcaggcgtgcgagggtgcgctgccggttacctactctagcgttgagccgagcgattttgtacagacctttgcccgccgtgacggtgtatgagcgagcaggttgttctttgaggtgtccgctaggcgatacagaagaagacggcgattccctgagccggacgtggggagacgttagggtttgtagcccaccgcatcgtgatggtgtccgatagg

SEQ ID NO: 36496 - DNA, 1156 bp, Salmonella paratyphi A
  misc_feature (151)..(152): n=g, a, t or c
gaggatcccctgcagaaagtacagcgcgctgtttatgcgttgcccaccgtcaatattggcgatgcgccattggcgtggtaacgctggaacgttgattttctggccgcgtctcggtattcgtctgccaggacatcttcacgcgctgctggcnncggttgcgccgtaatggggattgttaatctgctgggcggcaatgtggcgactatcggctcacagttccattacgttctggctgacggcactcagggcaacggcatcccgcagctcctgccgcaactgatgctgccgtggagtcttcctggctccgatttcacgctaagctgggattcactgcgcgcgctgctgccagcggctttctcgatggcaatgctgggggcaatcgaatcattgctctgcgccgtcgtgctggacggcatgaccggcaccaaacataaagctaacagcgaacttatcggccaggggctggggaatatggtcgcgccgttctttggcggcatcaccgccaccgccgcgattgcccgatctgccgccaacgtccgcgctggcgcgacctctcccgtctcggcggtaattcacgctattctggtcattctggcgctactggtcttagccccgctactctcctggctgccgctttccgcgatggcggcgctactgctgatggtggcatggaatatgagtgaagcccataaagtggtggatctgttacgccatgcgccgaaagatgacattatcgttatgctgctgtgcatgtcattaacggttctgtttgatatggtcatcgccatcagcgtggggattgtccttgcttccctgctgtttatgcgccgtattgcgcgaatgactcgacttgcgccggtcaatgtcgatatgcctgaagatgtgctggtgctgcgtgttatcggtccgctctttttcgccgcggcggaagggctgtttaccgaccttgagtcacgtattaagggcaaacgtatcgtcgttctgaaatgggacgcagtaccagtgctggatgcaggcgggcttgatgttttcagcgttttgtgaagcgtctgccggagggttgcgaattgcgtatcagtaacctggagttcacaaccgctgcgcacaatggcgcgtgccggtatcaaacctattcctgggcgtcgaccttcttccg

SEQ ID NO: 36497 - DNA, 802 bp, Salmonella paratyphi A
atgattatttcagcagccagcgattatcgcgccgcagctcagcgcacgttgcctcctttcctcttccactacatcgacggcggcgcgtatgcggaatataccctgcgccgaaatgtggaagacctgtcgcaagtcgctctgcgccagcgtgtgctgaaaaatatgtccgatttaagcctggaaacgaccctgtttaacgaaacgttgtcgatgccggtggcattagcgccggtaggtctgtgcggcatgtacgcccgtcgcggcgaagtacaggccgccgccgccgcagacgcaaagggcattccgttcaccctttccaccgtctccgtctgtccgattgaagaagttgcaccaaccattcagcgcccgatgtggttccagctttatgtgctgcgtgaccggggctttatgcgcaacgcgcttgaacgtgcgaaagcggcgggctgctccacgctggtctttaccgtggatatgccaacgccgggcgcgcgctaccgtgacgcccactccgggatgagcggcccaaacgcggccatgcgccgttactggcaggcggtgatgcaccctaaatgggcgtgggatgtcggcctgaacggtcgcccgcatgatttaggcaatatttccgcctatctgggtaaaccgaccggccttgaggactatatcggctggctggcaaataacttcgatccgtccatctcctggaaagatctggagtggatacgcgaattctgggacggcccaatggtgatcaaagggatcctcgatccagaagactgcccgatgcggtacgtttcggcgctga

SEQ ID NO: 36498 - DNA, 601 bp, Salmonella paratyphi A
atgcaaaaccggctcactatcaaagacatcgcccgcctgagcggcgtagggaaatcaaccgtttcccgcgtgcttaacaatgaaagcggcgtaagcgaacgtacccgcgagcgtgtcgaagcggtgatgaatcaacacggtttctccccgtcccgtccgccgcgcgatgcggggacaaagtgataaagtggtcgctattatcgtcactcgccttgattcgttgtctgaagaactcgcggttcagaccatgctgcctgcgttttacgaacagggctacgaccctattatgatggaaagtcagttctctccgacgctggtaatggaacatctgggcatgctcagacgacgtaacattgatggcgtggtgctgtttggctttaccggcatcacagaagagttgatctccccctggaaacgttcgctggtgctgctggcaagagatgcgcaaggttttgcctccgtctgttacgacgacgagggcgcgattcatatccttatgcagcggctgtatgagcagggacaccgcaacattagctttctgggcgttccccatagcgatattaccaccggcaaacgtcggcatgacgcatacctggggatc

SEQ ID NO: 36499 - DNA, 1352 bp, Salmonella paratyphi A
tcgcaaagcgagtcgccattcagaataatcccgaccgtgttccataattcctccatttttctcccttccctgctgactacaatagaggaagcaacattccgcaaaacgtttcaggatgagaaacttataccgatgaaaggcagtaatactttccgctgggcaatagcgattggggttgtagtagccgccgccgcattctggttctggcatagaccgggcgtcgcgcgcaagcgccgcataccgccgccgcaggtcgccgcggtatgcgcgacggccctctggcgccggtacaggccgcgaccgcgaccacgcaggccgtaccgcgctatctgagcgggctgggtaccgtgaccgccgcgaataccgttacggtgcgtagccgcgtggatggtcaactcatcgccctgcactttcaggaaggtcagcaggtcaacgcaggcgatctgctggcgcaaatcgatcccagccagtttaaggtcgccctggcaggcgcagggacagttggcgaaagataacgctacgctggcgaatgcgcgtcgtgatctggcgcgctatcaacaactggcaaaaaccaatttggtttcccgtcaggaactggatgcgcaacaggcgctggtcaacgaaacccagggaaccattaaagcggatgaagccaatgtcccagcgcgcagttacagctcgactggagtcgtatcacggccccggtctcgggacgcgtgggtctgaaacaggtggatgtcggcaaccagatttccagcagcgataccgccggtattgtcgtcattacgcaaacgcacccgattgatctcatttttactctgccggaaagcgatatcgcgaccgtggttcaggcgcaaaaagcggggaaaacgctggtcgtagaagcctgggatcggactaactcgcacaaattgagcgaaggtgtgttgctcagtctggacaaccagattgatcccacgacgggaacgatcaaaattaaagcgcgctttaccaatcaggacgatacgctgttccccaatcaatttgtgaacgcccggatgctggtcgataccgaacaaaatgccgttgtggtgcctgccgcggcggtgcaaatgggcaatgagggccactttgtgtgggtgctgaacgacgaaaataacgtcagcaagaagcgggtaaaaatcggtattcaggataaccgaaacgtggtgatcagcgcaggattgtcggcaggcgatcgcgtcgttaccgatggtattgatcggctgacggaaggcgcaaaagtcgaggtcgttgagccgcaaaccaccatggcggatgaaaaatccccttcccgccatgaaggtcaaaaaggagcgcgcgccttgatgcag

SEQ ID NO: 36500 - DNA, 1387 bp, Salmonella paratyphi A
ctcgcgctgttcggctgcttcttaattatgatcatcatcctcgcggtgctggcattaatcgtggttaaagcgctggccgaaagcccgtgggcgtgcttcaccgtctgctcaacggtgccgattgcgctgtttatgggcatctacatgcgcttcctgcgtccgggacgcgtaggcgaagtctccgttattggtatcgtgctgctggtggcgtctatttacttcggcggcgtgattgcccacgacccgtactggggcccggcgctgacctttaaagacaccaccattaccttcgcgctgatcggctacgcatttgtttccgcgctgctgccggtatggctgatcctcgccccgcgcgactatctcgctaccttcctgaaaatcggcgtgatcgtcggtctggcgctggggattgtgatcctcaacccggaactgaaaatgccggcgttgacgcagtacgtcgacggtaccggcccgctgtggaaaggtgctctgttcccgttcctgttcatcaccatcgcctgtggcgccgtctctggcttccacgcgctcatctcttccggtaccacgccgaaactgctggcctgtgagaccgatgcgcgttttatcggctacggtgcgatgctgatggagtcctttgttgcggtgatggcgctggtggcggcctcgatcattgaaccgggtctctacttcgcgatgaacaccccgccggcaggtctgggcattaccatgccaaacctgcacgagatgggcggcgagaacgcgccgctgattatggcgcagttgaaagacgttaccgcacatgcagcggcgaccgtcagctcctggggctttgtgatttccccggaacaaatcctgcaaactgcgaaagatatcggtgaaccgtcagtattgaaccgcgcaggcggcgcgccaacgctggcagtaggtatcgcgcatgtgttccacaaagtcctgccgatggcggatatgggcttctggtatcacttcggtattctgttcgaagcgctgtttatcctgaccgcactggatgcgggtacccgttccggccgctttatgttgcaggatttactgggtaacttcgtcccgttcctgaaaaaaaccgattctctggtcgcgggtatcatcggtaccgcaggctgcgtcggtttgtggggctatctgctgtatcagggcgtggtcgaccgctgggcggcgtgaagagcctgtggccgctgttcggtatctctaaccagatgctggcgccgtggcgctggtgttgagcaccgtggtactgatcaaaatgcagcgcaccaagtacatctgggtgacggtaatcccggcggtatggctgctgatctgcaccacctgggcgctgggcctgaaactgttcagcgccaaccccacagaa

SEQ ID NO: 36501 - DNA, 942 bp, Salmonella paratyphi A
  misc_feature (892)..(892): n=g, a, t or c
cagatcaaaccggagcatttaaaaaactgggtggagtgggcgaaagcgaaccggctggggctggatttcaaccccacctgtttttctcatccactgagcgctgacggttttaccctctctcatccagacgcgaaaattcgccagttctggatcgatcactgcaaggccagccgccgcgtctcggcatactttggtgagcagctcggtacgccgtcggtgatgaacatctggattccggacggcatgaaagacattaccgtcgaccgtttagccccgcgccagcgcctgctggaagcgctggatgaggtcattagcgagaaattcgacccggcgcaccacatcgacgccgttgagagcaaactgtttggcatcggcgcggaaagctacaccgtcggctccaatgagttctacatgggctacgccaccagccgtcagaccgcgctgtgcctggatgcgggccacttccatcccactgaagtgatttccgacaaaatttccgccgccatgctctatgtgccacggctgctgctgcacgtcagccgcccggtacgctgggatagcgaccacgtggtgctcctggacgatgaaacccaggcaattgccagcgagatcgtccgtcataacctgttcgaccgtgtgcatatcggcctggatttcttcgacgcctctatcaaccgtgtcgccgcgtgggttatcggtacccgcaacatgaaaaaaagcgtctgcgcgctctgctggaacccacagatcaactgcgtcagcttgaggccagcggcgattacaaccccgcgtctggcgctactggaagagcagaaatctctgccgtggcaggccgtctgggaaatgtaattgccagcgtcacgacacgccggctggcaccagtggctggacnaggttcgcgcctacgaaaaagagatcctgagcaaacgtagctgacagcga

SEQ ID NO: 36502 - DNA, 1081 bp, Salmonella paratyphi A
  misc_feature (432)..(432): n=g, a, t or c
ttcaagcgtcgttatgtagcgttacttccactttgcgtattgcttgctgcctgtagcacacgccaaaatcttccgggactcaagcgacgactggcacgtcttccggcggcttcctgcttgagccgcagcataacgtcatgcaaatgggcggcgacttcgcacacaaccctaatgcgcagagttcattgataaaatggtcagcaaacacggtttcgaccgtcagcagctgcaggagatcctctcgcagtctaaaagactggattacgtcctgcgtctgatggacagacaagcgccgaccactcagccgcccgctggaccaaatggcgcctggtttgcgtaaccgcaaacaatttattacgccggataacgtgcaaaacggcgtcgcgttctggaatcagtatgaagtacgctgaaccgcgcctggcaggtcantagctaccgccggaaatcattgtgggcatcatcggcgtggaaacccgctggggacgtatcatggggaaaacgcggattctggacgcgctggcgacgctgtcatttaactatccacgccgggcggaatatttctccggcgagctggaaaccttcctgctcatggcgcgcgatgagcaagacgatccgctcaatctgaaaggttcctttgccggcgcgatgcggctacggccagtttatgccgtcttcctataaagaatatgcggtcgatttcaatggcgatgggcacattaacttgtgggatccggtagatgccaatcggcagtgtggcgaactacttcaaggcgcatggttgggtgaaaggcgatacggttgcggtgccagcgaatggtcaggcgccgggactggcgaatggtttcaaaacaaaatacagcctctctcagcttgacgcgacagcttaacgccgcagcaatcgttgggcaatcatcaggaagccagcctgctgcgtctggatatcggtacgggctaccagtactggtacggcctgccgaacttctacaccattacccgatataaccacagcacgcattatgcgatggcggtttggcaactgggccaggcggtaggcctgcgggtgcgctaatttacgctt

SEQ ID NO: 36503 - DNA, 1209 bp, Salmonella paratyphi A
  misc_feature (883)..(883): n=g, a, t or c
  misc_feature (1191)..(1192): n=g, a, t or c
tggtaccagcagataaaagatctcccggttagcgacgccagcgtaaaagcgttgcaagtctatctgacgcagtttagcgaaggcgatagcgtgtctgccgcccgcgcccagcttagcgagcagcaaaaacagttagccgatccgcgtttccgcgcgcgctcgcagggcatcgcggcggttaatgccggagaaggcggtaaggccattgcgcaattgcagcaggcggtgagcgcccggcagacgacagcgaggcggtcggcgcgctggggcaggcatactcacagcgtggcgatcgcgcccgcgccgtcgcgcagtttgaaaaggcgctggcgatggcgccgcacagcagcagccgcgataagtgggagagtctgctgaaggtcaatcgctactggctgttaattcagcagggcgacgcggccttaaaagcgaataatctggcccaggcggagcgtttctatcagcaggcgcgagcggtggataacaccgacagctacgcggtgctggggctgggggatgtggcgatggcgcgcaaagataatgccgccgccgaacgttattatcagcagacgctgcgtatggatagcggtaataccaatgctgtacgcgggctggcgaatctttatcgccagcagtcgccgcaaaaagccgccgcgtttatcgcttctctttccgccagccagcggcgcagtatcgacgatatcgaacgcagtctggaaaatgaccgtctggcgcagcaggcggaaacgctggaaagcgagggcaaatgggcgcaggccgcagaactgcaccgtcgtcggctggcattagatccggggagcgtgtgggtgacgtaccgactgtcacgcgatctgtggcaggccggcagcacgcccaggccagnatgcaaatgcgctctctggcgcagcagaagccaaacgatccggaacaggtctatgcttatgggctttatctttccggcagcgatcgggaccgggcggctggcgcatctcaataccctaccgaccagccagtggaacagcaatattcaggaactggcgggccgattgcaaagtaaccaggtgctggaaagcgctaaccgtttgcgtgatagcggcaaagaacgcgaagcggaagcgttgttacgtcagcagccgccctctacgccattgcgttaacgttggcggactgggccagcagcgtggcgataanntgcgcacgcgccgctta

SEQ ID NO: 36504 - DNA, 868 bp, Salmonella paratyphi A
tggggagaaggccaggatccctacgtggcgattggtattgccgccagttcggacgaacacctcggcctgacggtcacgtgacgcatgtgctaagcgatgactccgtggctgagcagctgaaatcgcgacaacggcggaagactgcgccattgctgatgggcgagaagcaaagtgaacaattaaaacttgataacgagacgatgacgctggatgtcatcgccagctcgctggtcacattgcaggcgctaaatgcggcgcgtctgaaagaggcgggagcggttgatgcggcgttcgtcgcaaaaacgattaacgatagtccgatgaatctgggacaaggcatctggctgaacgacagcgcggaaggcaatttgcgcagcgctgttgcggtaagccgcgcgacccaggcgtttgacgtggagggtgaaaaagcagccttattagtcactgtcgcgatgaacgacgagcagccgattgccgtgctaaaacgcctcggcgacctgttgctgaacaataaagccgatcgtctgctgagcgctgacgccgcgacgctgctggcgttgctgaccagtgatgatgcgctgacggatgacgtactgagcgcggaatttgtagtgcgtaatgagcatggtctccatgcccgtccgggcaccatgctggtgaatacgattaaacaatttaacagtgaaattaccgtgacaaaccttgatggaaccggcaaaccggcaaacggacgtagtctgatgaaagtggtggcattgggcgtgaagaaaggccatcgtctgcgctttaccgcgcagggtgaagatgctgaacaggcgctgaaagcaattggcgatgcgatcgccgccggtctcggggagggcgcata

SEQ ID NO: 36505 - DNA, 1583 bp, Salmonella paratyphi A
atgcaggagttttacgccagggtctggaatacaaaagaaatgaatttattgaaatcgctggctgccgtcagctcgatgactatgttttcacgcgtgttgggctttgcgtagatgcgaatgtcgccagaatttttggcgcagggatagcgaccgacgccttttttgtggcgtttaaactccctaatttactacgccggatctttgccgacgctttttctcaggcctttgtgctatcttggcggaatataagagcaagcagggtgaagaagcgacgcgaatctttgtcgcttacgtttccggcctgttgacgctggcattggccgtcgtgacgtggccggtatgctggcgccccgtggtgattatggtaaccgcgccgggttttgccgatactgcggataaattcgcgctgacgacgcaactgctgcggattacgtttccctatattctgctgatctctctggcttcactggttggcgccattctcaacacctggaatcgcttctctattcccgcttttgcgccgacatttcttaatatcagcatgatcggttttgcattattcgccgcgccatactttaatccgccggtgctggcgttagcctgggcagtcaccgtcggcggcgtgctgcaactggtgtatcaacttccgtatttgaaaaagatcggtatgctggtgctgccgcgcattaactttcgcgacaccggggcgatgcgggtggtcaaacagatggggccggcgattttgggcgtttccgtcagtcagatctcccttatcatcaataccattttcgcctcgtttctggcctccggctcggtctcatggatgtactatgccgatcggttgatggagttcccgtccggcgtgctgggcgtggcgttggggaccatcctgttgccgtcattgtcgaaaagctttgccagcggcaatcatgatgagtactgccgcctgatggactgggggctgcgtttgtgctttttactggcgttgcgagcgcggtagcgttaggcattctggcgaagccgctgacggtctcgctgtttcagtacggtaaattcaccgcctttgatgcggcgatgacgcagcgggcgttaatcgcctattcggtggggctgattggcttgatcgtcgtaaaagtgttggccccgggcttctattctcgccaggatattaaaacgccggtgaaaatcgccatcgtgacgttaatcatgactcagttaatgaacctggcgtttattggaccgctgaaacacgccgggctgtcgctctctattggtttggcggcatgtctcaatgcgtcgctgctgtactggcaactgcgcaaacagaatatctttacgccacaaccggggtggatgtggttcctgatgcgtctgatcatttccgtactggtaatggccgccgtattgttcggcgtgttgcatattatgccggagtggtcgcaagggtcgatgttatggcgtttgctacgtttgatggcggtagtgatcgcgggtatgcggcctatttcgacgcgcttgccgtgctgggctttaaagtgaaagagtttgttcgtcggacggcgtaaattcagtgcctgatagcg

SEQ ID NO: 36506 - DNA, 1409 bp, Salmonella paratyphi A
tccctgctgcttttccaacatgaaaatgatgatcaggtcacggtgcgcgatattcgtctgaatatggaacaagatgccgagcatcgcgcacgtttgatttttcgggacgcgtgaaccggatcagcattccttgctttatcgtttagcggaacggtggatgcttccgattatccgcataatttaaccgcgggtattgagcaactgcgctggcaattgcagggcgcggatctaccggcgcaggggattgaggggcagggacaattgcaggcgcagtggcaggaggcgcaaaaacgtctttcatttaaccacttaaatttaacggcgaatgacagttctctgaccgggcatgttcaggtaacgctggcggacagccggaatggcaaattgacctccagtccagcaagcttaatctggacaacctgttgccgcatcatagcacagtggctcagacgggcggcgcggtgtcgcaggggcaaaatacgctccccctgaccaggccagttatcgcgtcgcgtgttggtgcgccgccttatcaggggctgcaaagctttacggcggagattgctttacaggcggattcagttcgctggcggggaatggactttacccaggtttcgacgaagatgtctaatcaggccggattgctggatatcaccgagttgcaggggaaactggccgacggagagatgtcgctgcccggcacgctggacgcccgcaccgccagtccacgcatcgaattccaccctcgcctcaaccatgttgagattgggactatcctgaaagccttcaattatccgattagcctgaccggtaagatgtcgctggttggcgatttctccggggcggatattgacgcggaggcatttcgccacagctggaaaggaaaagcgcatgttgacatgagcaatacgcgcctcgaagggatgaatttccagcaactggtgcagcaggccgtagagcgaagcggcgcgacgcgcagcagtcgcaggaaaatatggacaacgcgacccgactggatcgcttcacgaccgatctgacgctaaataagggcacgctgacgctcgacgacatggtcgggcaatcttctatgctggcgttaaccggcagcggaacgctggacctggttaagcagagctgtgatacacaatttaatctgcgtgtgctgggcggctggaacggcgatagcaacctgatcaccttcctgaaagagacgccggtgccgctgcgtctatggcaagtggcaggagctgaactataccctgcaagtggatcagttgttgcgtgacgtttgcaggatgaggcgacgtctggctcagcgactgggcggcgcatataaagatacccgctatggttgagatgtgagagaactgctggataagctgtagtatttggcctagggcagagcggaa

SEQ ID NO: 36507 - DNA, 1325 bp, Salmonella paratyphi A
atggctcaggaaatcgaattaaagtttatcgtcaatcacgacgccgtagatgcgctgcgataatcattcttcatacgctcggcggcgagcattcatgcgcccagccatgttgctgaatatctacttcgaaacgcctgataactggctacgcgccatgatatggggctgcgtattcgtggtgaaaatgggcgctatgaaatgaccatgaaaattgccgaccgggtaacgggcgggctgcaccagcgacccgaatacaatgtcgcgctaagcaacccgtgctggatctgacgcaacttccggcggaggtctggccggatgcaacctgcccgctggcctgacattaagcgtacagccgctgttcagtactgatttttatcgggaaaaatggtgtctggacgttgacggcagcaggattgaaattgcgctcgatctcggcgacgtaaaagcgggcgagtttgccgaaccgatttgtgagctggagcttgagttgcttccggcgatacgcgcgccgtgttaaaactggcgacagactgctgtcgcaaaccggtttgcgtcagggcagtctgagtaaggcggcgcgaggttatcacctggcgcaggggattgcgccgcgagtgatttcaccaacggcaattctgggaccgctacgaaagccacgtatgagttaatggttggaggcctcgctggatctggcgttgtcacagtggcagtaccatgaagagctcttgctgcgcggcgacgagtcggcgaaagaacacgtgctggatgctatgggattagtgcgccatgccttaatgctctttgggggcattgttccacgtaaagcgagcgctcacttacgtgatctacttacccaggcggaagcgacgatgacatccgcggtgtccgccgtcacagccgtttatagtacgcaaacggcgatggcgaaactagcattgacggaatggctggtgacgaaagcctggcagccatttctggacgcgaaggcgcaggccaaaatggccgattcttttaagcgtttcgccgacattcatctttctcgtcatgctgctgaattaaaaaaagtttttggacaaccgctgggtgataagtatcgcgaccagttgccgcgtttgactcgcgatatcgacagcgttttactgctggccgggtattatgatgcgatggtcgcgcaggcatggctggaaaactggcagggattgcgtcacgccattattaccggacaacgtattgaaattgaacatttccgtaatgaggccattaaccagcagccgttctggttgcacagcggaaaacgataatcagaaccgtagaaagcgcctgat

SEQ ID NO: 36508 - DNA, 1538 bp, Salmonella paratyphi A
tcaggactactggctgccatgcaagagcaataccgcccggaagagatagaatccaaagtacagcttcactgggatgagaagcgcacatttgaagtgaccgaagacgagagcaaagagaagtattactgcctgtcgatgcttccctatccttctggccgactacacatgggccacgtacgtaactacaccatcggcgacgtggttgccgctaccagcgtatgctgggcaaaaacgtgctgcagccaatcggctgggaccgcttcgcgtgccggcggaaggcgcggcggtgaagaacaacaccgcgccggcgccgtggacgtacgacaacatcgcgtacatgaaaaaccagctcaaaacgctgggttttggctatgactggagccgtgaaatcgcgacctgcaccccggaatactaccgttgggaacagaaattcttcaccgagctgtataaaaaaggcctggtgtacaagaagacttctgccgttaactggtgcccgaacgatcagaccgttcttgccaacgaacaggtgatcgacggctgctgctggcgctgcgacaccaaagttgagcgtaaagagatcccacagtggtttatcaaaatcaccgcttacgcagacgagctgttgcgcgatctggataagctggaccactggcctgataccgtaaaaacgatgcagcgcaactggattggccgctctgaaggcgtggaaatcaccttcgatgtgaagggttacgataacaccctgatcgtctataccacccgtccggatacctttatgggagccacttacctggcggtggccgcggtcatccgctggcgcaaaaagcggcggcgaataacgcgagctggcgtcgttcgtcgacgaatgccgtaacaccaaagtggccgaagccgaaatggcgaccatggagaaaaaaggcgtcgacaccggctataaagcgattcatccgttaactggcgaagagatcccggtctgggcggcaaactttgtcctgatggagtacggcactggcgcggtgatggccgttccgggtcacgatcagcgcgactacgaatttgcctccaaatatggtttgaccatcaagccggtaattctggccgctgacggttccgagccggatctttccgaacaggcgctgaccgaaaaaggcgtgctgtttaactccggcgagttcgacggtctggcctttgaagcggcgtttaacgccattgccgataaactggcggaaaaaggcgtcggcgaacgtaaagtgaactatcgtctgcgtgactggggcgtttcccgtcagcgttactggggcgcgccgatcccgatgatcacccaggaagacggcaccgtgctgccgacgccggaagatcaactgccggttattttgccggaagacgtcgtcatggacggcatcaccagcccgatcaaggccgatcctgagtgggcgaaaaccaccgttaacggtatgccggcgctgcgtgaaaccgacaccttcgacacctttatggaatcgtcatggtactacgcgcgttacacctgccggggatcg

SEQ ID NO: 36509 - DNA, 861 bp, Salmonella paratyphi A
  misc_feature (167)..(167): n=g, a, t or c
  misc_feature (231)..(231): n=g, a, t or c
  misc_feature (151)..(151): n=g, a, t or c
atgacctggttcatagaccgacgtcgtaacggcaaaaataaagcacggtggattcgcagcgctttttgccgcgttataaagcacaaattaagcagtctgatttcgaagcgattaattaacgctctgtgaccgatgtcgacagcagagagtncgtctctattccaacngatgatattagcgaaccgatgtttccatcagcggccgcgccggtactggccatcgccctcatcncgggtaacgatcactttatccagacatgactgcattgcacgcgctgcaaggcggtggcggcggcggttcgcgcagggctcaaggtcaggccagcacggacggcgaaggcatgaatgagtttgtttttcagatgtcaaaagatgagtatctggatctgctctttgaagatttagcgctgcctaatctgaagaaaaaccagcatcgccagcttaacgagtataaaactcaccgcgccggtttcacctcaaacggcgtaccggccaatatcagcgtggtacgttcgctacaaaactctctggcgcgccgtacagcaatgacggcaggaaaacgccgcgaactgcacgcgctggaaacggaactggagaccatcagcaaaagcgaaccagcgcaactgcttgaagaggagcggttacgtcgggagattgccgaactacgggctaaaatcgagcgagtgccgtttatcgacacttttgatttacgctataaaaattatgaaaaacgacctgagccctccagccaggcggttgatgttctgtctgatggacgtctcgggttcgatggaccaggcgaccaaagatatgggcaagcggttttacattccgctttttctgtgtgtgagcccaacgcaaa

SEQ ID NO: 36510 - DNA, 1925 bp, Salmonella paratyphi A
  misc_feature (1407)..(1407): n=g, a, t or c
  misc_feature (1409)..(1409): n=g, a, t or c
  misc_feature (963)..(963): n=g, a, t or c
atgagtcgcaagcaactggcgctgtttgaacctgttttactcgtacaggcgctaacggatgccgtaaaaaaattaagcccacgcgcccagtgggtaacccggtgatgtttgtggtctgggccggcagcgtgctaaccactctgttaacgctcgctatggtaacaggacaaatagcgggaagcgccttgtttacaggggtgatcagcctgtggttatggttcactgtactgttcgccaattttgccgaagcgctggcggaaggcgcagcaaagcccaggcaaacagtctgaaaggggtgaaaaagaccgcgttcgctcgtcggctgcgcgcccccccgatgatgcgcaggccgataacgtgcccgccgctgaactgcggaaaggcgacattgtcctggtcaaagcgggcgatattattccctgcgatggcgaggtcatcgaaggcggcgcctcggtggatgaaagtgcgattaccggcgaatccgcccccgtgatccgcgagtccggcggcgatttcgcctctgtcaccggcggcacgcgaattctttccgactggctggtgattgcctgtagcgtcaatcctggcgaaacctttcttgaccggatgatcgcgatggtggaaggcgcgccagcgcggaaaacgcctaacgagattgccctgacgattttgctcatcgccctgaccattgtctttttactggcgaccgccctgtggcccttatcgcctggggcggtaacgcggtcagcgtcaccgtgttggtgggttgctggtgtgcctgatacaccaccatcggtgggctactctccatgtgtagccggaatgagccgaatgttgggcgcgaacgtcatcgccaccaggccgcgccgtagaagcgcagcgatgtcgatgtgttactgctgataaaccggcactatcacgctcgcaacgcaggcgtcgatttattcccgccgagcggtggacganacgcgtgtgacgcgcgcagctcgtcgctggcgacgaaacgcggaaggccgcagcattgtgatcctcgccaaacagcgctttaacctcgtgaacgcgatacgcagtcgcttcatgccacctttgttccgtttaccgcgcaaagcgcatgagcggattatatcgataaccggatgatccgtaaaggctcggtggacgcgattcggcgtcatgtcgagagcaatggcggccattttcccgcgatgtcgagcaaaacgtcgagaacgtggcgcgtctgggagcgacgccgctggtggtcgtggaaggccgcgcctactggggggtgttttcccccccagggatttgtttaaaggcggcattaaagaacgtttcgcccagctacgaaagatgggcattaaaacggtgatgatcactggcgataaccgcctgacgggcaggattgccgangnccggtgtggacgattttcttgccgaagccacgccggaagccaagctggcgctgatccgtcaatatcaggcggaaggacggctggtcgccatgaccggcgacggcactaacgatgccccggcgctggcaggctgacgtcgcggtgggatgaactccggcacccaggcggcgaaagaagccggtaatatggtggatctggactctaacccgaccaagttgattgaagtggtgcatatcggtaagcagatgctgatgacgcgcggctcgctcaccaccttcagtatcgcgaatgatgtagcgaaatatttcgccattattcccgccgcgtttgccgctacctatccgcagctaaacgcgctcaacgtgatggggctgcattcgccgaactccgccattctgagcgcggtgatctttaacgccctgattatcatttttctgatcccgctggcattaaaaggcgtgagttataagccgctttccgcatcggccatgctgcgccgtaatttatggatctatg

SEQ ID NO: 36511 - DNA, 840 bp, Salmonella paratyphi A
atgcaatcactacaacgtaaagttctgcgtactatttgtcccgatcaaaaaggccttatcgcgcggattaccaacatttgctataagcacgagcttaatattgtgcaaaacaatgaatttgttgaccatcgcaccggacgcttttttatgcggaccgagctggaaggcatcttcaatgattccactcttctggccgatctggacagcgccttaccggaaggctctgttcgtgaactcaatcgccggacgccgtcgggtagtgattctggttactaaagaggcgcattgtctgggcgacctgctgatgaaagccaactatggcgggctggatgttgaaatcgccgcggtcattggcaaccatgaaacgttacgctcgctggttgaacgttttgagatccctttcgaactggtcagccatgagggattaacgcgtgaagagcatgacacgaagatgcggacgccattgatgcccatcaaccggactatgtggtgctggccaagtatatgcgtgttttgacgccaggttttgtggcgcgcttcccgaacaaaattatcaatatccaccactcattcctgccggcgtttatcggcgcgcgtccttatcatcaggcctatgagcgcggcgtgaaaatcatccgtaccgcgcactatgtaaatgataatctggatgaaggcccaatcattatgcaggacgtgattcacgtcgatcacacttacaccgcagaagatatgatgcgtgccgggcgcgacgttgagaaaaacgtattaagccgcgcgctgtatcaggttctggcgcagcgggtctttgtttacggcaatcggacgattattctttaatcg

SEQ ID NO: 36512 - DNA, 333 bp, Salmonella paratyphi A
gtgatgaaagacgcagattacttaattaagagctggcatccaacctgcaatgcggccgcgtttcgtgatgatatcatcgctggatttgccaataccaggtggctcggcctgactatttttgaacatacctggtcagaagcagaaaatacagggtatgttagttttatcgcgcgtttttccgaacaagggaaaaccggggcgattatcgaacgttctcgttttatcaaagaaaacggtcagtggtattatattgacggtacccgcccgcagttgggtcgaaatgatccctgcccgtgcggttcaggcaaaaaatttaaaaagtgctgcggccag

SEQ ID NO: 36513 - DNA, 441 bp, Salmonella paratyphi A
atgaagaatgcgacgttctatcttctggacaatgacaccaccgtcaacggtttaagcgccgttgaacaactggtgtgtgaaattgccgcagaacgttgggcgctggcaagcgcgtgctgatcgcctgcgaagatgagaagcagccattcggctggatgaagcgctgtgggcaagaccggcggaaagttttgtcccgcacaatctggcaggcgaaggcccacgcggcggcgcgccggttgaaatcgcctggccgcaaaaacgcaacagcagcccgcgcgatattttaatcagcctgcgtacaagctttgcagattttgccaccgctttcacagaagtggtagacttcgtcccttacgaagaaactttgaaacaactggcgcgcgaacgctacaaagcctaccgcgtggctggttttaacctgaatacggcaacctggaaata

SEQ ID NO: 36514 - DNA, 1224 bp, Salmonella paratyphi A
attcagaaaacgataaatactctgaatgatactggttcgatggaagccgtctgtttcctgaccgaactgcacgttaaaggccgcaacaactactggaaagtgcgtcaggccgtcgaaccgatatgagacgctttatagctttgatcaactcaagaccaacaagagcgagccggccgccgctacgtaagatggtctttaatgtgccgacccgccgtgagctcaccagcgtcgaatcgccatttcagcacggtctggccatcgcgccgggattaaggctgcgaaagatctcggcaacatgcgcccaatatctgtaacgccgcctacctggcgtcacaggcgcgccagttggccgacagctacagcaaaaatgtcatcacccgcgtgatcggcgaacagcaaatgcgcgaactgggtatgaacgcttatctggcggtcggccacggttcgcagaatgaatcgctgatgtcggtgattgagtacaagggcaatccgtccgaagacgcgcgcccgatcgtgctggtaggtaaaggcctgaccttcgactccggcggcatctccatcaagccatctgaagggatggacgagatgaagtacgacatgtgcggcgcggcggcggtttacggcgtgatgcgtatggtcgccgagcttcagcttccgattaacgttatcggcgtactggcgggctgtgaaaacatgccgggcggacgcgcttatcgccctggcgacgtgctgaccactatgtctggtcaaaccgttgaagtcctgaacaccgacgccgaaggccgtctggttttgtgcgacgtgctgacctacgttgagcgcttcgaaccggaagcggtcattgacgtcgcgacgctaaccggcgcctgcgtgattgcgctgggccatcacattaccggtctgatgtcgaaccataacccgctggcgcatgaactgatcggcgcgtccgagcaagcgggcgaccgcgcgtggcgtctgccgctgggcgatgagttccaggaacaactggagtccaactttgcggatatggcgaacattggtggtcgtcctggcggcgctatcaccgcgggctgcttcctgtcgcgctttacccgtaagtacaactgggcgcacctggatatcgccggtaccgcctggcgttccggtaaagccaaaggtgccaccggtcgtccggtagcgctgctgtcgcagttcctgctcaatcgtgcgggctttaacggcgaa

SEQ ID NO: 36515 - DNA, 1096 bp, Salmonella paratyphi A
atgaagtttgttgatgaagcatcgattctggtcgttgcaggcgatggcggtaatggttgtgtgagcttccgccgcgaaaaatatatcccgaaaggcggcccggacggcggtgatggcggcgacggcggcgacgtctggatggaagccgatgaaaacctgaatacgctgatcgattaccgctttgaaaaatcgttccgcgctgaacgtggtcagaatggcgcgagccgcgactgtaccggtaaacgcggtaaagacgtgaccattaaagtgccggtcggtacgcgcgttatcgaccagggaaccgctgaaacgatgggcgacatgaccaaacacggtcagcgtctgttggtcgcgaagggcggctggcactggttaggcaatacccgtttcaaatcttcggttaaccgtacgccgcgccagaaaaccaatggtacgccgggcgataagcgcgacctgctgctggaactgatgctgctggcggatgtcgtgatgctgggatgccaaatgccggtaaatcaacgttcattcgcgcggtatcggcagcaaaaccgaaagtcgcggactatccgtttaccacgctggtgccgagcctgggcgtggtacgtatggacagcgaaaagagttttgtggtggccgacattccggggttgatcgaaggcgcggcggaaggcgcgggcctggggattcgcttcctgaagcacctcgaacgttgccgcgtactgctgcacctcattgatatcgatccgatcgacggttccgatccggtggaaaacgcccgtatcattattggcgaactggaaaaatacagccaggatctggcggctaaaccgcgctggttagtgttcaacaagatcgatctgatggataaaaccgaagcggaagagaaagcgaaagcgatcccgaagcgttgggctgggaagggaaatactatctgatttccgccgccagtcagctaggggtgaaagatctctgctgggatgtgatgacctttatcatcgagaatccgatcgcgcaggctgaagaagcaaaacagccggaaaaagtcgagttcatgtgggacgattatcatcgccagcagttggctgaagtggaagaa

SEQ ID NO: 36516 - DNA, 255 bp, Salmonella paratyphi A
atggcacataaaaaggctggcggctcgactcgtaacggtcgcgattctgaagctaaacgtctgggcgtaaaacgctttggcggtgaagcagttctggcaggcagcatcatcgttcgtcaacgtggtactaaattccacgctggtaccaacgttggttgcggtcgtgaccacactctgtttgctaaagcagacggtaaagtgaaattcgaagttaaaggcccgaaaaaccgtaaatacatcagcatcgttgctgag

SEQ ID NO: 36517 - DNA, 220 bp, Salmonella paratyphi A
actatcgagttcgctgaagttctgatgatcgcaaacggtgaagaagtcaaaatcggcattcctttcgttgatggcggcgtaatcaaagctgaagttgttgcccacgggtcgtggcgagaaagttaaaatcgttaagtttcgtcgccgtaaacactaccgtaagcagcagggccatcgtcagtggttcactgatgtgaaaattaccggcatcagcgcttaa

SEQ ID NO: 36518 - DNA, 1027 bp, Salmonella paratyphi A
atgagcttatcagaaaccgcaactcaggcgccgcaaccggcgaatgtactgctggaggtaaacgatcttcgtgttacgttcgctacgcctgatggactgtgacggcggtcaacgatctgaactttacgcttcgcgctggagaaacgttaggtattgttggcgagtctggatcggggaaatcgcaaacggcgttcgcattaatgggactgctggcgacgaatggtcgaatcggcggttccggacctttaacggacgtgaaattcttaatgctacctgagcgcgaactgaatacgctgcggcagaacagatttcgaggatttttcaggagcccgatgacctcgtctaaatccttatatgcgcgttggggagcagttaatggaagtcctgatgctgcataaaggaatgatcaaaggaggacttttgaagagtccgtcagaatgctggatgccgtaaaaatgccggaagcgcgcaaacggatgaacatgtacccgcacgaattttccggcggaatgcgtcaacgtgtgatgattgcgatggcgctgttgtgcaggccgaaactgcttattgccgatgagcctaccaccgcgcttgatgttaccgtgcaggcgcagattatgaccttgcttaatgagctaaagcgcgaatttaataccgccattatcatgattacccacgatctgggcgtggtcgcgggtatttgcgataaggtcctggtaatgtatgccgggcgtaccatggaatacggtaaggcgcgcgatgtcttttatcagcccgttcatccgtattcgataggcttgcttaatgcggtgccgcgtctggatagcgagggggcggaaatgctgacgattccgggcaatcctcccaatttattgcgtttgcctaaaggttgtccgttccagccgcgttgtcctcatgcgatggagatctgcaataatgcgccgccacttgaagcgttcagtcctggtcgctgcgcgcctgttttaaaccggtggaggaactgctatgaatgctgtgattgaacaacgta

SEQ ID NO: 36519 - DNA, 213 bp, Salmonella paratyphi A
atgtttacttatcactcagcaaatacctcagcagcacaaccggccttggtcaacgcgattgaacaaggattacgcgcggagttaggcgttgtcactgaagatgatattttaatggagctgaccaaatgggttgaggcttccgacaatgacatcctcagtgacatctaccagcagaccatcaactatgtggtaagcgggcagcacccgactctg

SEQ ID NO: 36520 - DNA, 2052 bp, Salmonella paratyphi A
acaccacataacaaactccacccagcgaaaccaaacacgcacacaacctaaacaatgaacaaaatcacattcccacctacaccatcacaagaaacgaaaacactcccaccaacctacaccaagcccaaccacaccatataaaataaacacacgcacaatcacaccacaacatccaactaccaaccaacaacacactgcacaacaccaccaaaaacacacctaacacataaagccactcactctactcacctaacaaaaaaaacacaagaccacacaatcaccgccgactcgcacgcgcagtttacccgtgacatggattacattgtgaaagacggcgaagtcatcattgatgatgaacataccagtcgtaccatgcagggcgtcgctggtctgacggtctgcaccaggcggtagaagcgaaagaaggcgttgaaattcagaatgaaaaccagacgctggcgtctattaccttccagaactacttccgtctgtatgaaaagctggccggtatgaccggtacgcggatactgaagccttcgaatttagctctatctataagctggacaccgtcgttgttccgaccaaccgtccgatgatccgtaaagatttgccggatctggtctacatgaccgaagcggaaaaaatccaggccattatcgaagatattaaagaacgtaccgcgaacggtcagccagtgctggtcgggacgatttctatcgagaaatctgaagtggtctccagagagctgaccaaagcgggcatcaaacataacgtactgaacgcaaaattccacgccaacgaagcaggcatcgttgcgcaggctggttatccagcggcggtcactatcgctactaacatggcgggtcgtggtaccgatattatgctgggcggtagctggcaggcggaagtcgcgcgctggaagcgccgacggaagaacagattgcgcagattaaagcggactggcaggtacgccatgacgcggttctagctgccggtggtctgcatatcattgcaccgagcgccatgaatcccgccgtatcgacaaccagctgcgtggccgttccggtcgccagggcgatccgggttcttcccgtttctatctgtcgatggaagatgcgctgatgcgtattttcgcctccgatcgtgtctccggtatgatgcgtaaactggggatgaagccgggcgaagcgattgagcacccgtgggtgacgaaagctatcgctaacgcagcgtaaagtagaaagccgtaacttcgatattcgtaagcaactgctggaatatgatgatgtggcgaacgatcagcgccgtgcaatttatacccagcgtaacgaactgctggatgtgtctgacgtgagcgacaccattaacagcattcgcgaagatgtctttaaggcgactatcgacgcctacattccgccgcagtcgctggaagagatgtgggacatcctgggtttgcaagaacgcctgaaaaacgacttcgacttggagatgccgattgccgaatggctggataaagagccggagctacatgaggagacgctgcgtgagcgcatcctggcgcagtccatcgaggtgtatcagcgtaaagaagaggtggttggcgctgaaatgatgcgtcatttcgaaaaaggcgtgatgctgcaaacgctcgattccctgtggaaagagcatctggcggcgatggattacctgcgtcagggtattcatctgcgcggctatgcgcaaaaagatccgaagcaggaatacaagcgcgaatccttcgctatgttcgccgcgatgctggaatcgctgaaatatgaagtgatcagtaccctgagcaaagtccaggtacgtatgcctgaagaggtcgaagcgatggaaatgcagcgtcgcgaagaggcggagcgactggcgcagatgcagcagctaagccatcaggatgacgatgccgccgtggctgccgatctggccgcccaaacaggcgaacgtaagattggacgtaacgatccttgcccgtgcggttccggtaagaaatacaaacagtgtcacggtcgcctgagctaatgcgataac

SEQ ID NO: 36521 - DNA, 576 bp, Salmonella paratyphi A
gtgctgccggatcgtatcgaaacggggactttcctggtggcggcagcgatctctcgcggcaaaatcctctgccgtaacgcgcaaccggacactctggacgcggtactggcgaaactgcgcgatgctggcgcggatatcgaagtgggcgaggactggattagtctggacatgcacggcaaacgaccgaaggcggtcaatgtccgtaccgcgccgcacccggcattcccgaccgatatgcaggcgcagttcacgttgctgaacctggtggcggaagggacgggctttatcactgaaactgtctttgaaaaccgttttatgcacgtgcctgaactcagccgcatgggcgcgcgtgcggaaattgaaagcaataccgtcatatgccatggcgtagaaacgctctctggcgcccaggtcatggcgacagatctgcgggcatctgcgagcctggtgctggcgggctgtattgcggaaggcacgacgattgtggatcgcatttatcacatcgatcgcggttatgagcgcatcgaagacaaactgcgcgcgctaggcgcgaatattgaacgcgtgaaaggcgaa

SEQ ID NO: 36522 - DNA, 561 bp, Salmonella paratyphi A
gtcaacgtgattgcagaagggaaagtgctgcaattgatgaacgtgaatgacccgaacattaccgaagaaaattacatgcgggtgatttacagtaaaacggcccgtctgttcgaagtgccgcccagtgctccggtattctcgccggttgtacgcctgagcaagagaaagggttgcaggactatggccgctaccttggtacggctttccagctcattgacgatctgctggattacagtgccgacggcgagcatctcggtaaaaatgtgggtgatgacctcaatgagggcaaacctaccttaccgttgcttcagccatgcgccacgtacgccagaacagtcagcgatgatccgtaccgctattgaacaaggtaatggccgtcatcttctggaaccggttctggaagcgatgaccacctgcggctcgctggaatggacgcgtcagcgagcggaagaagaagccgacaaagcgatatccgcgttgcagatattgccggataccccatggcgtgaggcgctaatcggtctcgcacacatcgcggtgcagcgcgatcgttaatgccgt

SEQ ID NO: 36523 - DNA, 1007 bp, Salmonella paratyphi A
tccaagcgcgatatcctgacgctgtacctgaaccgcgcgccgttcgggcccgctacagggtattggcgctgcaagctgggcctacttcggcaagccgcccgcgcgcctgagctacgctgtacgcggcgctgctggccgtattgccgcagcgcgagccgcttacgccccgaccgatggcctgcgagagccgaagacgcacaggaataaagatgctgtgatcggataggcggacgagggcgtcctggcctgccgaaacggtacgcgagtcgcgtgaagagccggtctggctggcgccgcgtcaaatgccgcaactggcgccgctttttgcccgaatgatgttgagtaaaagccggagcgacaaaattgtgaccacgctggacgccgggttgcagcggcaactggaagatctggcgcgggcatggaaagggcggttgctgcacgcagttcattggcgatgatcgtcgtcgatcataccgatatgagcgtgcgcggctgggtaggatcggtagaccttaatgacgacagccgttttggtcatgtcgacatggtaacggcgatccgatcgccggagatcggtactcaaaccctttgtgtatggtctggcgctggatgacggcttgatccatcccgcatcattattacaggacgttccgcgccgtaccggagattaccgcccgggaaacttcgacagcggatttcacggcccggtcagcatgagcggcgcgctggtacgctcgctgaatctgcctgccgttcaggtgcttgaagcctatgggccgaaacgatttgcggcaaaactgcgtaacgtcggcctgccgctatatttgcctgctggcgcggcgcccaatctttcactgattctgggcggcgcgggcgcgcggcttgacgagatggcggcggcatacagcgcattcgctcgtcatgggaaagcggcgaaactacggttacagccggacgatccgctgtcggaaagaccattaatgtcgccgggagcggcgtggatcatt

SEQ ID NO: 36524 - DNA, 1357 bp, Salmonella paratyphi A
atggaaaaaacaagagccgatggcctgcccctcccgcagagatacggtgctatcctgacgattattatcggtatttcgatggcggttctggatggcgcaatcgctaatgtcgcgctgccaaccattgcgactgatttacatgcctcccctgccagctctatctggattgtcaatgcgtaccaaatcgccattgtcgtctcactgctttccctgtcttttttaggcgacatgtttggttatcgccggatctataaatgtggtttagtggtatttctgctttcatcattgttttgcgcgctttcagactcgctgcagatgctgacctggcgcatcgcgcagggatttggcggcgcggcgctaatgagcgtaaacacggcgctgattcgtcttatctacccccagcgtcatctgggacgaggcatgggaattaactcttttatcgtcgcagtctcttccgccgcgggtccgacgatcgccgcggcgattttgtccatctcatcatggaaatggctgtttctgattaatgtcccgttaggtatcatcgcgttaattctggccatacgctttttaccagcaaacatcgcccatgacactaagccgcgctttgacttaccgagcgcggtaatgaatgcgctcacatttggcctgctgattaccgcattgagcgctttgcccagggacagtcgctaacgttgattggcgcagagctgctcgttctggtcgtggtcgggtttttcttcgtgcgccgccagctttctttgcccgtccctttgttacccatcgacttgttacgcattccgcttttttcactctcgatcggcacgtcaatttgctcgttctgcgcgcaaatgttagccatggtctcgctacctttttatctgcaaaccgtgctgggccgtagcgaagtagaaaccggcctgttattgacgccctggccgctggcaacgatggtgatggcgccgctggcgggatacctgatagaacgtcttcatgccggtttgctgggggcgctgggaatggtgataatggcagccgggttgtttgcgctggtcatgttgccaggctccccctccgatctgaatattatctggccgatgatcctttgcggcgcagggtttggcctgttccagtcgccgaataatcacaccattatcacttccgcgccgctgagcgcagcggtggcgccagcgggatgctgggcacggcgcgactgttaggccaaagtactggcgccgcgctggtagcactgatgttgaaccagtttggcgatagcggtacgcatctttctctgctcgcagcggcgatcctggcgactctcgcggcggtggtgagcggtttacgtattacgcaaccacgc

SEQ ID NO: 36525 - DNA, 793 bp, Salmonella paratyphi A
tctgtttcccgtctggcgctggcactggcttttggcgtgacgctgaggcgctgtagctctacgccacccgatcagatcccttccgatcaaaccgcgcctggcaccgctcggcccaattctgtcggcaaatgaagcgaaaaacttcgttgcggcgcgctattttgcctccctgacaccgaataccgccccgtggtcgccgtcgccgattaccctgcccgcacagcctgactttgtggtggggccggcagtgacgcgagggtgtacgcacacctcaattcaagccgcggtcgatacgaagtggttaaacgcacgaacaaacgtgcagtgacattgctattatgccgggcgactatcaggggaacgtgatatgttcccgccgcgccggaagatctgacgctgtgagggaccggtggaaaaccgatcgatggtgaaaattgggatggcgagtgatggtgaaatgagtgtcgctgactggcgccgcgggatgaatcccggcggagggtatatgcctggtaaacccgcctggtatgtgttcgataactggccaaagcaaacacgccgcgacgatgcgtgtgatgtgttctgccgcgttgctggtgcgcgaataacggtctggggctgacaaatcggacactcgggaacacgctaggcggcagttgtagtgggcggagaccatacggcggtgaggctggcttagacagtaggcgacagagtccagatttgaacgagggtcaatatgccttggggcagccggaacaccttgctttgagtgagcgaacggacgggggtggac

SEQ ID NO: 36526 - DNA, 1728 bp, Salmonella paratyphi A
gaacagctatgaccatgatacgaatcgagctcgtaccccaataaagaaatcttcctgcgtgaactcatctctaacgcctcagatgcggcggacatatgaccgtccgcgctctgtcaaacccggacctgtatgaaggagatagcgagctgcgtgtgcgcgtctctttcgataaagataagcgtacgttgaccattgccgataacggcgtggggatgaatcgtgatgaggtgattgaccacttaggcaccattgccaagtccggcaccaaatctttcctcgaatcaatggggtccgatcaggcgaaagatagccagctcattggtcagtttggcgtaggcttctactccgcgtttattgtggccgataaagtgaccgtacgtactcgtgcggcaggcgacaagccggaaaatggcgtgttctgggaatcggcaggcgaaggcgaatacaccgttgccgatatcaccaaaaatgaccgtggtacggaaatcaccttacacctgcgtgaaggcgaagatgaattcctcgatgactggcgcgtacgctcaattatcagtaaatattccgatcacatcgcattgccggtagagattgaaaaacgggaagaaaaagacggcgaaaccgtgatttcctgggagaaaatcaacaaggctcaggcgttgtggacccgcaacaagtcggaaattaaagacgacgagtacaacgagttttacaagcacatcgcgcatgatttcaccgatccgctgacctggagccacaaccgcgtggaaggtaagcaggagtacaccagcctgctgtatatcccgtcgcaggcgccgtgggatctgtggaaccgcgatcacaaacatggtctgaagctgtacgtacagcgcgtgttcattatggacgatgccgagcagttcatgccgaactatctgcgtttcgtgcgcggcctgattgattctaacgacctgccgttgaacgtctcccgtgaaatcctgcaggacagcacggtaacgcgtaatctgcgtagcgctctgaccaaacgcgtcctgcaaatgctggaaaaactggcgaaagacgacgcggaaaaataccaaaccttctggaaacagttcggtctggtgttgaaagaaggcccggcggaagatcacgccaaccaggaagcgatcgctaaactgttgcgctttgcctccacccataccgactcttccgcccagaccgtgtcgctggaagattacgtctcccggatgaaagaagggcaggaaaaaatctactacatcaccgcagacagctatgcggcggcgaaaaacagcccgcacctggagctgctgcgtaagaaaggcatcgaagtgctgctgctctccgatcgcatcgacgagtggatgatgaactacctgaccgagtttgacggtaaagcattccagtcggtcgctaaagccgatgagtctatcgaaaaactggcggatgaagtcgacgaaaacgcgaaagaagcggaaaaggcgcttgagccgttcgtggagcgtgtcaaaaccctgctgggcgatcgcgtgaaagagtgcgtctgacgcaccgtttaaccgacacgccggcgattgtcaccaccgatgcggatgaaatgagcacccagatggcgaaactgttcgccgcggccggtcagtcgtgccggaagtgaaatacatctttgagctcaacccggatcatgtgctggtcaaacgcactgccgataccgaggaggggatcctctagagt

SEQ ID NO: 36527 - DNA, 1219 bp, Salmonella paratyphi A
  misc_feature (262)..(263): n=g, a, t or c
  misc_feature (977)..(977): n=g, a, t or c
tttaatcagagtaaatttaaccgcgcgacgcaagctttggtcaggtggggtcgaacatcaaaccgttcctctacaccgccgcaatggataaagggctaacgctcgccagtatgctcaacgatgtgccgatttcccgctgggacgccggggcaggttcagactggcgtccgaaaaactccccgccgcagtacgccggaccgattcgtttacgccaggggctggggcagtcgaaaaacgtggtgatggtacgcgccatgcgcanntgggcgtcgactatgcggcggagtatctgcaacgcttcggcttcccggcgcagaatatcgtgcataccgaatcgctggcgctgggctccgcctccttcacgccgatgcaggttgcgcgcggttatgcggtgatggcgaacggcggtttcctgatcgacccgtatttcatcagcaagattgagaacgatcagggcggcgtgatcttcgaagcgaaaccgaaaatcgcctgcccggagtgcgatatcccggtcatttacggcaatacgcagaaatccgacgtgctgaaaaacaccaatgtggaagaggtcgcggtttcgcaagagcagcaaaacagcgccgtaccgatgcctgaactggaacaggcaaaccaggcgctggtcgcgcaaaacggcacgcaagagtacgcaccgcatgtgattaatacgccgctggtcttctgatcaaaagcgcgctgaacaccaatatcttcggcgaacccggctggatgggtaccggctggcgtgcggcgcgcgaccttaaacgtcgcgatatcggcggcaaaaccggtacgaccaacagctcgaaagacgcatggttctccggctatggtcctggcgtcgtcacttccgtatggatcggctttgacgatcaccgccgtgatttaggccgcaccaccgcttccggcgcgatcaaagatcaaatctccggctatgagggcggcgcgaagagcgcaancctgcatgggacgcctatatgaaagccgtgctggaaggcgtgccggaacagccgctaacgccaccgccgggcatcgtcacggtgaatatcgaccgcagtaccggacaactggcgagcggcggtaacagccgtgaagagtatttcatcgaaggcacgcagccgacacaacaggcggtacacgaggtgggaacaccattattgataatggtgaaacacaggaactgttctgatcaaaaaaggcg

SEQ ID NO: 36528 - DNA, 321 bp, Salmonella paratyphi A
ttgcgcggcctgccggaaattctggtggtgctgtttatctatttcggctcctcgcaactcctgcttacgctgtctgacgggtttaccctccatctcggctttacgcagatcccggtgcaaatggagattgagaactttgacgtcagtccgttcctgtgcggcgtgattgcgttgtccctgctgtatgcggcctatgcgtcgcagactagcggcgcgctgaaagccgttccgtctggtcagtgggagtcgggtcaggcactgggattatcaaagacggcgatttttttccgtctggtgatgccgcagatgtggcgtcacgcc

SEQ ID NO: 36529 - DNA, 1554 bp, Salmonella paratyphi A
ctgattagcggccgtggccgaccaaccaagaggcgtaaagcgctgggctgccgcactcagacgttttccgtcagcaaaagacgtggcgaaagcagccgtggcttctcgctggcacagaaaatggtcggtcgcgcctgtggtgtgaaaggtatccgtccgggcgcgtactgcgaaccgaaaatgacctccgtcggttctcaggatacgaccggcccgatgacccgcgacgagctgaaagacttggcctgtctgggattctccgccgatctggtgatgcagtccttctgccacaccgcagcctatccgaagccggttgacgtcaccacgcaccacacgctgccagacttcattatgaaccgcggcggtgtctctctgcgtccgggcgacggcgtgatccactcctggctgaaccgtatgctgctgccggataccgtcggtaccggcggtgactcccatacccgtttcccgatcggtatctccttcccggcgggttctggtctggtggcgtttgccgccgcgaccggcgtgatgccgctggatatgccggaatcggtgctggtgcgcttcaaaggcaaaatgcagccgggcatcaccctgcgcgatctggtccacgccatcccgctgtacgccatcaaacagggcctgctgaccgttgagaagaaaggcaagaaaaacatcttctctggccgcatcctggaaatcgaaggtctgccggatctgaaagtcgagcaggcgtttgagctgaccgatgcttccgccgagcgttccgctgcgggttgtaccatcaagctgaacaaagagccgatcgttgaatacctgacctccaacatcgtcctgctgaagtggatgattgcggaaggctacggcgaccgtcgtacgctggaacgtcgtatccagggcatggaaaaatggctggcggacccgcagctgctggaagccgatgccgacgcggaatacgcggcggtgatcgacatcgatctggcggatatcaaagagccaatcctctgtgcgccgaacgatccggacgacgcgcgtctgctgtctgacgtgcagggcgagaagatcgacgaagtgttcatcggttcctgcatgaccaacatcggccacttccgtgctgccggtaagttgctggatagccacaaaggccagttgccaacccgcctgtgggtagcgccgccaacccgtatggacgccgcgcagctcacggaagagggctactacagcgtgttcgggaagagcggtgcgcgtattgagatccctggctgttccctgtgtatgggtaaccaggcgcgagtggctgacggtgcaacggtggtttccacttctacccgtaacttcccgaaccgtttaggtaccggtgcgaacgtcttcctggcttctgcggagctggcggcggtggcagcgctgatcggcaaactgccgacgccggaagagtatcagacctatgtggcgcaggtggataaaacagcggtagatacctaccgttatctgaactttgaccagctttctcagtacaccgagaaagcggacggcgtgattttccagactgcggtg

SEQ ID NO: 36530 - DNA, 829 bp, Salmonella paratyphi A
atgccttcaattcgactggctgacttagcagaacagttggatgcagaattacacggtgatggcgatatcgtcatcaccggcgttgcgtccatgcaatctgcaacaacaggccacattacgtttatggtaaatcctaagtaccgtgaacacttaggtttatgccaggcttctgcggttgtcatgacgcaggacgatcttccttttgccaagagcgcggcgctggtagttaaaaatccctacctgacctacgcgcgcatggcgcaaattttagatactacgccgcagcccgcgcagaatatcgcgccaagcgccgtgattgatgcgacggcaacgctgggtagcaatgtttcagtcggcgcgaatgcggtgattgaatctggcgtacaactgggcgataacgtggttatcggcgcaggctgtttcgtcggaaaaaatagcaaaatcggggcgggttcacgcttgtgggcgaacgtaacgatttaccacgacattcagatcggtgagaattgcctgatccagtcagtacggtgatcggcgcggacggttttggctacgctaacgatcgtggcaactgggtgaagatccccacaactggccgggtcattattggcgatcgtgtcgagatcggcgcttgtaccaccattgaacgtggcgcgttggatgatactgttattggtcatggcgtgattattgataatcagtcgcagattgcaccatacgtcgtgattggcgaaatacggcgttgcgtagcgtcattatggcaggtactgaagatggacagtactgctgatagtgtgcggctgatcactggcatatgaatatcgccaaa

SEQ ID NO: 36531 - DNA, 834 bp, Salmonella paratyphi A
  misc_feature (387)..(387): n=g, a, t or c
atgaaactcttcgctcagggcgccacgctcgatctcactcatccgcatgttatggggatcctgaacgtaacgccggattctttctccgacggcggcgcgcataacacgctgattgaggcggtgaaacatgcgaatttaatggtgaatgccggggcgacaattattgatgtggggggggaatcaacgcgacagagcgggcagtaggtgagcgtgggaaaaaagctgaattccgtattccggtactgaagcaatcgcgcaacgttttgaagtgtggattctgtggatacctctaaacccgaggtgatccgtgaagcgcaagggcgggcgcgcatattatcaatgatgtccgttcactctccgaacccggcgcgttggaagcggcagganaaccggcttgtcgcagtcttatgcacatgcagggcaaccccaaaaccatgcaggaggcgccgaaatatgacgatgtctttgccgaggtgaatcgctactttattgagcaaatagcacgttgtgagaaggccggcatcgcaaaagagaaattgttgctcgacccaggattcggtttcggtaaaaatctctctcacaattataccttactggcgcgactgggtgagtttcatcattttaacctgccgctgctggtgggcatgtcacgtaaaacgatggttggtcagttacttaacgtgggaccatcagaccgtctgaacggtagccttgcgtgcgcggtaattgccgcgatgcagggcgcgcagatcattcgcgtccatgacgtcaaagaaaccgtagaggcaatgcgggtggtggaagccactctgtctgcaaagggaaacaaacgct

SEQ ID NO: 36532 - DNA, 788 bp, Salmonella paratyphi A
atgagtaatcgtaaatatttcggtaccgatgggattcgcggacgtgtaggcaatgcccccattacacctgatttcgtgcttaaactgggttgggctgccggaaaagtgctggcgcgtcatggctcgcgtaaaatcattatcggtaaagatacgcgtatttccggctatatgctggagtccgcgctggaggcgggccttgccgctgcgggactgtcggcctcgtttaccggacctatgccaacgccagccgtcgcctatctgacgcggacttttcgcgcggaggcgggtatcgttatctcggcttcgcataacccgttctatgataacggcattaaattcttctctatcgacggtacgaaactgcctgacgatgtggaagaagccatcgaagccgaaatggaaaaagagatcacctgcgtagactccgccgagctgggtaaagccagccgcatcgtcgacgccgccggacgctatatcgagttctgtaaaggcaccttcccgaacgaactgagcctcaatggcctgaaagtggttgtagattgcgccaacgctacctaccatatcgcgccgaatgtgctgcgcgagctgggcgcgaccgttatcgctattggctgtgagccaaacggcgtcaacattaacgaagaagtgggcgcgaccgacgtgcgcgcgttgcaggcgcgcgtgttggtggagaaggcggacctcggcatcgcgcttgacggcgacggcgaccgggtcatcatggttgaccatgaaggcaataaagtcgatggcgatcagatcatgta

SEQ ID NO: 36533 - DNA, 1869 bp, Salmonella paratyphi A
aaattcagcgagctgtggttacgcgagtgggttaacccggcagttgatagcgatgcgttgggctaaccagattacgatggctggctggaagtagacggcgttgagtgcggcgggaagcttcaatggcgttgtggttggggaggtggttgagtgtgcccagcatccgaacgctgagcaaattgcgtgtaacgaaagtcaacgttggcggagaacgcctgttggatatcgtctgcggcgcgccaaactgtcgtcaggggctgaaagtagcggtggccaccattggcgctattctgccgggcgatttcaaaattaaagcggcgaaactgcgcggcgaaccgtctgaagggatgctgtgctccttctccgaactggggatttccgacgatcacagcggcattatcgaactgccggcggatgcgccgctgggtaccgatatccgtgaatacctgaagcttgacgacaataccatcgaaattagcgtcacgccgaaccgtgcggattgcttaggtatcatcggcgttgcgcgcgatgtggcggtactgaacaaagcgccgctccaggagcctgaaatggcgccggttacggcaaccatcagcgatacgctgccgattacagtagaggccgctgatggtgtccacgctatctgggccgggtggtaaaaggcatcaatgttaacgcgccgacgccgctgtggatgaaagagaaactgcgtcgctgcggtattcgctccatcgatgcggtggttgacgtcacgaactatgtgctgctcgaactgggtcagccaatgcatgctttcgataaagatcgcattgatggcggtattgtcgtgcggatggcaaaagagggtgaaaccgtcgtcctgctggacggtagcgaagcaacgttaaatgcggacacgctggtgatcgccgatcaccataaggcgctggggatagccggtatttttggcggcgaacattccggcgtgaacggcgaaacgcaaaatgtgctgctggaatgtgcgtactttaatccgctgtctatcaccggtcgcgctcgccgccacggtctgcataccgatgcgtctcaccgctacgagcgcggggtggacccggcgctgcaatataaagcgatagagcgcgctactcgtctgcttcttgatatctgtggcggtgatgcgggtccgataattgatgtgagcaacgaagcaacgttgccgaaacgcgccaccattactctgcgtcgcagtaaactggatcgcctgatcgggcatcatattgcggatgagcaggtcagtgatattctgcgtcgtctgggctgtgaagtgaccgaagggcaggacgagtggaaagccgtggcgccgacctggcgtttcgatatggagattgaagaagatctggtggaagaggtggtccgcgtttacggctataacaatattccggacgagccaatccaggccggtttaatcatggggacgcaccgtgaagccgatctgtcgttgaagcgggttaaaaccatgcttaacgacaaaggctatcaggaagtgattacctatagctttgtcgatcctaaagtacaacagctcatccatccaggcgcagaagcgctgctgctgccaaaccctatctccgttgagatgtcggcgatgcgtctgtctctgtggagcggattgttggcgacggtggtctataaccaaaaccgtcagcagaatcgcgtgcgtattttgaaaccggtttacgtttcgttccggatacacaagccaatctgggtattcgacaggatctgatgctggctggcgtgatttgcggtaaccgctatgatgagcactggaacctggcaaaagagaccgttgatttctatgatttgaaaggcgatctggggggatcctct

SEQ ID NO: 36534 - DNA, 1363 bp, Salmonella paratyphi A
atgcaacttaacgactctaccctgttccgccagcaggcctttatcgatggcgactggcgcgaccgcggcggcgatgtcatccccgtgagcaaccccgccaacgggaaaccgctcggcaatgtgcccaaaatgggggcggaagagacgcgcgacgccatcaacgccgccaatcgcgccctgcccgcctggcgcgcgctcaccgccaaagagcgagccaatatcctgcgtcgctggttcaatctgatgatggaacatcaggacgatttggcgcgtctgatgacgctggaacagggcaaaccgctggcggaagcgaaaggcgaaattagctacgccgcctcgtttattgaatggttcgccgaagaggggaagcgtatctatggcgacacgattccaggtcatcagaccgataaacggctgctggtgattaaacagcccatcggcgtcaccgccgcgattaccccgtggaactttccctcggcaatgatcacccgtaaagccggccccgcgctggccgcacgtgcacaatgggtactcaaacccgccagccagacgccgttttccgcgctggcgtggcggaactggcccagcgcgccggaattccgcagcgtatttaacgtcgttaccggttcgcaggcgatatcggcggcgactgaccagcaacccgctgtacgcaactgtcgtttacggctcgacgagattggcgccactaatggacaatgcgcaaagacattaaaaaagtattgctggagttgcgcgccaatgcgccgtctttagtctttgacgatgccgatctggataaagccgtcgagggcgcgctggcttcgaagtttcgcaacgccggcgagacctgtgtctgcgccaatagattgtatgttcaggacggcgtttacgatcgttttgcggaaaaactcaaccaggcggtaaataagctcgcggtcggcgacggcctgcaagccgacgtcgctatcgggccgctgattgatgaaaaagccgtggcgaaagtccaggagcatatcgccgacgcgctggaaaaaggcgcccgcgtcattacgggcggtgaagcgcacaaattaggcggcaacttctttcaaccgaccattctggtggatgttcctgataacgcgaaagtcgccaaagaagagacattcgggccgctcgcgcctctgttccgcttcagcgacgaggcggacgtcatcaggcaggctaacgatactgaattcggcctggcagcctatttttatgcacgcgatttaagccgcgttttccgcgtcggcgaagcgctggaatacggcatcgtcggtattaataccggcattatctccaacgaatcgcgcctttcggcgtattaaggcctccgattagg

SEQ ID NO: 36535 - DNA, 763 bp, Salmonella paratyphi A
attactgaaagtctgcttgttacgcactcgtctaaaaactctattgaaaaccactttgataccagttttgagctggaagcgatgctgcaaaaacgcgttaagcgtcagcttctggaggaggttcagtctatttgccctccgcatgtcactattatgcaggtacgtcaagggctggcaaaaggcctggccatgccgtattgtgcgcgcatcccgttgtcggaaacgaacctgtcgctgttattctgccagacgttattcttgacgaatatgagtccgacctgtctcaggataacctggctgaaaatgaatccgccgtttcgacgaaaccggcaatagccagattatggttgagccagtagaagatgtgactgcatacggcgtggtcgattgcaaaggcgttgactggcccgggcgaaagtgtgccgatagttggcgtggttgaaaaaccaaaagcggatgtcgcgccgtctaaccttgcgattgtcgggcgttatgtgttgagcgcggatatctgggcgttgctggcgaaaacccctccggcgccggggatgaaattcagttgaccgatgctatcgatatgctgatcgaaaaagaaacggttgaagcctaccacatgaagggtaaaagccatgactgtggtaataagttaggatatatgcaggcattcgttgaatatggcatccgtcataattcgctgggtgctgaatttaaagcctggcttgaagaagaaatgggtattaagaagtaacgatacgttataaat

SEQ ID NO: 36536 - DNA, 617 bp, Salmonella paratyphi A
atggcacagctatatttctactattcggcaatgaatgcgggtaagtcgactgcactgctgcaatcttcatacaattatcaggaacgcgggatgctaccgtcgtatatacggcggaaatcgacgatcgtttcggcgcaggcaaagtcagctctcgtatcggtttgtcgtcgccggcaaaattgttttaaccaaaatacatccttgtttgaagagattcgtgccgagagcgcgcgcagacaatacattgcgtgttagtcgacgaaagccagtttttgactcgccagcaggtttatcaattatccgaggttgtcgacaaattagatattccagtactctgctatgggctacgaacagactttcgtggggagctctttgtcggcagccaatacttgctggcatggtcagataagctggtggaattaaaaactatctgtttctgcggtcgtacagccagtatggttttgcgccttgatcaggacggcaggccttataacgaaggcgaacaggtgggttattggcggaatgaacgctacgtttcagtttgccgtaagcattataaggacgcgctggtagagggctcactgacggcgattcaggagcgccatcgcgacatatga

SEQ ID NO: 36537 - DNA, 665 bp, Salmonella paratyphi A
atgagcattactatttacactcgcaataactgtgttcagtgccacgccacaaagcgggcgatggaaagccgtggatttgaatttgagatggtgaacgtcgatctggtgccggatgcagcggatacgctccgggcgcaagggtttcgtcaattaccggtggtgatggcgggcgatttgagctggtctggcttccgtccggacatgattaaccgtctgcccccgacaccccacgcggcaaacgcatgagcgcgctcgtctacttctccagcagctctgaaaatacgcaccgttttatgcagcgtctggggctaccgccacgcgtattccgctcaatgagcgggagcgaattcgggtagacgaaccgtacattctggttgtgccgtcatacggcggcggcgggatggcggtgcggtgcgcgacaggtgatccgctttttaaatgatgaacacaaccgggcgcgcattcagcgcgttatcgctccggtaatcgcatttcggcgatgcctggggatgcgctggcgatgtgatagcacaaaaatacggcgtaccctggctgtacgctttgagctcatgggcacacaacgcgacatcgataacgtccgaagaggagtaaatgaattttggcaacaactaccccggagcgcgtaatgcaggaaaccatggatt

SEQ ID NO: 36538 - DNA, 1102 bp, Salmonella paratyphi A
  misc_feature (1072)..(1073): n=g, a, t or c
atgttatcctctcaaacttcctcaatttttaccgtaagccgccttaaccagacggttcgtctgctgttagaacaggagatgggacaggtatggatcagcggcgagatttctaatttcacgcagcctgcgtcgggccactggtactttacgctcaaagacgataccgctcaggtgcgctgtgcgatgttccgtaacagcaaccgccgggtgacgttccgtccgcagcacgggcagcaggtgctggtacgcgccaatatcacgctgtacgagccgcgcggcgattatcaagtcatcgccgaaagtatgcagcccgcgggcgaaggcttgttgcagcagaaatatgagcagctaaaagccaaactccaggccgaaggcttgttcgatcagcagcataaacagccgttgccctccccggcccactgtgtgggggtgatcacctcgaaaaccggtgcggcactgcacgacattctccacgtgctaaagcgtcgtgacccatccctacccgttattatctatccgacggcggtccagggcgacgacgcgccggggcagatcgttcgtgctatcgaactggcaaacgcgcgcggcgagtgcgacgtgctgatcgtcgggcgcggcggcggttcgctggaagatttgtggagttttaacgacgaacgcgtggcgcgggctatttttgccagccgtattccggtggtcagcgccgtcggtcacgaaacggatgtcacgatagccgattttgtcgccgacctgcgcgcgccgacgccatcagcagcggcagaaattgtcagccgtaaccagcaggagttgttacgtcagatccagtccgcccagcagcgcctgggcatggcgatggactactacctcgccaatcgcagcacgtctttcacgcagatttttcaccgtcgcaacagcaacatcgcaactgcgtctggcccgtcagcaaaccgcgctggaacgtctacgccaacggatgggatttgcgcttgaggaccaggattaagcagagccaatcgcagcaacagcgcgtaagtcaacgcctgagccagcaataaatccagcgcgcattcannacgccgtcgcgcatccaacagctggaata

SEQ ID NO: 36539 - DNA, 2311 bp, Salmonella paratyphi A
  misc_feature (1687)..(1687): n=g, a, t or c
  misc_feature (1762)..(1762): n=g, a, t or c
gggaccatcaccattgctgaacctatcggcattatttgcggtatcgttccaaccactaacccgacctctactgcgatcttcaaatcgctgattagcctgaagacccgtaacgccatcatcttttctccgcatccgcgcgctaaagaagcaactaacaaagcggcagacatcgttctgcaagcggctatcgctgccggcgcaccgaaagatctgattggctggatcgatcaaccttccgtagaactgtctaatgcgctgatgcaccacccggatattaacctgatcctcgccactggcggtccaggcatggttaaagctgcatacagctccggtaaaccggcaatcggcgtaggcgcaggtaacaccccggttgtcattgatgaaaccgctgatatcaaacgcgctgtggcgtctgttctgatgtctaaaaccttcgataacggcgtaatctgtgcttctgaacagtctgttgtcgttgttgattccgtctatgatgccgttcgcgaacgtttcgccagccacggcggctacatgctgcagggccaggagctgaaagcggttcaaaacgttattctgaaaaatggcgctctgaacgccgctatcgtcggtcagccagcctacaaaatcgctgaactggcaggcttctccgtaccagaaaccaccaagattctgatcggtgaagttacggtcgttgacgaaagcgaaccgttcgcacacgaaaaactgtctccgactctggcgatgtaccgtgcgaaagatttcgaagaagcggtagaaaaagcagaaaaactggtcgctatgggcggtatcggtcacacctcctgcctgtacactgaccaggataaccagccagaacgcgttgcttacttcggtcagatgatgaaaaccgcgcgtatcctgatcaacaccccggcctctcagggtggtatcggtgacctgtacaacttcaaactcgcaccttccctgacgttgggttgtggttcctggggtggtaactccatctctgaaaacgttggtccgaaacacctgatcaacaagaaaaccgttgctaagcgagctgaaaacatgttgtggcacaaacttccgaaatctatctacttccgccgtggctctctgcccatcgcgctggatgaagtgattactgatggccacaaacgtgcgctcatcgtgactgaccgcttcctgttcaacaacggctatgcagaccagatcacctctgtgctgaaagcggctggcgttgaaaccgaagtcttcttcgaagttgaagcagacccgacgctttccgttgttcgcaaaggcgctgagctggctaactccttcaaaccggacgtgatcatcgcgctgggggcggttccccgatggacgccgcgaaaatcatgtgggtcatgtacgaacatccggaaactcacttcgaagaactggcgctgcgctttatggacatccgtaaacgtatctacaagttcccgaaaatgggcgtgaaagcgaaaatgatcgccgtcaccaccacttccggtaccggttctgaagtcacaccgtttgcggttgtgaccgacgatgcaaccggtcagaaatatccgctggctgactatgccctgaccccggatatggcgattgtcgatgccaacctggtgatggatatgccgaagtccctgtgtgcgttcggtggtctggatgcggtaactcacgncctggaagcttacgtttccgtactggcttctgagttctctgacggtcaggctctgcaggctctgaaactgctganagaaaacctggcggcgtcttaccacgagggtctatagaccggttgcgcgtgaacgtgtcacagtgcagcgactatcgccggtatcgcgtttgcaacgccttctcggtgtatgtcactccatgcgcacaaactgggctctcagttccacattccgcacggtctggcgaaccctgctgatttgtaacgttatccgctacaacgcgaatgacaacccgaccaagcagaccgctttcagccagtacgatcgtccgcagcacgccgtcgttacgctgaaattgctgaccacctgggcctgagcgcgccggggaccgtaccgccgctaagattgaaaaactgctggcatggctggaaagcattaaagctgagctgggcattcctaagtctatccgtgaagcaggcgtgcaggaagctgacttcctggcacacgttgacaaactgtctgaagatgccttcgatgaccagtgcaccggcgctaacccgcgttatccgctgatctccgaactgaaacagattctgctggatacctactacggtcgtgatttcaccgaa

SEQ ID NO: 36540 - DNA, 252 bp, Salmonella paratyphi A
atgacgtcaagtcatcatggcccttacgaccagggctacacacgtgctacaatggcgcatacaaagagaagcgacctcgcgagagcaagcggacctcataaagtgcgtcgtagtccggattggagtctgcaactcgactccatgaagtcggaatcgctagtaatcgtggatcagaatgccacggtgaatacgttcccgggccttgtacacaccgcccgtcacaccatgggagtgggttgcaaaagaagtagg

SEQ ID NO: 36541 - DNA, 899 bp, Salmonella paratyphi A
  misc_feature (414)..(415): n=g, a, t or c
  misc_feature (765)..(765): n=g, a, t or c
atgaaaacgttggtagttgctcttggcggcaacgcattattgcagcgcggagaagcgctaacggcagagaatcaatatcgcaatattgccgacgcggtgcctgcgctggcgcgacttgcccgctcgtatcggctggcgatagtacatggcaacggcccccaggtcggcctgttggctttacagaaccttgcctggaaagccgttgagccttatccgctggatgtgctggtagcggagagtcagggcatgatcggctatatgctggcgcacgtctggcgcttgaacccgatatgccgccggtgactgcggtattaacgcggataaaggtatcggcggacgatcctgcttttcttgaaccggaaaagtttatcggtcccgtttattcgccagaagagcaaatgtcgctggaagctnntatggctggcatatgaaacgtgatggaaaatatctgcgccgtgtcgttgcttccccggcgccgcgtcagattatcgaaagcgccgctattgagttattgctaaaagagggccatgtggtgatttgcagcggcggtggcggggtacctgttgccggcgagggcgaaggggtcgaggcggtgatagataaagacctggcggcggcattgctggcggacgagatagcggccgatggtctgatcattttgacggatgcggatgcggtgtatgaacattgggggacgccgcagcagcgcgctattcgtcaggcttcacccgatgagctggcaccgtttgccaaagccgatgcgcngatggggccgaagtgaccgcggtaaggctcatgtgaagcggtgcggaaagccggcatggattggcgcattatcgcgtattgacgataccctggcgggcagggcgggaacctgcatctgtctgtgatcgcgacgg

SEQ ID NO: 36542 - DNA, 595 bp, Salmonella paratyphi A
gatgcgggtatcagcaacgatcgtatcctgatcaagctggcgtccacctgcgcagggcattcgcgcagccgaacagctggaaaaagaaggcatcaactgtaacctgacgctgctgttctccttcgcgcaggcgcgtgcgtgcgccgaagcgggcgtctacctgatctcgccgttcgtaggtcgtattcttgactggtataaagccaataccgacaagaaagactatgcgccagctgaagatccgggcgtggtttccgtaacggaaatctacgagtactacaaacagcatggttacgaaaccgtcgttatgggcgcaagtttccgtaacgtaggcgaaattctggaactggcgggctgcgaccgtctgactatcgcgccggcattgctgaaagaactggcggaaagcgaaggggcgattgagcgtaagctctctttctccggcgaagtcaaagcgcgtccggaacgcattaccgaagccgagttcctgtggcagcatcaccaggaccccatggcggtggacaaactggcggatggtatccgtaagtttgcggtagaccaggaaaaactggaaaaaatgatcggcgatctgctgtaa

SEQ ID NO: 36543 - DNA, 588 bp, Salmonella paratyphi A
atgaatactttacgcattggcctggtttccatttctgaccgtgcttccagcggcgtttaccaggataaaggtatcccggcccttgaagagtggctggcatctgcccttaccaccccttttgagctgcaaacgcgattgatcccggatgaacaggcgatcatcgaacagaccttatgtgaactggttgatgagatgagctgtcatctggtgctgaccactggcggtaccggtccggcgcgtcgcgacgtcacgccggacgcgacccttgccatcgccgaccgtgaaatgccaggttttggcgaacagatgcgccagatcagcctgcgctttgtgccgaccgccattctttcccgccaggtgggcgttatccgtaaacaggcgttaattcttaatctgcctggacagccaaaatcgatcaaagaaacgctggaaggcgtaaaagcggacgatggcagcgttagagtgccgggcatttttgcgagcgtgccgtattgtatacagctgcttgacgggccgtatgtcgaaaccgcgccggaagtggttgccgctttccgtccgaagagcgccagacgtgagaatatgtcgtcc

SEQ ID NO: 36544 - DNA, 619 bp, Salmonella paratyphi A
  misc_feature (437)..(438): n=g, a, t or c
atggctctcatcattacgctatatctgagggaaaaaatatgccccgtctcatccttgcgtctacctctccctggcgtcgcgcgctgctggaaaagctgacgattcctttcgaatgcgccgcgccggatgttgatgaaacccccatgccgggcgaacgccgcgtcagttggtgctgcggctggcgcaggcgaaggcgcaatcgctcgccgcgcgtttcccgaatcatttgattattggctccgaccaaatttgtgttctggacggcgaaatcaccggcaaaccgctgacggaagaaaaagcgcgtcacgaattagccaaagccagcggaaatattgtgacgttttataccggactggcactgtataactccgcctccgggcacttacaaaccgaagtggagccttttgacgttcattttcgccatttaagcgagcgannaatagacgactatgtccgtaaagagcatccgctgcactgcgcgggaagttttaaaagcgaaggtttaggcattgcattatttgagcgcttagagggccgcgatccgaacacgctgatcggcttgccgcttattgccctgtgccagatgctgcgacgggaagagatgaacccgctgaatgcc

SEQ ID NO: 36545 - DNA, 931 bp, Salmonella paratyphi A
atggcccaacagacgcctttgtacgaacaacacacgctatgcggcgcccgcatggtcgattttcatggctggatgatgcccctgcattacggctctcagcttgatgaacaccacgctgtgcgcaccgatgccgggatgtttgatgtatcgcatatgaccattgtcgatcttcatggtagccgcacacgagagtttctacgttatctgctggcaaacgacgtcgcgaagctaacgaagacgggtaaagccctctactccggtatgcttaacgcatcgggcggcgtgattgatgaccttatcgtctactacttcactgaagatttcttccgtctcgttgttaactccgccacccgcgaaaaagacctctcctggattacccaacacgctgaaccttatgccatcgacattaccgttcgtgacgacctgtcgctgattgcggtacaggggccgaatgcgcaggaaaaagcggcgactctgtttactgaccaacagcgccatgcagtagaaggtatgaagccgttcttcggcgttcaggcaggtgatctgtttatcgccaccaccggttataccggcggagcgggatatgaaatcgccatgccgaatgaaaaagcggcggatttctggcgtgcgctggtggaggcgggcgtgaagccgtgcggtcttggcgcgcgcgacacgctgcgtctggaagcaggcatgaacctgtacggtcaggagatggatgaaggtatctctccgctggcggcataatatgggatggactatcgcctgggaacctctgaccgcgactttattggccgtgaggcgctggagatgcagcgtgaaaaaggccatgagcagcttgtcgtctggtgatgaccgagaaaggcgtattgcgtaatgaactgccgtgcgttttaccgatgcaaggcaatcacaagaagcatgggac

SEQ ID NO: 36546 - DNA, 1134 bp, Salmonella paratyphi A
  misc_feature (15)..(15): n=g, a, t or c
gggagcggtttgctnatggctactggatcacgttgtcccccagccgttggtatcgatgcgtcgcttcagcttcgggtgtcggcgattaatgcgccagcgaaaaactgcttacccgtcttggcgtatggtcaaacattgtggtcgcgacgggcaagttgctaccacggtatggaagtccgggataaagacagctttggccgtattacgtttgatgacgcaagcatgggatatagccatctggggcatattgttgaaaacagcgtcattcactacgcattgtggcaaaaagcgcagcaagcggcggatatcaccttaatggcgccagcagagttacagcaggtcgcctggggagagaacgacgccttcctgactttaaaagacggcgcgatgttaaccgcgcgtctggtgattgccgcggatggcgccaactcctggctgcgtaacaaagcggatattcccttaactttctgggactaccgtcaccatgcgctggtagcgactatccgcaccgaagagccgcacggcgcggttgctcgccaggtgtttcatggtgaaggtattctggcgtttttgccgttaagcgatccgcatctgtgttccattgtctggtcgctttctccgcaggatgcggagcgtatgcaacagagcggcgacgaggcgtttaaccaggcgttgactatcgccttcgataatcggctgggcttatgccgcctggaaagcgaacggcaggtttttccgctgacgggccgctatgctcgccagtttgccgcgcatcgtctggcgttggtcggcgatgccgcgcacaccatccatccgctggcagggcaaggcgtcaacctcggttttatggacgcggccgaactggtggacaatctgcgccggcttcagcgccagggcaaagacattggtcaacatctttatcttcgtcgttatgagcgtagtcgtaaacatagcgcggcgatgatgcttgccgggatgcaaggttttcgtgacctgtttgccggcgaaaacccggcaaaaaaattgctgcgcgacatcgggctgaaactggcggatacgctccccggcgtcaaaccccaactgcttcgccaggcaatggggctaaacgatcttccgcaatggcttcgttaagcg

SEQ ID NO: 36547 - DNA, 1548 bp, Salmonella paratyphi A
  misc_feature (335)..(335): n=g, a, t or c
  misc_feature (337)..(337): n=g, a, t or c
  misc_feature (1335)..(1335): n=g, a, t or c
  misc_feature (1337)..(1337): n=g, a, t or c
atgaaatatgaattaactgccactgaagcgcgagtgattgggtgtctgctggaaaagcaggtgacaacgccggaacagtatccgctttccgtcaacggcgtggtgacagcctgtaatcagaaaaccaaccgtgaaccagtgatgaacctgacggaacaagaggtacaagaacagctcgataacctggtgaaacgccactttttgcgtacggtcagcgggtttggcaatcgcgtcaccaaatatgaacagcgtttctgtaattccgaatttggcgatctgaaacttagcgcggcggaagtggcgcttgatcactacgctgctgtggcggcgcgcananaccggcgagttgcgtagccgggcgtcgcggatgcatgaattcagtgatatggcggaagttgaatccacgctggaacggcttgccagtcgtgaggacggcccgtatgtcgtccgtctggcgcgtgaaccgggtaagcgcgaaagccgttatatacaccttttttgcggcgacgtcgatgaactgtctctccagacgtctgcgccggaaagtgcgtcgggcgatcttcagtcgcgcgtcgaagcgctggaaagcgaagtggcggagttaaagcagcggctggattctttgttagctcacctgggagagtaatgtgagaacattacggattggcattgtcggattaggcggtattgcgcagaaggcctggctgccggtattaaccaacaccgccggatggacgttacagggcgcctggtctccttcgcgggataaagccttacgtatctgcgaaactggcgcataccgtatgtggattcgctggcgaatttagcgtccggctgcgatgcggtcttcgtccactccagtaccgcaagccattatgccgtggtcagcgaacttctcaatgccggcgtccatgtttgcgtggataaaccgctggcggaaaatctacgtgatgccgaacggctggtggcgctggcggcgcaaaaaaaattgacgctgatggttggctttaatcgccgtttcgcgccgctgtaccgcgaactgaagacgcgcctcggcactgcggcgtcactgcgtatggataaacatcgtaccgatagcgtcgggccgcacgacttacgttttactttgctcgatgactatctgcatgtcgtggataccgctctgtggctggcgggcggcgaggcgcgcttgccagcggcacgttgctcaccagcgagtccggcgaaatgtgctatgcggaacatcatttttccgccgacaaactacaaattaccaccagtatgcaccggcgcgccgaagtcagcgtgaatcggtccaggccgtcaccgacgggngnttgtatgacgtgacggatatgcgtgaatggcgcgaagaccggggcagggtattctcatcaaacccattccgggttggcaaacgacgcttgaacagcgtggttttgtcggatgcgcgcggcatttcattgactgcgtacaaatcagacggttccgaaacgcgggggagaggcgatttggccagcgcgtcgtggagcctgtgggcggaactca

SEQ ID NO: 36548 - DNA, 892 bp, Salmonella paratyphi A
atgaacatgaaaaaactggctaccctggtatctgctgttgcgctgagcgccaccgtgagcgcgaatgcaatggcgaaagacaccattgcgctggtgatctctaccctcaataatcccttcttcgtgtcgttaaaagacggggcgcaaaaagaggcggataaactgggttataacctggtggtgctggactcccagaacaaccctgccaaagagctggcgaacgtgcaggatttaaccgttcgcgggaccaaaattttgctgatcaacccgactgactccgatgcggtgggtaacgcggtgaagatggcgaaccaggcgaagattccggttatcacgcttgaccgccaggcaaccaaaggcgatgtcgtcagccatatcgcgtctgataacgtgctgggcggtaagatcgctggcgactatatcgcgaaaaaagctggcgaaggcgccaaagtgattgagctgcaaggcattgccggaacatctgcggcgcgtgagcgtggcgaaggtttccagcaggcggtagccgcccacaaatttaatgtcctggccagccagcctgccgatttcgaccgtactaaaggtctgaacgtcatgcagaacctgctgaccgcgcatccggatgttcaggctgtcttcgcccagaacgatgaaatggcgctggcgactgcgcgcgctgcaaactgccggtaaagcagatgtgatggtggttggatttgacggtagccggatggcgaaaaggccgtaaaagatggcaaactggcagcgactatcgctcagttaccggatcaaatcggccaaaggcgttgaagtagcggataaggtgctgaaaggcgaaaaagttcaggccaaatatccggttgacctgaaactggtcatcaagcagtaataaacg

SEQ ID NO: 36549 - DNA, 971 bp, Salmonella paratyphi A
atgacaacccaggctgtttctggtcgccgttatttcactaaagcgtggcttcttgagcagaagtcgctcattgccctgctggtgttgatcgcgattgtttcgacgttgagccccaacttttttaccgttaataatctgttcaatattcttcaacagacctccgtcaacgccattatggcggtggggatgacgttggtgattctgacatcggggatcgatctgtccgtcggttccctgctggcactcaccggtgcggttgccgcttcaatcgtcggcgttgaagtgaatgcgctggtcgcggttgccgccgcgctggcgctgggcgctgcgattggcgccgtcactggcgttatcgtcgcgaaagggccgcgtacaggcgtttatcgctacgctggtgatgatgctgctactgcgtggcgtgacgatggtttacaccgacggtagcccggtcaacaccggctttaccgataacgccgatctgtttggctggttcggtatcggtcgtccgctgggcgttcctacgccggtctggatcatggctatcgtctttatcgccgcctggtatatgctgcatcacacccgtctgggacgctatatctacgcgctgggcggtaacgaagcggcgacgcgtctgtctggcattagcgtgagcaaagtgaaaattatcgtctattcactttgcggcctgacagcatcgctggcgggcatcattgaagtggcgcgcctctcttccgcgcaccgacggcgggtaccggctatgagctggatgctattgccgccgtggtgctgggcgcaccagccttgcaggtggtaaagggcgcattgttgggacattgatcggcgcattgattctcggcttccttaataatggtttgaatttgttaggtgtttcctcctattaccagatgatcgtcaaagcggtggtgattttgctggcggtactggtagacaacaaaaagcagtaacaacga

SEQ ID NO: 36550 - DNA, 553 bp, Salmonella paratyphi A
  misc_feature (477)..(477): n=g, a, t or c
atgtggttactggttcgtggcgtttgggaaacgttggcgatgacctttgtctccggtttcttcggtttcgtgattggcctgccggttggcgtattgctgtatgttacgcgcccggggcagattatggagaacgccaggctgtatcgctccctctctgcggtggtcaatattttccgctcgattccctttatcatcctgctggtgtggatgattccttttacccgaataattgtcggcacctccattggtttgcaggccgcgattgtaccgctgaccggcgcgccgcgccttttatcgcccgtatggtggaaaatgcgttgttagagactctgccgggctgattgaagcctcgcgagcgatgggcgccacgccgctgcaaattgtacgtaaaatccttttaccggaagcgctgcctggtctggtaaatgcggcaaccattacactgatcaccctggtcggttactccgccaatgggcnccggtcggcgcaggcggcctcggtcaaatcggctatcagtacggttatattggatacaatgctaccgtgatgaata

SEQ ID NO: 36551 - DNA, 941 bp, Salmonella paratyphi A
gtgcctgatatgaagctttttgctggtaacgccaccccggaactagcacaacgtattgccaaccgcctgtacacttctctcggcgacgcgccggtaggtcgctttagcgacggcgaagtcagcgtacaaatcaacgaaaatgtacgcggtggtgatattttcatcatccagtccacttgtgccccaaccaacgacaacctgatggaattggtcgttatggttgatgccctgcgtcgtgcttccgcaggtcgtatcaccgccgttatccctactttggctatgcacgtcaggaccgtcgcgtacgttccgcccgtgtgccgattaccgcaaaagttgtcgctgacttcctgtccagcgtcggcgttgaccgcgttctcaccgtagatctgcatgctgaacagatccagggcttctttgacgttccggttgataacgtgtttggtagcccaatcctgctcgaagatatgctgcaactgaatctggataacccgatcgtggtttctccggatattggcggcgtggttcgtgccccggctatcgctaagctgctgaacgataccgatatggctatcattgataaacgtcgtccgcgcgcgaacgtttctcaggtgatgcacatcatcggcgacgtcactggccgtgactgcgtgctggttgatgatatgatcgataccggcggtactctgtgcaaagcagcagaagcattgaaagaacgtgggctaaacgcgtgtttgcctacgcgacgcacccgatcttctcaggcaatgcggcaaacaacctgcgcaactccgtcattgatgaagtcgtttctgcgacaccattccgctgaccgacgaaatcaaagcgctgccgaacgtgcgtactttgaccctgtcaggtatgctggccgaagcgattcgccgtatcagcaacgaagaatcgatttccgccatgttcgagca

SEQ ID NO: 36552 - DNA, 570 bp, Salmonella paratyphi A
atgatttatcagcccgatgaaaatcgttatcacacaatggagtatcgtcgctgcgggcgcagcggcgtcaaacttcccgccatttcgctggggttatggcacaacttcggcgatacgacacgggtagaaaatagccgggcgctgctgcaacgcgcgttcgatctgggcattacccactttgatctcgccaataattatgggccgccgccgggctccgcagaatgcaattttggccgcattctgcaggaagattttttaccgtggcgcgatgagttagtcatctccaccaaagcgggctacaccatgtgggatggcccttatggcgactggggttcacggaaataccttatcgccagcctcgatcaaagcctgaaacgtatggggctggagtatgtcgatatcttttatcaccatcgtcccgatcccgaaacgccgcttaaagagacgatgaaagcgttagatcaccttgtgcgccacggcaaagcgttgtacgtggggatctctaactatcctgccgatctggccagacaaagctatcgatattctggaggattctcggcacgactggcc

SEQ ID NO: 36553 - DNA, 1579 bp, Salmonella paratyphi A
tttaaagtctatctgatcgatgaagtccacatgctgtcgcgccacagctttaatgcgctacttaaaacgcttgaagaaccgccagcgcatgtgaaatttttactggcgaccaccgatccgcagaagctgccggtgaccattttgtcgcgctgcctacagtttcatctcaaagcgctggatgttgaacagattcgccatcagcttgagcatattctcaatgaggaacatatcgctcacgaaccccgcgcgttgcagttgttatcacgcgcggctgacggcagcctgcgcgatgcattaagtctgactgaccaggcgatcgcagcggcgacgggcaggtttcgacgcaggcggtaagcgccatgctcggtacgctggacgacgaccaggctttgtcattagtcgaggcggtggttgacgctaacggcgaacgcgtcatgtcgcttatcaacgaggcggcggcgcgcggtattgaatgggaagggctgctggtcgaaatgcttagcctgctgcaccgtattgcgatggtgcaactttcgcctgccgcgttaggcagcgatatggcggctatcgagcaacggatgcgcgaacttgcccggacggtgcctcccggcgatcttcagctctactatcagacgttgttgattggccgcaaagaattgccctgggcgccggaccggcattggggcgttgaaatgacgttattgcgtgcgctggcgtttcacccgcgtatgcccttgccggagcctgaaacgccgcggcagtcttttgcgcccgtggccccaacggcggtaatgacgcgccgcagtgcagcagccgtcgcgcccgcgccagacatcgccagcgccgctgccggcgtctaccagtcaggtgctggcggcgcgcaatcagctacagcgcgcgcagggagtaaccaaaacaaaaaagagtgaaccggcagccgcatcccgcgcgcgccggtgaataactctgcgctggagcggctggcctcggtttcggagcgcgtacaggcgccacggcgtctgcgctggaaacggcgccagtaaagaaagaggcttatcgctggaaggccaccacgccggtagtgcaaaccaaagaagtggtggctacgcaaaagcgcttaagaaagctctggagcatgaaaaaacgccggagctggcggctaaactggcggcggaagcgattgagcgcgatccgtgggcggcgcaggtaagtcagctttctttgcctaagctggtggagcaggtggcgcttaatgcctggaaggagcagaacggcaacgcggtttgtctgcatctgcgctcgacgcagcggcacctcaattccagcgggcgcagcaaaagctggcgcaagcctaagcgatctgacgggaacgacggttgaactgaccatcgttgaagatgataatcccgcggtgctacgccgctggaatggcgtcaggccatttatgaagagaaactcgcgcaagcgtgagtcaattatcgcggataataacattcagacgctgcgtcggttctttgacgccgagctggatgaagagagtatccgccccatttgatcgtaagcccggcttgcgattgtg

SEQ ID NO: 36554 - DNA, 327 bp, Salmonella paratyphi A
atgtttggaaaaggcggtctgggcaatctgatgaagcaggcccagcagatgcagaaaaaaatgcagaaaatgcaggaagagattgcgccgtggaagtgaccggcgaatccggcgcgggtctggtgaaggttaccatcaacggcgcgcataactgccgccgcgtggaaattgacccaagcctgctggaagatgacaaagagatgctggaagatctggtcgctgcggcctttaacgatgcggcgcgcagtctgaagagacgcaaaaagagaagatggcttccgtctcttccggtatgcaattgccgccaggcttcaagatgccattctg

SEQ ID NO: 36555 - DNA, 613 bp, Salmonella paratyphi A
atgcaaaccagtccgctgttaactcagcttatggaagcgttgcgctgccttccgggcgtcggccctaagtcggcgcagcggatggcgtttaccctattgcagcgcgatcgcagcggcggcagaggcctgcgcaggcgctgacccgggcgatgtcggaaatcggccactgcgccgactgccgcacctttaccgagcaggatgtttgtaatatctgttcgaacccgcggcgtcaggaaaacggccagatttgcgtggtggagagatctgcggatatctacgccattgagcagaccgggcaattttccgggcggtatttcgtgctgatgggccacctgtcgccgctggacggcatcgggccggatgatataggtctcgatcgtctggaacagcggctggcgtcagaaaaaatcagtgagctgatcctcgcgaccaacccgacggttgaaggggaggtaccgcgaactatattgccgagctgtgcgcggaggccggcgtcgaagccagtcgtattcccacgcgtgccggttggcggcgaactggagatggtcgacggtacgacgctgtcccactcgctgcgggacgccataagattattttctgaacaaacgaggcg

SEQ ID NO: 36556 - DNA, 809 bp, Salmonella paratyphi A
atgtttttaattaatggccatgcgcaggatcaacttgctgtaacgaccgggcgacgcagttcggcgatggcagttttacgaccgcacgtattgttgatggcaacatttgccatctggaagcgcatcttcagcgcttgcaggttgcctgtgcaaaattacggatcgcttttagccattgggcgacccttcggcaagagatgacaatgttggccacagggcatgattcaggcgtgttgaaagtgatcattagccgtggcagcggcggccggggatacagcgccatgaattgtcaggcagctacccgaatcctctccgtttctgcttatcccgcttattattctcagtggcgtaagcaaggcatcactcttacccttagtcccataccgcttgggcgcaatccttatcttgccggattaaaacatctgaaccgcctcgaacaggtgttgattcgctctcatcttgagcagacggacgccgatgaggcgctggttcttgacagcgagggatgggttacggaatgctgtgcggctaatttgttctggcgtacaggcgacattgtttttacgccgcgtctggatcaggccggggtgaacggcattatgcgacaattttgtttacgccaactggcgcaatctcctttccaggttcttgaagtacaggcgagagaggaggcagtcaggcaggcggatgagattatcatttgcaacgcgctaatgccgattattcccatacgcgcctatcacgggacgtcgtattcttcgcgaacactgtttcaatttttagccccattttgtgagcatccgaattag

SEQ ID NO: 36557 - DNA, 1242 bp, Salmonella paratyphi A
gtgtctaagcgtcgtgtagttgtgaccggactgggcatgttgtctcctgtcggcaataccgtagagtctacctggaaagctctccttgccggtcagagtggcatcagcctgatcgaccatttcgatactagcgcctatgcaacgaaatttgctggcttagtaaaggattttaactgtgatgacattatctcgcgcaaagaacagcgcaagatggatgccttcattcaatatggaattgtcgctggcgtacaggccatgcaggattctggccttgaagtgacggaagagaacgcaagccgtattggcgccgctatcggctccggtatcggtggtctcggtctgatcgaagaaaaccacagttcgctggtaaaaggcggaccgcgtaagattagcccgttctttgtcccgtcgacgattgttaacatggtagcaggccatctgactatcatgtatggcctgcgtgggccaagcatctctattgcgactgcctgtacttcaggcgtgcataacatcggccatgcgcgcgtatcatcgcctatggcatgcggacgcgatggtggcaggtggcgcagaaaaagccagtacgccgctggggctaggtggttttggcgcacgcgcgctgtcgacccgcaacgataacccacaggcggcgagccgtccgtgggataaagaacgcgatggttttgtactgggcgacggtgccggtatgttggtgcttgaagagtacgaacatgcaaaagcgcgtggtgcgaaaatctatgccgaaatcgtcggctttggtatgagcagcgatgcttaccatatgacgtcgccgccggaaaactgcgccacgggtgcgctggcgatggtctagacgttgcgtgatgccgcgattgagcctgctcagattggctacgtcaacgcgcacggcacgtcgactgccggcgacaaagctgagacgcaggcggttaagtcagtctttggcgatgcagcaagccgagtgatggtgagctcgaccaaatcgatgaccggccatctgttggcgcgcaggcgcagtagagtctattttctctattctggctacgcgatcaggccattccgccaaccattaatctggataacccggatgaaggttgcgatctggacttcgtgccgcatgaagcgcgccaggtcagcgatctggagtatgctctgtgtaactcctttggctttggcggaactaacggttccttgatttttaaaaagatctaagttaagtcagag

SEQ ID NO: 36558 - DNA, 234 bp, Salmonella paratyphi A
atgagcactatcgaagaacgcgttaagaaaattatcggcgaacagctgggcgttaagcaggaagaagtaaccaacaatgcttctttcgttgaagacctgggcgcagattctcttgacaccgttgagctggtaatggctctggaagaagagtttgatactgagattccggacgaagaagctgagaaaatcaccaccgttcaggctgccattgattacatcaacggccaccaggcg

SEQ ID NO: 36559 - DNA, 752 bp, Salmonella paratyphi A
  misc_feature (492)..(492): n=g, a, t or c
atgcggttgtttattgccgaaaaaccgagtctggggcgcgccattgcggatgtgctgccaaaaccgcaccgtaaaggcgatggttttattgagtgcggaaacgggcaggtcgtcacctggtgtattggtcatttgctggaacaggcgcagccggatgcgtatgacagccgttatgcgcgctggaatctggctgacctgcctatcgtgccggaaaaatggcagcttcagcctcgtccttccgtcaccaaacagctcaatgtgattaagcgctttttgcatcaagccggtgaaattattcacgccggcgacccggatcgcgaaggacagcttctggttgatgaagtgctggattatctccagcttcctgccgaaaagcgccacgaggtgcggcgttgtctgataaacgaccttaacccgcaggcggtcgagcgtgctatcgacaggctgcgagcgaacagcgacttcgtgccgctgtggtctccgcgctggccngcgcgagcgaactggctgtatggcattaatatgaccgcgcttacacgatctgggccgtaatgcggctatcaggcgtgttatcgtgggaccgtcagacccggtactggggctggtggtcggcgagacaagagattgagaactcgtcgccaagacttctttgagtgaggcgccatcgtacgcctgcgcgacgttttacgctattggagcgagcgaggtgcgaacctatcagatgagaggacgctgctcatcgtcgctggcgc

SEQ ID NO: 36560 - DNA, 717 bp, Salmonella paratyphi A
atgattaaagtgctgattgtggatgatgagccgttagcgcgggaaaatctgcggattttgctccaggggcaggatgacattgagattgtgggagagtgcgcgaacgcggtagaagcgattggcgcggtacataagttgcgacctgatgtgctgtttctggatattcagatgccgcgtatcagtggactggagatggtaggaatgcttgatccggaacaccgcccgtatatcgtttttttaaccgcgtttgacgaatacgccatcaaagcctttgaagaacacgcttttgattatctgctcaagccgatagaggagaaacggctggaaaaaacgttacatcgtctgcgtcaggagcgcagtaaacaggatgtttcgttgctgccggaaaaccagcaggcgcttaaattcattccctgtaccggacacagccggatctatttgttgcaaatggatgatgtcgcctttgtcagtagccgtatgagcggcgtttatgtgaccagcagtgaagggaaagaggggtttaccgagctgacgctgcgcacgctggaaagccggacgccgctactgcgttgtcatcgtcagtttctggtgaatatggcccatttgcaggaaattcggctggaggataatgggcaggcagagctgattttacgcaacggcctgacggtgccggtaagccgtcgctatctgaaaagtttaaaagaggcgattggcctg

SEQ ID NO: 36561 - DNA, 1489 bp, Salmonella paratyphi A
gaaaccttcgtgacgcgtgtgaaaagctacaaagttccattcttgatgaaactatgcctcatgatgacaagccagcttgtaccatcatgaagaatatgtcgacatgtgtcgtggtccgcacgtgccgaatatgcgtttctgccatcactttaaactgatgaaaactgccggcgcatactggcgcggtgacagcaataataagatgttgcagcgtatttacggtacggcatgggcagataaaaaagccctgaacgcttatctgcagcgcctggaagaggccgcaaaacgcgaccaccgtaaaattggtaagcagctcgacctgtatcatatgcaggaagaagcgccgggcatggtgttctggcataacgacggctggactatcttccgcgagctggaggtctttgttcgttctaaactcaaagagtaccagtatcaagaagttaaaggcccgttcatgatggaccgtgtgctgtgggaaaaaaccgggcactgggacaactataaagatgcgatgttcaccacatcttcagaaaaccgcgaatattgcatcaagccgatgaactgcccgggccacgttcagatctttaaccagggtctgaaatcctatcgtgatttgccgctgcgtatggcggaattcggtagctgccaccgtaacgagccatcaggcgcgctgcatggtctgatggcgtacgcggctttacgcaggatgatgcgcatatcttctgcaccgaagagcagatccgcgatgaagttaacgcttgtattcgtatggtctacgatatgtacagcacctttggcttcgagaagatcgtcgtcaagctttccactcgtcctgataagcgtatcggcagcgatgagatgtgggatcgtgctgaggcggatctggcggttgcgctggaagaaaataatatcccgtttgagtatcaactgggtgaaggcgcattctacggtccgaaaattgaatttaccttatatgactgcctcgatcgtgcatggcagtgcggtacagtacagctggacttctccttaccgtctcgtctgagcgcctcctatgtaggcgaagacaacgagcgcaaggtgccggtaataattcaccgtgcgattcttgggtcgatggaacgcttcatcggtatcctgaccgaagagttcgctggtttcttcccgacatgtcgcgcctgttcaggtagtcgtgatgaatattaccgattcgcagtctgaatacgttaacgaattgacgcagaaactacaaaatgcgggcattcgtgtaaaagcagacttgagaaatgagaagattggctttaaaatccgcgagcacactttacgtcgtgtcccttatatgttggtctgtggtgataaagaggtggaagcagcaaagttccgttgcacccgccgcggtaaagacctgggcagtctggacgtaaatgacgtgattgagaagctgcaacaagagagttgcagccgcagtcttcaacaactggaggaataaagt

SEQ ID NO: 36562 - DNA, 544 bp, Salmonella paratyphi A
attaaaggcggaaaacgagttcaaacggcgcgtccgaatcgtattaatagcgaaattccgcgcaagaagttcgcttaacaggtctggaaggcgagcagttggtattgtgagtctgagagaagctctggaaaaaactgaagaagccggagtagacttagtcgaaatcagccctaacgccgagccgccggtttgtcgtataatggattacggcaaattcctctatgaaaagagtaagtcttctaaggaacagaagaaaaagcaaaaagttatccaggtgaaggaaattaaattccgtcctgggacagatgaaggcgactatcaggtaaaactccgcagcctgattcgctttctcgaagagggcgataaggccaagatcacgctgcgtttccgcggtcgtgaaatggcccaccagcaaatcggtatggaagtgcttaatcgcgtgaaagacgatttgcaagaactggcagtggtcgaatccttcccaacgaagatcgaaggccgtcagatgatcatggtgcttgctcctaagaagaaacagtaaggc

SEQ ID NO: 36563 - DNA, 195 bp, Salmonella paratyphi A
atgccaaaaattaagaccgtacgcggtgctgctaagcgcttcaaaaaaaccggtaaaggtggttttaagcacaagcacgctaacctgcgtcacattctgaccaaaaaagcgactaaacgtaaacgtcacctgcgtccgaaagccatggtttctaaaggcgatctgggcttggttatcgcgtgcctgccgtacgca

SEQ ID NO: 36564 - DNA, 360 bp, Salmonella paratyphi A
  misc_feature (360)..(360): n=g, a, t or c
atggctcgcgtaaaacgtggtgtaattgcacgcgcacgtcacaagaaaattttgaaacaagccaaaggctactacggtgcgcgttctcgcgtataccgcgttgccttccaggcagttatcaaagctggtcagtatgcttaccgtgaccgtcgtcaacgtaagcgtcagttccgtcaactgtggattgcgcgtatcaacgcagcagcacgtcagaacggtatttcttacagcaaattcatcaacggcctgaaaaaagcctctgttgaaatcgaccgtaagatcctggctgatatcgccgtattcgacaaagtcgcgttcaccgcgctggttgaaaaagcgaacgagctctggcataagcgn

SEQ ID NO: 36565 - DNA, 1126 bp, Salmonella paratyphi A
ctcaccgtcggcggcgcgagctggaattttttaaggtcgctatcggcggtattctggcgggttttgtggtcagttggctgtatggccgctcgctggcgttttttgagctgctggggcggcgatgaacccgcgacgcaaatcggtcctgctgtttctgctgcccttcgcgtcttacctgattgccgagcatattggcgtctcaggcatcctggcccggttgccgccgggatgaccatcacccgttctggcgtaatgcgccgcgccgctggcaatgcgtttgcgcgcgaacagtacctgggcgatgctggaatttgtctttaacggtatggtctttctgctattgggactgcaattgccgggtattctggaatcttcgctggcggcggcggaagctgacccgaatgtcgaaacctggatgctctttaccgatatcgtgctgatttatgcggcattgatgctggttcgcttcggctggctgtggaccatgaaaaagttcagcctgcgctttttgaagaagaaaccgatggagttcgccagctggacgtcgcgtgaaattctgattgcttccttcgctggcgttcgtggggcgatcaccctggctggtgtgctctctataccgttacttttgccggatggcagcggatttccggcgcgttatgaactggtattcctggcggctggcgtcattctgttctcgttgtttgtcggcgtgatcatgctgccgctgctgttgcaacatctggaagtcgccgatcatgcgcaacagttgaaagaggagcgtatcgcccgcgcggcgacggcggaagtggcgattgtcgccattcagaaaatggaagagcgtctggcggcggataccgaagaaaacatcgataatcagttgcttactgaagtaagctcgcgtgtcattggtaacttgcgtcgccgtgccgatgggcgaaacgatgtcgaaagctccatacaggaagaaaatctggagcgacgtttccgtctggcggcgctgcgttccgaacgcgccgagttgtatcatctgcgcgccacgcgagaaatcagcaatgaaacattgcaaaagctgctgcacgacctggatttgatggaagcgctactgatagaaaatcagtagtccttg

SEQ ID NO: 36566 - DNA, 2365 bp, Salmonella paratyphi A
ggatttgactcgccttacgtgccgggctgggactgtcacggtctgcctatcgagctgaaagtcgagcaggagttcggtaagccgggcgagaaattcaccgccgctgaattccgcgccaagtgccgcgaatatgccgctacgcaggttgacggccagcgtaaagacttcattcgtctgggcgtgttgggcgactggtcgatccgtacctgaccatggacttcaaaaccgaagccaacatcatccgcgcgctgggcagaattatcaaaaacggtcatctgcacaaaggcgctaagcgggtgcactggtgcgttgactgccgttccgcgctggcggcaagcggaagttgaatattacgacaaaacgtcaccgtctatcgacgtggcgttccgcgcgtcgatcaggatgcggtgaaagcgaagtttggtctgccgggcgtgacggccctgtgtcgctggttatctggaccaccacgccgtggacactaccggctaaccgcgccatctccctggcgccggactttgattatgcgctggtgcagattgacggccaggcggtgattctggcgaaagatctggttgaaagcgtcatgcagcgtattggcgcggctgaatacaccattctcggcaccgttaaaggcgcggagctggaactgttgcgctttacccatccgtttatgggctttgacgtgcctgcgatcctcggcgatcacgtcaccctggacgccggtagccggtacataccgcccctggtcacggcccggatgactacgtgatcggccaaaagtatggcctggaaacggctaacccggttggcgcggacggcgcttacctgccaggcacatatccaacgcttgacggtgttaacgtcttcaaggcgaacgatatcgttattgaactgctgaaagaaaaaggcgcgctactgcatgtcgaaaaaatgcagcacagctatccgtgctgttggcgtcacaaaacgccgatcattttccgcgcgaccccgcagtggttcgtcagcatggataaagaagggcttcgtcaacagtccctgaaagagatcaaaggcgttcagtggatcccggactggggtcaggcgcgtattgaatcaatggtcgctaaccgtcctgactggtgtatctcacgtcagcgtacctggggcgtaccgatgtcgctggttcgtgcataaagaaacgcaggagctgctgccgattgagcgtactctggcggcgatggaagaggtggcgaaacgcgtcgaagttgacggtatccaggcgtggtgggatctcgacccgaaagagatcctcggcgaagatgctgatcaatacgagaaagttccggatacgttggacgtttggtttgattccggttccaccagttactccgtggttgatgcacgtccggaattcgccggtcatgctgccgatatgtatctggaagggtctgaccagcatcgcggctggtttatgtcctccctgatgattagcgtggcgatgaaaggcaaagcgccataccgccagtatctgactcacggcttcaccgtcgatggtcaggggcgcaagatgtccaagtccatcggtaacaccgtgtcgccgcaggatgtgatgaataaactgggcgcggatatcctgcgtctgtgggtagcgtctactgactataccggcgaaatggcggtctctgacgaaatcctgaaacgtgctgccgacagctatcgccgtatccgtaataccgcgcgcttcctgctggcgaaccttaatggcttcaatccggccaccgatatggtcaaaccggaagagatggtggtgctggacaggtgggcggtgggctgcgcgaaaacggcgcagcaagagattctgaaggcatacgaagcttacgacttccatgaagtggtacagcgcctgatgcgcttctgctccgttgaaatgggttcgttctacctcgacatcatcaaagaccgccagtacaccgcgaaggctgatagcgtcgcgcgtcgtagctgccagactgcgctgtatcatatcgcagaagcgctggttcgctggatggcgccgatcatgtccttcacggctgatgaaatctggggctacctgctgggcgagcgtgaaaaatatgtcttcaccggcgaatggtacgacgggttgtttggcctggaagagaatgaagaatttaatgacgcattctgggacgatgtccgctatatcaaggaccagatcaacaaagagctggaaaatcagaaagccaatggcatcaaatcgaacctggaagcaaaagtgacgctgaaatatgctgacgatgctaacggtacgatcaagaagctgaaactgttgggtgaagaggtcagatttatcttcaggggatcctctagagtcgacctc

SEQ ID NO: 36567 - DNA, 1408 bp, Salmonella paratyphi A
gtcagtacgatcgactcgccattaacctattccgttatcaacggtaaaaaatatggtctggactatgaactggcgcacggttcgccaactatctcggcgtgaagctgaaagtgacggtgcgccagaatatcagccagttgtttgacgatctggataacggcaatgccgacctgctcgcggcagggctggtctacgacagcgcgcgcgttaaaaactatcagcccggccccatgtattattcggtttcgcaacagcttgtctaccgggtcggacaatatcgcccacgttcgctggcgaccgttaacgagaatcagcttaccattgcgccagggcacgtcgtggtcaatgatttacagcgtttaaaagagacaaagtttcccgacctgagctggaaagtggatgataaaaaaggctcgacgacgctgctggaagaggtcatcagcggcaaactggattacaccattgccgattcagtggcaatcggtctgtttcagcgcgtccatcccgaactggccgtggcgctggatgtcacggatgaacagcccgtgacctggtttagccgactggacgacaataatacgctctccgccccgctgctcgattttttcaattcgatcaatgaagacgggtcgttggcgcggatcgaagagaaatatctggggcatggcgatgatttcgactacgttgatacccgctctttcctgcgagcggtggataacgtcctgccggagctggaaccgttatttaaaaaatatgccaaagagatagactggcgcctgctggggcgtatttcttatcaggaatcacactgggacccgctggcgacctcgccaaccggcgtgcgcggcctgatgatgctgactaaaaataccgcccaaagtctggggctgaccgaccgtaccgatgcggagaaagcatcagcggcggcgctcgctatcttgaagatatgatggctaaagttcccgaaaccgttccggaagacgagcgtatctggtttgctttagccgcctacaatatgggttatgcgcacatgctcgacgccagatcgctgacggtaaaaaccaaaggcaatccggatagctggaccgatgtgaagcagcgtttgccgctattaagccaaaaaccgtattacagtaagctaacctacggttacgcgcgtggacatgaggcttatgcttatgtggaaaatatccgtaaataccagataagcttggtggggtatttgcaggaaaaagaaaagcaggaagcggaagccatgaaactggcgcaggattacccggcggtgtcgccggaggagctgaataaagcgcccttccccctcctgtcgtttttatcgcagtcatcaggctacctgacgcattcgccgtctttactgtttacgccgcagaagaaagaagaaaaatagcgc

SEQ ID NO: 36568 - DNA, 1052 bp, Salmonella paratyphi A
atgactgcaccatcccaggttttaaagatccgccgcccggacgactggcacgttcaccttcgcgatggcgacatgttaaaaacggtcgtaccctataccagcgaaatttatggtcgcgctatcgtgatgccgaacctggcgtcccccatcacgaccgttgatgcagcgatcgcctaccgccagcgtattctcgatgcggtcgcgccgggcatgatttcacgccgttaatgacctgctatttaacggattcgctcgatgccgatgaactggagcgtggtttccatgaaggcgtgtttactgcggccaagctttacccggccaatgccaccactaactccagtcatggcgtaacgtcagtcgacgctatcatgccggtactggagcggatggaaaaactcggaatgccattgctggtccacggtgaggtgacccatgcggatgttgatatcttcgatcgcgaagcgcgttttatcgacaccgtaatggaaccgctacgccagcgtctgaccgcgcttaaagtggtctttgaacacatcacaaccaaagatgccgcgcagtatgtacgtgacggcagcgacaacctggcggcgaccattacgcctcaacatttaatgtttaaccgtaatgatatgctggtcggcggcattcgtcctcacctgtactgtctgccgattctgaaacgcaatattcaccagcaggcgttacgcgacctggtcgcagtggttttacgcgcgccttcctggggacggattcagcgccgcattcacgtcatcgtaaagagacccgttgcggctgcgcgggttgtttcaacgccccctccgctcttggcagttatgcgccgtgtttgaggaaatgaacgcgctggcgactttgaagcgttctgttcactgaatggcccgcaattctatggcctgccggtgaatacggggtgggtggaactggttcgcgatgaacaacagataccggaaaatatcgcgctggctgatgattcgctggtgccttttttagcgggtgaaacagtacgctggtcagtaaaaaaataaaaaatgcgc

SEQ ID NO: 36569 - DNA, 558 bp, Salmonella paratyphi A
atgaaaaagtttttttttgccgctgcgctggtagttagcggcctgttagtgggttgtaatcaacttacgcaatacaccattagcgaacaagaaatcaatcaagcgcttgaaaaacggaataatttctcaaaagatattggtctgcccggcattgccgacgcgcatatcgtattgactaaccttgccagccagattggtcgggaagaacctaataaagtcacccttactggcgatgccaggctggatatgaattccctgtttggcagtcaaaaagcgacgatgaaactcaagctaaaagccctgccggtctttgataaagaaaaaggcgccatctatcttcaggagatggaagtagtagacgccaccgtgacgccggagaaaatgcaatcggtgctacaaacgctcctgccttatttaaatcagtctttacgtagctactttaaccagcggcccgcttacgtgttgcgtgaggacagcagtaaaggcgaagcgttagcaaagaaactcgcgaaaggcattgaagttaaacctggtgaaatcgttattcctttcaccaat

SEQ ID NO: 36570 - DNA, 931 bp, Salmonella paratyphi A
atgatcaagcaagggacacttaagcgtatcgttggcagggctggcgtgcggttagcacaccggcagagaagtcacgctgacagtgtacgctgcggcggcccaataccgggtcatgctactctcgcaccgacttgaatccaccgggtagattttcccgccgatgccaaatctgtgcgtgataccatgctctgtacgtgtctggtgaatgagcatgatgtacggatttcaaccgttgagcacctgaacgctgctctggcgagcttaggtatcgataacatcgttattgaggttaatgccccggaaatcccgatcatggatggcagtgccgctccgtttgtctacctgctgcttgacgccggtattgatgaactgaactgcgccaaaaaattcgtacgcatcaaagagactgttcgggttgaagatggcgataaatgggctgaattcagaccgtacaatggttttacgttggatttcaccatcgactttacgatccggcgatcgattccagcagccagctacgcgatgaacttctctgcggatgcgttcatgcgccagatcagccgtgcgcgtcttcggttttatgcgtgatatcgaatatctgcagtcccgcggcctgctgctgggcggcagcttcgattgtgccatcgttgttgacgattatcgcgtattgaacgaagacggcctgcgttttgaagatgaattcgttcgtcacaaaatgctcgacgcgatcggtgacttgttcatgtgtggtcacaatattattggtgcgtttaccgcgtataaatccggtcacgcattgaataacaaattgttacaggcagtcctggcaaaacaggaagcctgggaatttgtgaccttccaggacgacgcagaactgccgttggctttcaaagcgccttcgacggtactggcataacgacatacgctgtcg

SEQ ID NO: 36571 - DNA, 1457 bp, Salmonella paratyphi A
acgctatggataaacggcgactggataaccggtcaggcgaacgccgccgcaaaacgaatccggtgagtgcggagatactttggcaggggaatgacgctaatgcggcacaggtcgccgaggcctgtcaggcggcgcgtgcggcgtttcctcgttgggccagacagccttttacggcacgacaggctatcgtacagaaatttgccgccctgctggaggcgcataaagccgatctcacggaggtcatcgcgcgtgaaaccggtaaaccgcgctgggaggcggcaacggaagtgacggcgatgatcaataagattgccatctcgattaaggcttaccacgccagaacaggcgaacaaaaaagcgaacttgtcgatggcgccgcgacgttgcgccatcgtcctcacggtgtgctggcggtattcggcccttataactttcccggccatttaccgaatggccatattgtgtccgcgttgctggcaggcaatacgctgatcttcaaacctagcgagctaacgccatggaccggggaaacggtaataaaactctgggaacgggcggggctaccggcaggcgttcttaatctggtgcagggcggccgggagaccggacaagcgctaagttcgctcgacgatctcgacggactgctgtttaccggcagcgccagtaccggatatcagcttcatcgccagctatccggccagccggaaaaaatcctggcccttgaaatgggcggaaacaatccgctcattattgaggatgtggcaaatatagatgcggcggtacatctgacgctgcaatcggcgtttattaccgccggacagcgctgtacctgcgcgcgacgccttctggtaaaacagggtgcgcagggagatgcatttctggcgcgactggttgacgtcgccggacgtctgcagcccggcagatgggacgacgatccgcagtcgtttatcggcggactgatttcagcgcaggcggcacagcatgtgatggaggcctggcgtcaacgagaggcattaggcggtcgcacgctactggcgtcgcggaaggtcaaagagggaacctctctcgtgacgcctggcatcattgagctgaccggcgtcgcggatgtgccggatgaagaggtgtttggtccgctgctgaacgtctggcgttatgcgcatttcgatgaggcgattcgtctggcgaataatacccgttttggtctgtcgtgtgggctggtgtcgacggatcgcgcgcagttcgaacagctcttgctggaggcgcgggcagggatcgttaactggaataaaccgctcaccggggcagcgagtactgcgccgtttggtggtgtcggcgcgtctggcaaccatcggcccagcgcctggtatgccgccgattattgcgcctggccgatggctagtctggagtctcccgaactgacgttgcctgcgacattaagccccggcctcgacttttct

SEQ ID NO: 36572 - DNA, 807 bp, Salmonella paratyphi A
atgaccgttaacgttgtcgttaccgatatggacggcacttttctcgacgatgccaagcagtacgatcgtgtacgcttcatggcgcaataccaggaactgaaaaaacgtaatatcgaatttgtggtcgccagcggtaatcagtactatcagttgatctccttcttccccgagctgaaagacgaaatttccttcgtcgcagaaaatggcgcgctggtgtatgaacatggcaagcagttgtttcacggagagctaacccggcatgaatcgcgtattgtgattggcgaactgctgaaggataagcagcttaacttcgtcgcctgcggtctgaaaagcgcttatgtcagcaaaaacgctcccgagactttcgtggcgctgatggccaaacattatcaccgcctgcagccggtaaacgattatcacgacattgacgatatcctgtttaagttctccctgaatttgcccgatgaacaaattccgctggttatcgacaaactgcacgtatctctggatggcatcatgaagcccgtcaccagcggcttcggttttatcgacctgattatcccgggactgcataaagcgaatggcatcagtcgtctgttaaagcgctggaacaggtcgccacagaatgtcgtcgccattggcgacagcggtaatgatgcggaaatgttgaaaatggcgcattactcttttgccatgggcaatgccgcagacaatatcaaagcgctttcacgttatcacactgatgataataaccatcaaggcgcgctcaacgtcattcaggccgtgcttgacggcaccgatcccttc

SEQ ID NO: 36573 - DNA, 1016 bp, Salmonella paratyphi A
cagggtagcatgatggcgacaatgctggatgttcttgccatgcgggcgtatcaaaggccaccgtctcacgagtgctgaatgggacggggcaggtaaaagaaagcacgcgccagaaagtgtttacggcgatgcaggctctggactatcgccccaacctactggcacgctcgctggcgaatcgcaccaacaacagcatcggtctggtcgtctctacgtttgacggcttctatttcggcagtttgttgcgccggcgtcgcgccaggcggagttgcataacaagcagttgatcgtcaccgatggtcacgatacgccggaacgagagcagaaagccgtacaaatgttggccgacagacagtgcgacgctattattctttacactcgctatatggacgagctggcgattttgtcgttgattgacgccacggaaatgccgctggtgattattaatcgcaacgtcactcaggcccgagatcgcgctattttcttcgagcaggagacggcggcattccaggcggtggaatatctgattacgcagggccatcgcgatatcgcctgtattacgctgcctgttcatactcccaccggcacatccacgcgtagcgggttatcgcaaggcgctggaaaaatatggcatcccctggcaaccggcaaaagtgaaatacggcgattacacgctgacgcgcggctatgacgctgccgggaattactggaggaaggcgtcacgtttagcgcgctattcgcctgtaatgatgacacggcgctgggcgcggcaaaagcgctgcgccaggccggattacgcatcccacaggatgtgtcgctgtttggttttgacgatgcgccgggcgacctggcttgagccggggctttcaacagtctatttacccatcgaggatatgatagccaccgcgatcgatcaggccgttcgtctggcgaacagcgagccggtcgccccgatcccaccctttaccggcacgctcattctgcgtgagtccgtctccgcgggcccgttttttcaa

SEQ ID NO: 36574 - DNA, 1351 bp, Salmonella paratyphi A
ctggatcgcctggaggagctgtacgagcagtcggttaacgcgctccgtgaagccatcgctgactatgttgataacggcacgctgcccgatccccatgccaggcttaacggactgtttgtttatccttcgctgtctgtaagctgggatggcgcgacaccgaacccgcctaaaacacgcgcttttggacgctttactcatcccggctgttataccactaccgttacgcggcctgcgctatttcgcgcttatcttctggaacagcttaacctcgtttaccatgattatggcgcgcatattgcggtagaggcctcgcaccatgagatcccgtatccttatgtgatcgatggctcggctctgacgctggatcgttctatgagcgccgggctaacgcgccattttcctaccacagaactggcgcagattggcgatgagacggcagacggtctgttccaccccggcgaattctatccgttatcgcacttcgacgcgcgtcgtgttgacttctcgttggcccggttacggcactatacggtacgccggttgaacattttcagcccttcgttttgtttaccaactacacccgctatgtcgatgagtttgtgcgctggggatgcagccaaattcttgatcctgacagtccctatatcgcgctttcctgtgccggcggaatttggatcacggcagaaacggaagcgccggaagaggctatttccgatctggcctggaagaagcatcagatgcctgcctggcacctggtaacggcagatgggcaggggattacgctggtaaatatcggtgtcggcccttcaaatgctaaaacgatttgcgaccatttggccgtgctgcggcctgacgtctggcttatgattgggcactgtggagggttacgagaaagtcaggcgattggtgattatgtgctggcccatgcctacttacgcgatgatcatgtgctggatgctgttctgccgcctgatattccgattccaagcattgcggaagtacagcgtgcgctgtacgacgctaccaaagcggttagcggaatgcccggcgaagaggtgaaacagcgactgcgcacgggaacggtcgtcaccacggatgaccgtaactgggagcttcgttattccgcatctgcgctgcgattcaaccttagccgtgcggtcgcgattgatatggagagcgcgacgattgcagcccagggctatcgcgtccgtacggcacgctgctttgtgtttctgacaaacctttacacggtgaaattaaactgcccgggcaggcaaaccggttttatgagggggctatttcagaacatttgcaaattggtattcgtgctattgatttactacgcgcagaa

SEQ ID NO: 36575 - DNA, 652 bp, Salmonella paratyphi A
  misc_feature (188)..(188): n=g, a, t or c
  misc_feature (201)..(201): n=g, a, t or c
  misc_feature (231)..(231): n=g, a, t or c
ctgccagaagcaagcgacacggccattgacgacgggcggaccgcccgtcacttgatgctgtggctgggctggcgctgatatgcatgggtgcagcgatggtgctgtggctgctggtgctacaaaccctgccggtgagaattgcttacccgatgttgagtctgaattttgtctgggtcacgctgcggccntggaaaatctgcnatgaacaggttctgccccgccactggttgngcgtcgcataaattatcagcggcattatcattctggggagtgcggcataatgggcgtaatgtggggactgataagcgttgcgattgcctccctcgcccagttgagtttaggattcgccatgatgcgactgccatcgatagcgcatccactggcgtttatttccgggctgggcgcatttaatgccgcgaccctggcgctattcgccggtttggcggggtatctggtttccgtcttctgctggcagaaaacattacacatgctcgcgctcagcaaagcctatgcgctgctgagtctcagttatgtgcttgtctgggtagcctcaatgttgttacccggtttgcaaggcgctttcagcctaaaagcgatgctcggcgtattgtgcattatggcgggggtaatgctgatttttctgcccgccaga

SEQ ID NO: 36576 - DNA, 1117 bp, Salmonella paratyphi A
  misc_feature (512)..(512): n=g, a, t or c
atgactatgctgcgcggatggataacgatgatcgtcatgctgacgacaataaatgcgcaggcggcctgtagctggcctgcgtgggaacagttcaagaaagattacattagccagcagggacgcgttatcgatccgggcgatgcgcgaaaaattaccacctccgaaggcaaagctacgccatgttctttgccctggcagcgaacgatcgaccggcgttcgcgcaactgtttaactggacgcaaaacaatctggcgcagggatcgctgcgtgaacatctgcccgcctggctgtgggggcaaaaagatcccgacacctggtcggtgctggacagcaactccgcgtccgacgcgatatctggatggcatggtcgctgctggaacgcggtcgtctgtggaaagagacgcgttataccgaggtgggcacggcgttgctaaaacgcatcgctcgcgaagaggtcgtgaatgtgccggggctgggctcaatgctgctacctggcaaaatcggctttgcgnacgaatagctggcgttttaacccaagctatctgccgccgcagttgagccaatactttagccgttttgcgcagcgtggtcgacgctacgggaaaccaatttgcggcttttgctggaaaccgcgccgaaaggtttctcgccggactgggtgcgttatgaaagcaagcaaggctgggcagttgaaagcggaaaagacgctgatcagtagctacgatgcgattcgcgtctatttatgggcgggaatgatgcatgatggcgatccgcaaaaagcgcgtttactggcgcgatttaaaccgatggcgacgttaacgatgaaaaacggcgttccaccggagaaagtggatgtcgtcagcgggaacgcgcaagggacggggccggtcgggttttccgccgccttactgcctttcctgcaaaatcgcgacgcccaggccgtgcagcgacagcggtcgcagaccattttcctggcagcgatgcctattacaactatgtgctgactctctttggccaaggctgggatcagcaccgttttcgcttcaccgtcaaaggtgaattattacctgactggggccaggaatgcgtaagttcacgttaagtctcatgcacgctt

SEQ ID NO: 36577 - DNA, 509 bp, Salmonella paratyphi A
ttatcgcttggtatggcgctaacaccgcttgccggcgcagcgacctcgccgcagcgacagttgctggagcaggttcggctggcgaggccacgcaccgtgaggacttagtccgtcagtcgctctatcgcctggagctgatcgaccccaatgatccacaggttatcgctgcccgtttccgctatctgttgcgccagggggacagcgacggggcgcagaagctacttgaccgtgctgcgcaactggcgccggagtcgacggcgtatcaatcttcccgcaccgcgatgctgctctccacgccacaaggacgccagtctttgcaggaggcgcgtttactggcgacgaccggtcatactgaacaagcgatcgccagctacgacaagctgtttaaaggttatccgccggagggcgaactggcggtcgaatactggacgaccgtggcgaaattgcccgcccgccgtcacgaagcgattaaccagctacagaaaatcaatgccgtcagtccggggggg

SEQ ID NO: 36578 - DNA, 830 bp, Salmonella paratyphi A
atccgtatcacgttaatcttattcttctccgccgtgggatggacgattctcgccagtctgattgagaatcgcctggcctccgatattcatggtcgcccgctacccagcgcccgcacgcgcacgctgctgacgctgttccgcaatgcgctggcagtgattatcagtaccataaccatcatgatcgtgttatcggaaatcggcgtcaatatcgcgccgttgctggctggcgcgggggcgttaggtctggctatctctttcggttcgcaaaccctggtgaaagatattattaccggcgtttttattcagtttgaaaacgggatgaataccggcgacttagtcaccataggcccgctgacggggacggtcgaaagaatgtcgattcgttccgtcggcgtgcggcaggataccggggcataccatattatcccgtggtcctcgatcaccactttcgccaactttgtgcgcagtatcggctctgttgtcgccaactatgacgtggatcgccatgaggatgcggataaagcgaatcaggcgctgaaagacgcggtaacggcgctgatggagacggaggatattcgcaggctgattatcggcgaaccacgttcgccggtattgtcggtttaacgaacacggcgtttactttacgcgtgtcgttcacacgctaccgctcaagcagtggacggtgcgttttgcccttgatagccaggtgaaaaagcattttgatctggccaatgttcgcgcgccggtgcaaacgtatcaggttctgcccgccctcctggcgcccgccgcctgattcactgccgccgcgcgaaccgacgatttagcgttta

SEQ ID NO: 36579 - DNA, 2005 bp, Salmonella paratyphi A
gacgaaatgttacctgtgtcgccacaaccgtcggaaaccgtactggcgaataccgcgtgccgtgaacccgaagatccgcgttataaggatctgattgacaaattcgttattctgcgctgggttaaccgccgcattccgattgtgggcgacgaacacgccgatatggaaaaaggtaccggctgcgtgaagatcaccccggcgcacgactttaacgactatgaagtcgggaaacgtcacgccctgccgatgatcaacatcctgacctttgatggcgacattcgcgaaagcgcggaagtgttcgataccaaaggtgaagagtctaacgtttattccagcgagattccggctgagttccagaagctggaacgctttgctgcccgtaaggccatcgttgctgccgttgacgcgctgggcctgctggaagaaattaaaccgcacgatctgaccgtcccttacggcgaccgtggcggcgtagttatcgaaccgatgctgaccgaccagtggtacgtccgtgcagacgtgctggcgaaaccggcggtggaagcggttgaaaacggcgacattcagttcgtgccgaagcagtacgaaaacatgtacttctcctggatgcgcgatattcaggactggtgtatctctcgtcagctgtggtggggtcaccgtatcccggcatggtatggcaacgacggcaacgtctacgttggccgtaccgaagacgaagtgcgtcaggaaaataacctcggtgccgacgttcagcttcgtcaggacgaagacgttcttgatacctggttctcctccgcgctgtggaccttctccaccctcggctggccagaaaacaccgacgccctgcgtcagttccatcccaccagcgtgatggtgtccggcttcgatatcatcttcttctggattgcccgcatgatcatgatgaccatgcacttcatcaaagatgaaaacggcaagccgcagtgccgttccatactgtctacatgaccggtctgattcgcgacgacgaaggccagaagatgtccaaatccaagggtaacgttatcgacccgctggatatggtggacggcatctccctgccggaactgctggagaaacgcaccggcaacatgatgcagccgcagatggcggagaaaatccgcaagcgtaccgagaagcagttcccgaacgcatcgagccgcacgcaccgacgccctgcgcttttaccctggcggcgctagctcgaccggccgcgacatcaactgggatatgaagcgtctggaaggctaccgtaacttctgtaacaagctgtggaacgccagccgctttgtgctgatgaacactgaagagcaggattgcggcttcaacggcggcgaaatgaccctgtcgctggcggaccgctggatcctggcggaattcaaccagaccgttaaagcctaccgcgaagcactggataacttccgcttcgatatcgccgcaggcatcctgtacgagttcacctggaaccagttctgcgactggtatctggagctgaccaaaccggtaatgaccgggggttccgagtctgaactgcgtggcacccgccatacgctggtcaccgtgctggaaggtttgctgcgtctggcgcacccgatcattccgttcatcaccgaaaccatctggcagcgcgtgaaggttatctgtggcattaccgccgataccattatgctgcagccgttcccggaatataacgccgcgcaggtggatgaagccgcgttggccgataccgagtggctgaagcaggcgatcgttgccgtacgtaacattcgtgcggaaatgaacatcgccccgggcaaaccgctggaactgctgctgcgcggctgtagtgaagaagccgttcgtcgtgttaacgacaaccgtagcttcctgctgaacctggcgcgtctggaaagcatcaccgtgctgccagccgatgacaaaggtccggtttccgtgaccaaaatcatcgacggtgccgaactgctgatcccgatggcgggtctcatca

SEQ ID NO: 36580 - DNA, 1378 bp, Salmonella paratyphi A
  misc_feature (1363)..(1363): n=g, a, t or c
atgttaaaaatttttaatacactgacgcgccaaaaagaggaattcaaacccattcatgccggggaagtcggcatgtacgtgtgtggcatcaccgtttacgatctctgccacattggccacggacgcacgtttgtcgcttttgacgttgtcgcgcgctatttgcgttttctcggttataagctgaagtatgtgcgtaacattaccgatatcgacgataaaattattaaacgcgccaatgaaaatggcgaaagttttgtcgcgctggtcgacagaatgattgcggaaatgcatcaggacttcgacgcgctgaatattctgcgtccggacagcgagccgcgtgcgacgcaccatattcaggaaattatcgagctcacccgcaccttaatcgagaaagggcacgcctatgtggcggataacggcgatgtgatgtttgatgtaccgaccgatccgacttatgggcagctttcccgtcagatcttgagcagcttcaggcgggcgccgcgtggatgtcgttgacgtgaagcgtaacccgatggacttcgtgctgtggaaaatgtcgaaagagggcgagccgagctggccgtcgccgtggggcgaagggcgtccgggctggcacattgaatgttcggcgatgaactgcaagcagttgggcaaccattttgatattcacggcggcggttccgatctgatgttcccgcaccatgaaaacgagattgcccagtctacctgcgcgcatgacggcgaatacgtcaactactggatgcactccggtatggtgatggtggatcgcgagaagatgtccaaatcgctgggcaacttctttaccgtgcgcgacgtgctgaaatactacgatgcggaaaccgtgcgctacttcctgatgtccgggcattaccgtagccaactgaactacagcgaagagaacctcaagcaggcgcgcgcctcgctggagcggttatacactgcattgcgtggaacggataaatcagcggccccggcggcggcgattacgtgttgaagcgcgtttcgtggaggcgatgaatgacgatttcaacacgccggaagcctactccgtcctgtttgatatggcgcgtgaagtcaaccgtctgaagggcgaagatatgaccgccgcgaatgcatggcgtctcatctgcggaagatttccggcgtgctgggactgctggagcagaggccggatgttttcctgcaaagcggcgcaagggcgagtcgatggtgaagttgcggaaattgaagccttgattcaacagcgtctggatgcccgtaaagcgaaagactgggcggcggcggacggcgccgactcagtctcacagagatgcggtatgatgctggaagatggcgcgcagcncagcgctggcgacgt

SEQ ID NO: 36581 - DNA, 915 bp, Salmonella paratyphi A
atgcaaaagtttgataccaggaccttccagggcttgatcctgaccttacaggattactgggctcgccagggctgcaccattgttcaaccattggacatggaagtcggcgcgggaacttctcatccaatgacctgcctgcgcgcgctggggccagagccgatggcgactgcctatgtgcagccttctcgtcgtccgaccgatggccgctacggcgaaaacccgaaccgcttacagcactactatcagttccaggtagtgattaagccgtctccggagaatattcaggagctgtacctcggttctctgaaagagctgggtatggacccgaccattcacgacatccgtttcgtggaagataactgggagaacccgacgctgggtgcctggggactcggctgggaagtgtggctgaatggcatggaagtgacgcagttcacctacttccagcaggtcggcggcctggagtgcaagccggtgaccggtgaaatcacttacggtctggaacgtctggcgatgtatatccagggcgtggacagcgtttacgacctggtctggagcgatggcccgctgggtaaaaccacctacggcgacgtgttccatcagaacgaagtggagcagtccacctataactttgaatacgccgatgtggatttcttattcacctgcttcgagcagtatgagaaagaagcccagcagctgctggcgctggaaaacccgctgccgctgccggcctacgagcgtattctgaaagccgcccatagcttcaacctgctggatgcgcgtaaagctatctccgtcaccgaacgtcagcgctacatttgcgtattcgcaccctgaccaaagcagtggcagaagcttattatgcttccgtgaagccccggcttcccgatgtgcaacaaagacaagtaagaggcg

SEQ ID NO: 36582 - DNA, 996 bp, Salmonella paratyphi A
atgcagcctaaaattaactggattgataacctgcgagggatcgcctgtttaatggtagtgatgatccatactacaacgtggtacatcaccaacgcccacagcgtcagcccgctaaactgggatattgcgaatgtcctgaattcggcttcgcgcgttagcgttcccctgttttttatgatttcaggctatcttttttttggcgagcgctgcgcaaccgcggcattttttacgtatcgccctgtgccttatcttttacagcgttgtcgccctggcttacatttcactttttacttcgatcaacgtcgagctttcgctaaaaaatgtgctgcaaaaacccgtgttttaccacctgtggtttttctttgcgattacggtgatctacctggtatcgccattaatccaggtaaaaaacgtgagcggcaaaatgctcctgatgctgatggtggtcattggcattattgctaacccaaatactgtgccgcaaaaaatcggcggcgttgaatggttgcccatcaatctgtatatcagcggcgacacgttctactacattctctacggtatcctgggccgcgcattggaatgatggagacgcaaaagccatcgctgacgcttatctgcgctgccctgttcatcatcgcggtatttgttatttctcgcggcacattgcatgaattacgctggcgcggaaattttgccgatacctggtatctgtattgcggccccatggtgtttatttgcgccgtctcactgttcacggtagttaaaaataagctgaatgcgcggacgttacctggactggggcttatctcccgccactcgctgggtatttatggtttccacgcgctgattatccatgcgctacgtactaatggtctggaattaaaacgttggccgccgttagacatcgtgtgggtttttgccgcgacggtgacaggaagcctgctactttccatgctattacagcgtattgataaacggaaatgggttagctaaacg

SEQ ID NO: 36583 - DNA, 309 bp, Salmonella paratyphi A
atgaaacgtccggactacagaacactacaggcgctggatgccgttatacgtgaacgaggattcgagcgcgccgcccagaagttgtgcatcacgcaatccgccgtctcacagcgcataaaacagcttgagaatatgttcggacaacctttattggtgcgtaccgttcctcctcgcctacggagcaagggcaaaaattactggctctgctgcgtcaggttgaactgctggaagaagagtggctgggcgatgaacaaaccggctctacgccgctgctcgtgtcgctggcggttaacgccgacagtctggcga

SEQ ID NO: 36584 - DNA, 1060 bp, Salmonella paratyphi A
  misc_feature (346)..(346): n=g, a, t or c
  misc_feature (416)..(416): n=g, a, t or c
  misc_feature (511)..(511): n=g, a, t or c
atgcgcacgacggtttattaaacacagtggattgatatgaaggtactggttaccggcgccaccagcggcttaggtcgaaacgcggttgaatttttgcgcaataaaggcatcagcgtcagagcgacgggtcgcaatgaagcgatgggcaagctgcttgaaaaaatgggcgcggaattcgtccatgcggatttaaccgaactggtctcctcgcaggctaaagtgatgcttgccgggatcgacacgttgtggcactgctccagctttacctcgccctggggaacccaacaggctttcgatctggcgaatgttcgcgccacccgccgtctgggagaatgggcggtcgctnggggctgcgcaattttattcatatctcctctccctcgctctattttgattaccaccatcaccgtgatatncaagaagatttccgcccgcatcggtttgccaatgagttcgcccgcagtaaagccgccgcgggagaggtgattaatctgttggcgcagcaatccgncaacacattttacggtattgcgtccacaagcctgtttggcccgcacgataaagtatttatcccacgtctggcgcatatgatgcaccattacggtagcgtcttattaccgcacgggggcagcgcgctggtcgatatgactactatgaaaatgcgatccacgccatgtgctggccagcagcgcggctgcgatcatctgccttctggccgcgcttataacatcactaacggcgaaaaccgcaccttacgcagcatcgtacaaaagttaattgatgaactgactatcgactgccgcattcgctctgtgccttacccgatgctggatatgatcgcccgcagtatggagcgcttcggcaaaaaatccgccaaagagcccccgctaacgcattacggcgtgtcaaaactgaattttgattttacgctcgatacgactcgcgcgcaggacgagctgggctaccagcccatcgtcacgctggacgaaggcattgagcgcaccgcgcctggctgcgcgatcacggaaatttaccgcgttaatcctggccgtacttctcc

SEQ ID NO: 36585 - DNA, 1341 bp, Salmonella paratyphi A
atggatcagacatgttctctggaatcgttcctcaaccatgtacaaaagcgcgacccgcatcaaaccgagttcgcgcaagccgtccgtgaagtcatgaccaccctgtggccgtttcttgaacaaaacccccgttaccgccacatgtctttactggaacgtttggttgaaccagagcgcgtaattcagtttcgcgtagtgtggctggacgacaaaaaccaggtgcaggtaaatcgcgcctggcgcgtgcagttcaactctgctatcggcccctataaaggcggtatgcgcttccatccttcggtaaacctttccatccttaagttcctcggctttgagcaaacctttaaaaatgctctcaccacgttgccgatgggcggcggtaaaggcggcagcgatttcgatccgaaagggaaaagcgaaggcgaagtgatgcgtttctgccaggcgctgatgactgaactgtatcgccatttagggccggataccgacgtgcctgccggggatatcggcgtgggcgggcgcgaagtgggctttatggcgggaatgatgcgcaagctttccaataacagcgcctgcgtcttcaccggcaaagggctttccttcggcggcagcctgattcgcccggaggcgacgggctatggcctggtctacttcaccgaagcaatgcttaaacgtcatggtctcggtttcgaagggatgcgcgtcgccgtgtccggctccggcaacgtagcgcaatacgccattgagaaagcgatggcctttggcgcgcgcgtggttaccgcgtcggattcgagcgggacggtggtcgatgaaagtggcttcacgccagagaagctggcgcgtctgtgtgaaattaaagccagccgtgacggtcgcgtcgctgactacgcccgtgagtttggcttaacctatctggaaggccagcagccctggagcgtaccggtggatatcgccctgccatgtgcgacgcagaacgaactggacgttgatgccgcgcgcatactgattgccaatggcgtaaaagccgtggcggaaggggcaaatatgccaaccacgattgaagcgaccgatctcttccttgaggcgggcgtactgtttgcgccgggtaaagccgccaacgcgggcggcgtggcgacatcaggtctggaaatggcgcagaacgccgcgcggttgagctggaaagccgagaaagtggacgcccgtctgcatcacattatgctggatatccaccacgcctgtgtcgagtacggcggcgataataagcataccaactacgttcagggcgccaacatcgccggtttcgtgaaagtcgccgacgccatgctaggccagggcgtcatt

SEQ ID NO: 36586 - DNA, 472 bp, Salmonella paratyphi A
ggacacggttttgacgtacacgcgtttggcggagaagggccgattatcattggcggcgtgcgtatcccttatgaaaaagggctattggcgcattccgatggcgatgtggcgttacatgcgctgaccgatgcgctgctgggcgcggcggcgcttggcgatatcggcaagctcttcccggataccgatccggcatttaagggagcggatagccgcgaactactgcgtgaagcctggcgtcgtattcaggccaaggggtacaccctcggcaacgtggatgtcaccattattgcgcaggcgccgaaaatgctgccgcatattccgcaaatgcgcgtctttatcgccgaagatctcggctgccatatggatgacgttaacgtgaaggcgacgacgacggaaaagctcggatttaccggacgcggagaaggcattgcctgcgaagcggctcgcgttgctgatgaaggcggcgaaatga

SEQ ID NO: 36587 - DNA, 718 bp, Salmonella paratyphi A
  misc_feature (536)..(536): n=g, a, t or c
atggcagccactttattggacgtttgcgccgtggtgccggcggccggatttggccgccgaatgcaaacagaatgtcctaagcagtatctctcaatcggtaataaaaccattctggagcactcagttcatgcgctgctggcgatcctcgggtgacacgcgttgttattgctatcagccctggagtacatcgctttgcccaagcttccgctggcgaagtcatccgcaaatcaccgttgtggatggcggcaacgaacgcgctgattccgttttggccgggttacaggccgttgcaaaggcgcagtgggtgctggggcacgacgcggcaagagccctgtttgcatcaggatgacctggcgcggttactggccatcagcgaaaacagccgggtcggtatatcctcgccagtccggtgcgcgacaccatgaaacgcggcgaaccagggaaaaccgctattgcccataccgtagagcgcgccgatttatggcacgcgctcaccccgcagtttttcccccgcgaactcttgcacgattgtctgnagcgtgcgctgaatgaaggcgcgatcatcaccgacgaggcgtcagcgctggagtattgtggttttcatccggcgctggtagaaggtcgcgcggataacatcaaggtcacccgtccggaagatctggcgctggcggaattttatctgacccgaaccatccaccaggagaaagcataatgcgaa

SEQ ID NO: 36588 - DNA, 1052 bp, Salmonella paratyphi A
aggcatgaggagaatagaatgaagcaacagaccaaccgaaatcgtcgttgggttttggcctcgcgtccccacggcgcgccgcagatggataacttccgcctcgaagaagatgacgtcgcgacgcccggtgaagggcaggtgctattgcgtaccgtttttttatcactcgacccttatatgcgtggccgcatgagcgatgaaccctcttatgcgccgccagttgaacctggctgcgttatggttggcggtacggtcagtcgcgttgtcgcgtcgaatcatcctgattaccgaccagacgaatgggtgttgagttacaatggttggcaggattatgacatttcagatggcgaagggttggtaaagctgggtgataatccgcaacatccttcctggtcgttgggagttttagggatgccggggtttaccgcctatatggggttactggatatcggccagccgaaagagggcgaaacgctggttgtcgccgccgccaccggcccgtaggcgcaacggttgggcaaattggcaagctgaagggctgccgggtcgtgggtattgccggcggcgcggaaaaatgccgtcatgcgacagacgttttgggatttgatctgtgccttgatcatcacgctgataatttcccacaacagcttgcgcaggcctgcccgcagggtatcgatatctattatgagaatgtcggtggtaaagtctttgacgccgtcttaccgctactgaatacgtcggcgcggattccgctctgcggtctggtcagcggctacaatgcgacaacgttgccggacggtccagacagactgccactgctgatggcgacattacttaaaaagcgtattcgcctgcaaggttttatcatcaaccaggactatggtcaccggatacatgagtttcagcaagaaatggggcgttggatcaaagaagggaaaatacattaccgggagcagattactgatgggctggaaaatgcgccagaagcgtttatagggctgctggcggggaagaactttggcaaagtcgtgatacgtttagcggacgatgcg

SEQ ID NO: 36589 - DNA, 1383 bp, Salmonella paratyphi A
cgcgttgatccgccgaagaaaccgctgaagctccgtaagatcgagtttgttgaaatctacgaaccgttttctgaaggtcaggcgaaagcccaggcggatcgctgtttgtcctgcgggaacccctactgcgagtggaaatgtccggtacataactacatcccgaactggctgaaactggctaacgaagggcgtatttttgaggcggctgagctatcgcaccagaccaacaccctgccggaagtgtgtggccgcgtctgcccgcaggaccgcctgtgcgaaggctcctgtacgctgcacgatgagttcggcgcagtgaccatcggtaacattgagcgctatatcaacgataaagcgttcgaaatgggctggcgcccggatatgaccggcgtgcgccagacggacaaacgggtagcgattatcggcgctggtccggcaggctggcgtgcgccgacgtgctgacccgcaacggcgtgaaggcggtggtctttgatcgccatccggaaatcggtggtctgctgaccttcggtattccagctttcaaactggaaaaagaggtgatgacccgtcgtcgcgagatcttcaccggcatgggtattgagttcaaacttaataccgaagtgggtcgtgatgtacagcttgaagatctgctgaaagattacgatgcggtattccttggcgtcggcacctatcagtcgatgcgcggcgggctggaaaatgaagatgcggacggggttttcgacgctctaccgttcctgatcgccaatacgaagcagatcatggggtttggcgaaaccagcgacgaaccatatgtcagcatggaaggcaaacgcgtggtggtgctgggcggcggcgataccgcaatggactgcgtacgcacttccatacgccagggcgcaacgcacgtaacctgtgcttatcgtcgtgatgaagagaacatgccgggttccagacgcgaagtgaaaaacgcgcgcgaggaaggtgtcgagtttcagtttaacgttcaaccgctgggcattgaagtcaatgccaacggcaaagtgagcggcgtaaaaatggtgcgcactgaaatgggcgaaccggatgccaaaggccgtcggcgggcggagatcgtcgccggttccgagcatgtggttccggctgatgcggtggtgatggcgtttggttttcgtccacacagcatggaatggctggcgaaacacagcgtggaactggactcgcagggacgaattatcgcgccggaacgcagcgataatgctttccagaccagcaacccgaaaatcttccggtggcgacatcgtgcgcggttccgatctggtggtgacggcgattgccgaaggccgtaaagcggctgacgggattatgaactacctcgaagtgtaacct

SEQ ID NO: 36590 - DNA, 885 bp, Salmonella paratyphi A
  misc_feature (114)..(114): n=g, a, t or c
  misc_feature (313)..(313): n=g, a, t or c
caggtcaacattgacggcaccatcgtgattggcgagggaatatcgacgaggccccgatgctctatatcggcgagaaagtcggtactggtcacggcgatgcggtagatatcgctncgatccgattgagggcacgcgcatgacggcgatgggtcaggcgaaccgctgggcgtgctggcggtcggcgataaaggctgtttcctgaatgcgcccgatatgtatatggaaaaactgattgtcggtccgggcgccaaaggggcgatcgatctcaatctgccgctggcggataacctgcgcaacatcgcatatgcgctgnggtaaaccgcttggcgatctgaccgtgaccattctggcaaaaccgcgtcatgacgaggtcatcgcagagatggccaaactgggcgtacgcgtgtttgccattcctgacggcgacgtcgcggcctcaattctgacctgtatgccggatagcgaagtcgacgtgctgtacgggattggcggcgcgcagaaggcgtggtatccgcagcggtgatccgcgcgctggacggcgatatgcagggacgtctgctggcgcgccatgacgtgaaaggcgacagcgaagaaaaccgccgcattggcgaacaggaactggcgcgctgcaaagcaatggggattgaagcgggcaaggcgttatgcctgggcgacatggcgcgtagcgataacgttattttctctgcgaccggcatcacgaaaggcgatctgctggaaggaattagccgaaaaggccatatcgccacgacggaaacgctgctgatccgcggcaaatcacgcaccatccgccgcattcagtctatccactatcttgatcgtaaagatcctgatgtgcaggcgcatatcctctagcgcatttgttag

SEQ ID NO: 36591 - DNA, 1129 bp, Salmonella paratyphi A
attgcgacccgcaatctgcggggcaggactattcaccttccgataccctatcggaacttacgggagcatagctatgactgatattgcgcagttgcttggcaaagacgccgacagccttttacagcatcgttgtatgaccattccttccgatcagctttatctacccggcaaggattacgttgaccgggtgatgattgacaataatcgtccaccagccgttctgcgtaatatgcagacgctctataatactggacgcctggcgggaacaggatacctttcgatactgcccgtcgatcagggagtggagcactccgccggcgcctcttttgcggccaacccgcgctactttgacccaaaaaacattgttgaattggcgattgaggccggctgtaactgcgtggcctctacctacggcgtactggcctcggtttcacggcgctatgcgccgtattccgtttttggtcaaactgaatcacaacgaaacattgagctatccgacagagtacgatcagaccctgtatgccagcgttgagcaggcgttcaatatgggcgccgtggcgtaggcgcgacgatctatttcggttcggaacagtctcgtcgccagattgaagagatctccgccgcttttgagcgtgcgcatgagctgggtatggtgaccgtattgtgggcttacctgcgtaattcttcctttaaaaaagacggcgtcgattaccatgtatccgctgacctgacggggcaagccaaccatctggccgctacgattggcgcggatatcgtgaaacagaaaatggccgagaataatggcggttataaagcggtcaacttcggctataccgacgaccgcgtgtacagcaaactgaccagcgataacccgatcgatttggtacgttaccagttggcgaactgctatatgggacgcgccgggcttatcaactccggcggcgcggacggcggcgacactgatctcggcgacgcggttcgtaccgcgatgatcaacaaacgagccggtggaatggggctaattctgggacgtaaagcctttaagaaatcgatggctgatggcgtgaagttgattaacgccgtacaggatgtctatctggatagcaaagtcaccatcgcctgagttcaa

SEQ ID NO: 36592 - DNA, 904 bp, Salmonella paratyphi A
atggctaactttcccgccagcttactgatcctcaatggcaaaagcgctgataaccagccgctacgtgaggccattacgctacttcgcgacgaaggcatacagattcacgttcgggtaacttgggaaaaaggcgacgcgcagttacgttgatgaagcccgtagactgggcgttgaaacggtgattgccggcgcggagacggtaccattaatgaagtgtctaccgcgctcatccagatccgcgacggcgtagcccccgcactgggccttttgccgctcggaccgccaacgattttgccaccagcgccggtattcctgaagcgctggacaaagcgctgaaactggcgattgcggaaacgcgatggaaattgatatggccagggtcaatgataaaacctgttttatcaatatggcgacgggcggttttggcacccgcattaccaccgaaacgccggagaaactcaaggccgcgttgggcggcgtctcctatcttattcacggtctgatgagaatggatacgctgacccctgaccgctgcgaaatacgtggcgaaaactttcactggcagggagatgcgctggtgatcggcatcggcaacggtcgtcaggccggcggcgggcagcaattatgtcctaccgcgctggttaacgacgggctgttacagctacggatttttaccggcgaagagctgctgccggcgctgttttccacactcacgcagtcagatgacaatccgaatattattgacggcgcctcggcgtggtttgatattcatgcgccgcatgaaatcacttttaatctggatggcgaaccactcagcggacaagaattccatattgaggtgctgcctggcgcattacgctgtcgactgccaccagactgcccgttgctacgttaataacacctg

SEQ ID NO: 36593 - DNA, 453 bp, Salmonella paratyphi A
ttgactactaacactcatactctgcagattgaagagattttagagcttctgccgcaccgttttccgtttttactggtcgatcgcgtgctggactttgaagaaggtcgttttctgcgtgcagtgaaaaatgtctccgtcaacgagccgtttttccaggggcatttcccgggcaaaccgattttgccaggcgtgctgattctggaagcgatggcgcaggcaaccggtattctggcgtttaaaagcgttggtaaactggaacctggcgaactgtattatttcgcgggtattgatgaagcgcgctttaagcgtccggtggtgccaggcgatcagatgatcatggaagtcactttcgagaaaacgcgccgtggcctgacccgctttaaaggggttgcgctggtcgacggtaaagtcgtgtgcgaagcaaccatgatgtgtgctcgtagccgggaggcc

SEQ ID NO: 36594 - DNA, 456 bp, Salmonella paratyphi A
atggcggcacagcgtcctttaacgattgccctggtcgccggtgaaacgtccggcgatattcttggcgcaggcttaattcgtgcgctgaaagcgcgcgtacccaacgcccgttttgtgggcgttgcggggccgcgtatgcaggccgaagggtgtgaagcttggtacgaaatggaagagctggcggtcatgggcattgttgaagtgctcggacgtttacgccgtttgttgcatatccgcgccgatctgacccgccgttttaccgaactcaagcccgatgtctttgtcgggattgatgcccctgatttcaatattaccctcgaaggtaatctgaaaaaacaagggattaagaccattcattatgtcagcccgtccgtttgggcctggcgacagaaacgcgttttcaaaataggcagatccacccatatggtgttggcttttctgcctttcgaaaaagcg

SEQ ID NO: 36595 - DNA, 1076 bp, Salmonella paratyphi A
gcgttcctggaaaatgtcgatatttttaatttatggctacgaaatgagcatcgccatgtctccctgaccatctaccgagaggaatgattctgatgaatgcactgactgccgtaaaagcgaacacagatgatttagcccaacgccatactggtttcacccttgccccttcggcgcagtcgccgcgcctgctggcgttaacgtttacggcggataccacaagacaatttctccatcaggttgcgcagtggccggtgcaggcgctggaatacaaatctttcttacgtttcaaaatcggcaagatcctcgacgatctgtgcggcaatcagctacaaccgctgttgatcaaaacgctcctcaaccgtgcacaaggcgcggctgttgatcagcgccgaagggatcgatgatgtcgcacaggcagaagagatggtcaaactggcgacggcggtggcgcatcttattggtcgctccaactacgatgcgatgagcggccagtactacgcgcgtttcgtggtcaaaaacgtcgacaactccgacagttatctgcgccagccccaccgcgtaatggaactgcacaatgacggtacctatgttgaggaggtgaccgactacgtgctgatgatgaaaatcgacgaacagaatatggaaggcggtaattcgctgctgctgcaccttgatgactgggaacatctggagtcgttttttacccatccgctggcgcgtcgcgtcatgcgctgggcgcgccgccaagcaaaaatgttagccatgacgtctggcacccggtgtttgatgtcgaccaacaaggccgcccggtcatgcgttatatcgaccagttcgtccagccaaaagactttgaagaaggcgtctggctcagcgagctttcagacgcgctggaaaccagtcaaaacatcctctccgtgccggtaccggtcggcaaattcctgctgattaacaatctgttctggctacatggacgcgatcgttttacgccgcatcctgacttgcgtcgcgaactgatgcgccagcgcggttacttcgcctacgccgccagccattatcaaactcaccaataagcgcca

SEQ ID NO: 36596 - DNA, 863 bp, Salmonella paratyphi A
gtgaaagctgacaacccttttgaccttttactccctgcagcaatggccaaagtggctgaagaagcaggcgtctataaagcaacgaaacatccgcttaagactttctatctgcgattaccgccggcgtattcattctcaattgcctctgttttttatattactgcgacaaccggtactggcgcgatgccttatggtatggcgaaacttatcgggggtatctgtttctctttgggactgattctctgtgttatttgcggcgctgatcttttcacctctactgttctgatcgttgtactaaagctagcggtcgcatcacctgggggcaactggctaaaaactggttaaacgtctattttggtaacctgattggcgctctgcttttcgtgttactgatgtggctttccggcgagtatatgactgccaacggtcaatggggacttaacgtcctgcaaaccgccgaccacaaaatgcaccacacttttattgaagctgtctgcctcggtattctggcgaacctgatggtttgtctggccgtgtggatgagctactcaggtcgtagcctgatggacaaagcgttcatcatggtactgcccgtcgccatgtttgtcaccagcggttttgagcacagtatcgcaaacatgtttatgattcctatgggtattgtaatacgcgatttcgctacaccggagttttggaccgcggttggttcgtctccggaaagtttttctcacctgaccgtgatgagcttcatcactgataacctgattccggtcacgatcggtaatattatcggcggcggtttgttggtcgggttgacatactgggtcatttacctgcgtggtaacgagcatcattaatctgtt

SEQ ID NO: 36597 - DNA, 690 bp, Salmonella paratyphi A
atgagtatggttgaaactgccccgagtaagattcaggttcgtgatttgaacttctactacggcaaattccatgccctgaagaacattaatctggatatcgcgaagaatcaggtaacggcatttatcgggccatccggctgcggtaaatcaacgctactgcgtaccttcaataaaatgtattcgctttatccggagcagcgcgcggaaggtgaaattctgctggatggcgacaatattctcaccaacacccaggatatcgcgctactgcgcgcaaaagtggggatggtattccagaagccgacgccgttcccgatgtccatctatgacaatatcgcctttggcgtgcgtctgtttgagaagctgtctcgcgccgatatggacgagcgcgtgcagtgggcgttgaccaaagccgcattatggaacgaaaccaaagataaattgcaccagagcgggtactctctctccggtggtcagcagcagcgcctgtgcattgcgcgcggtatcgccattcgcccggaagtgctgctgctggatgagccatgctcagctctggatccgatctctaccgggcgtattgaagagctgatcaccgagctgaaacaggattacaccgtggtgatcgtgacccacaacatgcagcaggcggcacgttgctccgatggggatcctctagagtcgacctcaggcagc

SEQ ID NO: 36598 - DNA, 217 bp, Salmonella paratyphi A
cttgattctttgttcctcgacgaggcttcggcacgcttgataggaaacgtggacgccgcgctggatggtcgacgcgctgaatgccagcgggaagaccatcggtgtgattagccacgtggaagccatgaaagaacgtatccctgtgcagataaaagtgaaaaaaatcaatgggcttggttatagcaaactggacaaagcgtttgccgtggagtaacgc

SEQ ID NO: 36599 - DNA, 1696 bp, Salmonella paratyphi A
atgcgtactagccaatacctgctctccactctgaaggagacacctgccgacgccgaggttatcagccaccagctgatgctgcgcgccgggatgatccgcaagctcgcctccgggttatatacctggctgccgaccggctgcgcgtcctgaaaaaagtcgaaaacatcgtgcgtgaagagatgaacaacgccggtgctatcgaggtgtcgatgccagtcgttcagccagccgacctgtggcaagagagtggtcgttgggaacagtacggtccggaactgctgcgttttgtcgaccgtggcgagcgtccgttcgtactcggcccgacccacgaagaagttatcaccgacctggtgcgtaatgaactcagctcttataagcagttgccgctgaacttcttccaaatccagaccaaattccgtgatgaagtgcgtccgcgctttggcgtgatgcgttcgcgcgaattcctgatgaaagatgcttactctttccatacctctcaggaatcgttgcaggaaacctatgacgccatgtacgccgcgtatagccgtatcttcagccgtatggggctggatttccgcgcggtacaggcgataccggttctatcggcgcaacgcctcgcatgaattccaggtgctggccaaagcggcgaagacgatatcgttttctctgatgtttctgattacgcggctaacattgaactggcagaacttacgcccgcaaagccggcgcagcggcgacgcaggaaatgactctggtcgatacgccaaatgccaaaaccatcgcggagctggtggaacaattcaacctgccaattgaaaaaacggtaaaaacgctgctggtgaaagcggtgaaagacagcaagtctccgctggtggctctgctggttcgcggcgatcatgaactgaatgaagttaaagcggaaaaactgccgcacgttgccagcccgctgaccttcgctactgaagaagagattcgcgccgtaattaatgccggccctggctccctcggcccggtcaatatgccgattccggtcatcatcgatcgtaccgttgccgccatgagcgattttgccgctggcgctaacatcgacggtaaacactactttggtattaactgggatcgcgatgtggcgacgcctgttgttgccgacatccgtaacgtagtcgccggcgatccgagtccggatggtcagggaacgttgcttatcaaacgcggtatcgaagtgggtcacatcttccagttaggtaccaagtactcagaagcgctgaaagcctccgttcagggtgaagatggccgtaaccagatcctgacaatgggctgctatggtatcggcgtaacacgtgtcgttgccgcggctatcgagcagaactttgacgagcgcggcattgtatggcctgacgcattgcacctttccaggtcgctattctgccgatgaatatgcacaaatccttccgtgtgcaggagctggcgaaaagctgtacaaaattgcgcgcgcagggtattgaagtgctgatggacgatcgtaaagaggcccgggctgatgtttgccgatatggagctgattggtattccacatactatcgtgattggcgatcgcaacctggataacgacgatattgagtataaataccgtcgtagcggtgaaaaatcgctgattaaaaccggcgatatcgttgattatctggtcaaggcgatt

SEQ ID NO: 36600 - DNA, 780 bp, Salmonella paratyphi A
  misc_feature (40)..(40): n=g, a, t or c
atctccgtcgccgtactgcccaacgcgccgcatgcgcganagatggcaactaaagcgcacaatagcgggcatgaggtgttaatccatctgccgatggcgccgctaagcaaacagcctctggagaaggatacgctgcgaccagatatgagcagcgatgagatcgagcgcattatccgcgaggcggtaaacaacgtgccgtatgccgttgggcttaataaccacatgggcagcgcaatgacttccagcctgttcggtatgcaaaaagttatgcaggcgctggaacattacaatctctattttctcgacagcatgacgattggcaatagccaggcgatgcgcgcggcatccggtacgggtgtgaaagtgatcaagcgcaaagtgttcctcgacgatacgcaaaacgaggcggatatccgtcgtcagtttaatcgcgctatcgaactggccgtcgcaacggcttcatcgcgattggtcatccacatcccgcaacggttcgcgtgctgcaacagatggtttatctgccggcggatatccccctggtacgcccaggcagcctgctcaacgaaccgcaggtagatacgtcccgacctggtgtgacgccgcagaaaattgacgcgccgccatattccctctccgcggcgtgaagatgtgcaagccgaaaaaaccgctgcaaccggtctacgctacggcctttttcagcgtcatcggcgagacattacgcaaagttccgtgattgtctggtttcagcaccagtggcaaggctgggggaaaatcgccgcg

SEQ ID NO: 36601 - DNA, 1033 bp, Salmonella paratyphi A
atgaaaaatagtaaaaccaaagtgagtatcattgtcccgttatataatgcgggagcggattttaatgcttgcatggcgtcgttaatcgcgcaaacgtggtcggcgctggaaattattattgtgaatgatggatcgacggatcattccgttgagatagcaaaacattacgcggaacattacccgcatgttcgactgcttcatcaggccaatgctggcgcatctgtcgcccgtaatcttggcctgcaagcggcgaccggcgattacgtcgcctttgtcgatgcggatgacctggtctacccgaagatgtatgaaacgctgatgactatggcgcttaacgatgatctggacgttgcgcagtgtaatgcggactggtgcgtccgaaaaaccgggcatgcctggcaatctattccgaccgatcgtctgcgttccaccggggtattaagcggaccggattggttgcgtatggcgctggcctcgcggcgctggaccatgttgtctggatgggcgtttatcgacgtgcgttaattatcgataacaatattactttcgttcccggactgcatcatcaggacatattatggtcgacggaagttatgtttaatgccacgcgcgtacgttataccgaacaatcattatataaatatttcctgcatgataattcggtaagccgtttgcaaagacaaggcaataaaaatcttaattatcagcggcattatattaaaattacgcgattattagaaaagctcaatcgtgattatgcccgtcgtattccgatttatccggaatttcgccagcaaattacctgggaagcgttacgcgtttgtcatgcggtacgtaaagagcctgatattttgacccgccagcgtatgattgccgaaatttttacttctggcatgtatagacggatgatggctaacgtctgcagcgcgaaagcggcttatcagacgctgctctggtcttccggctgtggcaatggcgcgacaaaactttgtcgcaccgtcgtatggcccgtaaggcgctcaatttgtcttag

SEQ ID NO: 36602 - DNA, 865 bp, Salmonella paratyphi A
gaagaagtccatcgcctgcggaaaaaagcgtagaactgacgcgcaaaatcttcgccgatctcggccatggcaggtagcccaactggcgcgccatccgcagcgtccgtacaccctggattatgtccgtctggcgtttgatgagtttgatgagctggcgggcgatcgcgctatgctgatgacaaagccatcgtcggcggtatcggcgtctggaagggcgaccggtgatgatcattggtcatcagaaaggtcgtgaaaccaaagaaaaaattcgtcgtaactttggcatgccagccgccggaaggtaaccgcaaagcgctgcgcctgatggaaatggctgaacgcttcaacatgccgattatcaccttcatcgacaccccgggcgcttaccctggcgtgggcgcggaagagcgtggtcagtctgaagccatcgcccgcaacctgcgtgagatgtctcgtctgaacgtaccggtcatctgcaccgtgattggcgaagcggctccggcggcgcattggcgattggcgtgggtgataacgtaatatgctgcatacagcacctattccgttatctccccggaaggttgcgcctctattttgtggaagagcgccgacaaagcgccattggctgctgaagcaatgggcatcatcgcgccggctctgaaagagctgaagctaatcgattccatcattccggagccgctgggcgtcaccgtaatccggaagcgatggcggcatgcctaaagcgcagttgctggaagatttagccgatctcgatgtgttaagcaccgatgatttaaaaaaccgtcgttaccagcgtttgatgagctacggttacgcctaatcatttacctcatttttcccaggaggc

SEQ ID NO: 36603 - DNA, 138 bp, Salmonella paratyphi A
atgcaggtgttaaactcacttcgcaatgcaaaacaacggcatccggattgccagatagtcaaacgcaaaggacgcttatacgtgatttgtaaaacaaatccgcgttttaaggcggttcaggggcgtaaaaaaagacgt

SEQ ID NO: 36604 - DNA, 258 bp, Salmonella paratyphi A
atgaaacctgatattcatcctgtataccgcaccgtcgtatttcacgacaccagcgcaaatgaatatgtgaaagtgggatcaactatcaaaactgaacgtgaaatcgaactgggcggcgtgacatatccgtatgtcactattgatgtgtcatcaaaatcgcatcctttttataccggtagacagaaaacgtttgatagcgaaagtagcgccgcacgcttccagaaacgttttggtcattttatcggcgctaaacggggg

SEQ ID NO: 36605 - DNA, 813 bp, Salmonella paratyphi A
atgcctgaattacccgaagttgaaaccagccgccggggtattgaacctcatttagttggcgctactatcctgcacgcccatatccgtaacggtcgtctgcgctggccggtttcagacgaaatttatcgtctgagcgacacacccgtccttagcgttcagcgtcgggctaaatatctactgctggagttgcctgacggctggataattattcacctggggatgtcgggaagcttgcggatactgtcggaagcgctgccggcggaaaagcacgaccatgtcgatttggtgatgagcaatggcaaaattctacgttataccgatcctcgccgctttggcgcctggttatggaccaaagagctggaaggacataacgtactggcgcatctgggaccggagccgctaagcgatgagtttaatggcgaatatttgcaacagaaatgcgcgaagaagaagacggcgattaaaccctggctgatggataacaagctggtggtcggcgtggggaatatctacgccagcgagtcgctgtttgccgctggtattcaccctgacccctggcgtcgtcactctcgacagaggagtgcgacctgctggcacgggtgattaaagccgtttcgtgcgctctattgaacaaggcgggacaacgctgaaggattttctgcaaagcgatgggaagccgggctattttgcccaggagttgcaggtgtacgggcgcaaaggcgagccgtgtcgggtatgcggtacgccgatagtcgcaacgaaaacacacagcgcgcgacgttctattgccgtcactgtcagaaggggatcctc

SEQ ID NO: 36606 - DNA, 165 bp, Salmonella paratyphi A
atggctaaaggtattcgtgagaaaatcaagctggtttcttctgctggtactggtcacttctataccactacgaagaacaaacgtactaagccggaaaaactggaactgaaaaaattcgatccagttgtccgtcagcacgtgatctacaaagaagcgaaaatcaaa

SEQ ID NO: 36607 - DNA, 234 bp, Salmonella paratyphi A
atgtcccgagtctgccaagttactggcaagcgtccggtgaccggtaacaaccgttcccacgcactgaacgcgactaaacgccgtttcctgcctaacctgcactctcaccgtttctgggttgagagcgagaagcgttttgtcaccctgcgtgtatctgctaaaggtatgcgtatcatcgataaaaaaggcatcgaaacagttctgtctgaactgcgtgcccgtggcgaaaagtac

SEQ ID NO: 36608 - DNA, 647 bp, Salmonella paratyphi A
ttattgccgcgtgaaaaaatgctcagatccggcattgcttccctcagcgacgtggaactcgtggcgctttttttacgtcacgcacgccgggaaaagatgttatgacgttggcaaaagagatattgcagcactttgggtcgctgtatggcctgctgtcggcggactttgcgcagtttcgcggcgtaaacggcatcggcctggcgaaattcgcgcagttgaaaggcattgctgagctggcaaggcgctattacagcgtgcgcatgaatgaggaaagtgcgttgctgagtccggaaatgacgcgggaatttctgcaaagccaactgacgggcgaagagcgtgagatctttctggtgatcttcctagatgtccagcaccgggtgcttcagcacagccgcctgttttccggcacgcttaaccacgtagaggtgcatccgcgtgagattgttcgggaagcgattaaactcaatgcttcagcggtcattctggcgcataatcacccttcaggctgcgcagagccaagtaaagcagataaacttatcactgagcgcgtgataaagtgttgccagtttatggatatccgggtgctcgatcacctgataattgggcgcggagagtacgtttcttttgccgaacgcggctggatttaa

SEQ ID NO: 36609 - DNA, 1379 bp, Salmonella paratyphi A
gggaaattgccggaggggtgggtgacaacccatctttcagaaatatgcagtaagcctcaatatggctacacaactaagtcaagctctatgggggatgtaaaatttttaagaacaaccgatattacaaaaggagcggttgactggtccagtgtaccttattgcatggatgccccggaagatgtttcaaaataccaattacaggacagagatattgtgatatctcgagccggttcggttgggtttagttttttggtacaaaaccctccaagccaagttgtttttgcttcataccttattcgatttaaaccagttaattatttttcagaatattacttaaaacgttttttagagtcgagtgactattggaatcagctgtctttaatgtcagcagggaatgctgtacaaaatgttaatgctcaaaagttatcaacacttacagtaccaataccacctatagccgaacaaaaaatcatcgccgaaaaactcgatacgctgctggcacaggtagacagcaccaaagcacgtcttgagcaaatcccacaaatcctgaaacgttttcgtcaggcggtgctagctgctgcggtaagcgggttgttaattggttcaaataaaagaaaccaccacccattatgtagtgaatggcaatggccagacctaccatcaacttggagtgttcataaatactctgaacttgttgatagcagactaggtaaaatgcttgataaagctaaaaattttggctctgcaacaaaatatcttggaaatataaatgttcgctggtttagttttgatttagaaaaccttcaagatatactaatttcagatatagagcgcagagaattatcactcaagcttggcgatgttttaatatgtgaaggtggtgaacctggtcgatgtgctatatggagtgaacctcaggacatacctgttattttccaaaaagcattacatcgagcacgggtaaaagacaaaatcatccccgaatggttagtttataatttgaaaaatgattcaaataacattagcttatctcagctctttacaggaactacaattaaacaccttacaggaaaagcactagcaaattatcccatcagagttcctccattagaagaacaacacgaaatcgtccgccgcgtcgaacaactcttcgcctgggccgacaccattgaaaagcaggttaacaacgccctgaaccgcgtcaacagcctcacccagtcaatcctggcaaaggccttccgcggcgagcttaccgcccagtggcgtgcggaaaacccaagtcttatcagcggtgaaacagcgccgccgccctgctggaaaaaatcaaggccgaacgcgccgccagcggtggtaaaaaaacctcgcgtaaaaaagcctga

SEQ ID NO: 36610 - DNA, 795 bp, Salmonella paratyphi A
atgtttttagtcgactcacactgccatcttgatggtctggattatcaatctttgcataaggacgtggacgatgtgctggcaaaagccgccgcgcgcgatgtgaagttctgtttagcggtggcgacgacgctgccggggtatcgccatatgcgcgagctggtgggcaagcgcgataatgtggtcttttcctgcggcgtgcatccgttaaatcaggatgaagtatatgacgtagaagaactgcgcctccttgctgcagaagacgatgtggtggcgatgggcgaggccgggcttgattacttttacacgcctgagaccaaaatccgccagcaggcgtcttttattcatcatatccagattggccgcgaattgcataaaccggtgattgtccatactcgcgacgcgcgcgccgatacgctggctatcctgcgcgaagaaaaagtgacggattgcggcggcgtactacactgttttacagaagacagagaaacggccggcaacttgttggatctggggttttatatctcattttccggcatcgtaacgttccgtaacgctgagcagttgcgtgatgcggcgcgttatgtgccgctggatcggttattagtcgagaccgattctccttatctggcgccggtgcgcattcgcggtaaagagaacagcctgcatggtacgcgacgtcgcagaatatatggcggtattgaaaggggttgccgttgagactggcgcagatcacacgataactttgctcgctgttcatatgacgcgtctcgcctgtcatcaatccgttaaacgagt

SEQ ID NO: 36611 - DNA, 1006 bp, Salmonella paratyphi A
  misc_feature (598)..(598): n=g, a, t or c
atgaaatggtatccatggttacggcccgcctatgaaaaactggtagaaagttaccaggcgggacgtgggcaccatgcgctactgattcaggccttacctggcatgggcgacgaggcgctgtgctatgcgctgagccgttatctgttatgccagcagcctgagggccacaaaagctgtgggcattgccgtggctgtcagcttatgcaggctggcacgcatccggactattacacgctgacgccggataaaggcaaaagcagcctcggcgtagatgcggtacgcgaggtcagcgagaaattgtacgagcactcccgtctgggcggcgcgaaggtggtgtggattgcggagcggcgctattaaccgacgccgccccaatgcgttgctcaaaacgctggaagagccgccggagcaaacctggtttttccttgccagcccggagcctgctcgtctgttggcgacattacgcagccgctgccggctgcatcatctggcgccgccgtccgaatcgtatgcgatgtcatggctatcgcgagaagtgacggcgtcacaagaagcattgctcacggcgctactgcctgaacgcggggtcgcccgcggnccgctggcgctgttgcagtctgaacgttgggcgcagcgtgaggcgctgtgtcaggcgttgatggacagtttacatacgggcgactggtatgcggtattaacggcgctcaatcatgagcaagccccggcgcgcctgcattggctggcgacgctgctggtagacgcgctgaaacgtcagcacggcgcgtcgtacctgacaaacgttgatgcggacgcggttgttgccgcgctggcggggccgctatccccggcgcgtattcaggcaatcctgaacgatgtttgccattgtcgtgatcaattacttcatgtgaccggattaaaccgcgaactggtattaaccgatctcattctccgcatcgagcattacctgcaaccaggcaccttgttgcctgttcctcatctttgagag

SEQ ID NO: 36612 - DNA, 613 bp, Salmonella paratyphi A
atcgagggcctggaaggcgccggaaaaaccactgcgcgcgacgtggtggtggagacccttgagcaactgggtattcgtaacatgatttttacccgtgagccgggcggtacgcagcttgccgaaaaactacgaagtctggtgctggatattcgatcggtaggcgacgaagtgattaccgataaagcggaagtgctgatgttttatgccgctcgcgtacagctcgtcgaaacggtaatcaagcccgctggcgcaaggcatatgggtgatcggcgatcgccacgatctctcgacccaggcgtatcaggggggagggcgcggcattgatcaaaccatgctggcgacactacgcgatgccgtgctgggcgattttcgccctgacctgacgctgtatctggatgtcacgccggaagtcgggctaaaacgcggcagaggcgcggcgatttggatcgcattgagcaggaatcttttgatttctttaaccggactcgcgcgcgctatctggaactggcggcgcaagactcgcgtatccgcaccattgacgcgacccagccgctggatgccgtcatgcgcacattcgcgccacggtgacgaagtgggtgcaggagcaagcggc

SEQ ID NO: 36613 - DNA, 414 bp, Salmonella paratyphi A
atgttcatgacctgggaatatgcgctaattggattagtcgtcggtatcatcattggtgccgtggccatgcgttttggtaatcgtaagttacgtcaacagcaggcattgcagtacgaactggaaaaaaacaaagctgagctggaagagtaccgtgaagagctggttagccactttgcccgcagcgcggaactgctggataccatggcgcatgattaccgccagctgtatcagcatatggcgaaaagctccagcagcctgctgccggaaatgtctgcggagtcgaatccgttccgtagccgtctggcggagtctgaggcgagcaacgatcaggcgccagtacaaatgccacgtgattattctgaaggcgcgtctggcctgttacgtagcgcgaaagcgcgattaatcgcacgccgt

SEQ ID NO: 36614 - DNA, 1373 bp, Salmonella paratyphi A
atgaaaaaacacacccagctgttaagtgcattagcgttaagtgtcggattaactctttcggcaccgtttccagcccttgcatcgataccaggccaggtgccaggccaggcgacgctgccaagccttgcccctatgctggagaaagtgctgcctgctgtcgtcagcgtaaaagtcgagggaaccgccacccagagccaaaaagtgccggaggagtttaaaaaattctttggcgaggatctgccagaccagccgtcccagccgtttgaaggactcggttcgggggtgattatcgatgccgcgaaaggctatgtattaaccaataatcatgtgattaatcaggcacagaagatcagcattcaactgaatgacggacgcgaattcgacgcgaagctgatcggcggcgacgaccagagcgatatcgctctgttacaaattcagaatcccagcaagttaacgcaaattgccatcgccgattccgacaaactccgcgtcggcgatttcgccgtggcggttggtaatccgtttggccttggacaaaccgccactccgggattatttcagcgctgggacgcagcgggcttaatctggaagggcttgagaactttattcaaaccgatgcctctattaaccgcggcaactccggcggcgcgctgcttaacctgaacggcgagctgatcgggattaataccgcaatcctcgcgccagggggcgggagcatcggcattggctttgctattccttccaatatggcgcagacgctggcgcagcagttgattcagttcggcgaaatcaaacgcggattgctgggaattaaaggcactgaaatgaccgctgatatcgctaaggcattcaaactgaacgttcagcgtggcgcttttgtcagcgaggttttacccaattcaggttcggcgaaggccgggtgaaatccggagacgtgattatcagtcttaacggtaagccgctgaatagctttgccgaactgcgttcacgtatcgccaccaccgaaccgggcacgaaagtgaagctgggcctgctgcgcgatggtaagccgctggaggtggaagtcacgctggattccaatacctcttcttccgccagcgccgaaatgatcgccccggcgttgcaaggcgcgacgttgagcgacggccagctgaaagacgggacgaaaggcgttaaggttgatagcgtcgaaaaaagcagtcctgccgcgcaggccggtttgcaaaaagatgatgttatcatcggcgttaatcgcgatcgcatcagttctatcgccgaaatgcgcaaagtgatggcggcaaaccgtccatcattgctcttcaggtagtacgcggcacgagaacatttatctattgctgcgcaaatctgtctta

SEQ ID NO: 36615 - DNA, 862 bp, Salmonella paratyphi A
aaaatgatttccacgatacagaaaaaggagtctgccatggttgcccctgttcccacgaaacgcgggagaaaacctgccgctaccactgcacccgtaaccgggcaggttcagtctttaactcgcggtctgaagctactggagtggattgccgagtccaacggcagcgtcgcgctgaccgaactggcgcaacaggcgggtttgcctaattccacgactcaccgtctactcaccaccatgcagcaacagggttttgtccgccaggttggtgagctgggccactggccgtaggcgcacacgcgtttatcgtcggtagcagcttcttacagagccgtaatctgctggcgattgtccatccgattttgcgcaagctgatggaggactccggcgaaacggtaaaccttgccgtactcgaccagagcgaccatcaggccattattatcgatcaggtgcagtgtacgcagctgatgcgtatgtccgcgccgatcggcgcaagctgcccatgcacgcctctggcgcgggcaaggcgtttttatcacagctcagtgaggaacaggttaccagtctgctgcaccgcaaggggttgcacgcttatacccatgcgacgctggtgtcgccgctgcatctgaaagatgacctcgcccaaacacgcaagcgcggctattcctttgacgacgaagaacatgcgctcggtctgcgctgcgtggcctcgtgtatttatgacgaacaccgcgaaccgtttgcggccctctctatttccggcccctgctcacgcattaccgacgatcgcgtcaccgaacttggcgccatggtgattaaagcggcgaaagaggtgacgctggcctatggtggaactcgctgaaat

SEQ ID NO: 36616 - DNA, 944 bp, Salmonella paratyphi A
cagtctaacctgtgtctggagattgccctgccgaccaaaccgctgaacgatgtcaacgatgaaaacggcgaaattgcgttgtgtacgctgtctgcattcaacctgggcgccattaaaactctggacgagctggaagaactggctattctggcagtacgcgctttggatgctctgctcgattatcaggattacccgattccggctgccaaacgcggcgcaatgggccgtcgtacgctgggcattggcgtgattaacttcgcctactggctggcgaaaaacggtaagcgttattccgacgcagcgccaataatctgacgcataaaacctttgaagccattcagtactatctgcttaaagcgtccaacgaactggcgaaagagcaaggcgcctgcccatggttcaacgaaaccacctatgcaaaaggcattttgccgatcgacacctacaaaaaagatctggatgcgatcgtcaacgaaccgctgcactacgactgggaacagctgcgtgagtcgatcaaaacccacggtctgcgtaactccacgctatcggcgctaatgccgtcggaaacgtcgtcccagatctccaacgccaccaacggcattgagcgccgcggctacgtcagcatcaaggcctcgaaagacggtattttgcgtcaggtcgtgccggattatgagcatctgaaagacgcttacgaactgttgtgggagatgccgaacaacgacggttatctgcaactggtgggtatcatgcagaagtttatcgatcagtcgatttccgccaataccaactacgatccgtcacgtttcccgtcaggaaaagtgccgatgcagcaactgctgaaagatttgctcaccgcgtataaatttggcgtgaaaactctgtactatcaaaatacccgcgacggcgcggaagatgcgcaggacgatttggcgccttctattcag

SEQ ID NO: 36617 - DNA, 1614 bp, Salmonella paratyphi A
atgcgtatacctttcacccgttggccggatgaatttgcccgccgttatcgtgaaaaaggctactggcaagacgtgccgttgaccgatattctgacccgccacgctgacagcgataagatggcggtcattgaaggcgagcgcgcattcagctatcgccagctaaaccaggccgcggattatctggcctgcagtttacgccgtcaggcatcaaacctggcgaaaccgctctggtgcaactggggaatgtaccggaactgtatatcacctttttcgccctgttgaagcttgggtacgcccgttctggcgctgtttagccatcaacgtaccgaacttaacgcctatgcgatgcagatcgcgccgacgctggtgattgccgatcgccaacatacgctgttcgccggggaggactttctcaacacgtttgtggctgaacaccgctctgtgcgggtggtgttattgcgcaacgacgacggcgatcacagcctggacgcggcgatgcggcaggcggcggaagatttcaccgccacgccatcacctgctgacgaagtggcctactttcagctttccggcggtactaccggcacgccaaagcttattccccgtacccataacgactattactacagcgtgcgccgcagcaatgagatttgcggtttcaacgaggagacgcgttttctgtgcgcgattcccgccgcgcataactacgccatgagttcgccgggcgcgctgggcgtttttctcgccaaaggaacggtagtgctggcgaccgatcctagcgccacgctctgtttcccgctgatcgaaaaacaccagattaatgccacggcgttggtgcgcccgcgtcagtctatggctacaggctatccaggagtggggcggcaatgcgcgtggggctcattaaggttattgcaggttggcggcgcgcggctttctgcgacgcttgccgcccgtattccggctgaaattggctgtcagttgcagcaggtcttcggcatggcggaagggttagtgaactatacccggctggacgatagcccggaacgagttatcaatacccagggaagacccatgtgtccggacgacgaagtgtgggtggcggatgcgacgggaatccactgccgccgggcgagattggtcgtctgatgacgcgcggcccctatacttttcgcggctatttcaacagtccgcaacacaatgccagcgcctttgacgccaacggtttttactgttccggcgatctgatctccattgatcaagacggctatatcaccgttcacgggcgtgaaaaagatcagatcaatcggggcggcgagaagatagccgccgaagagatagaaaacctgttactgcgccacccggcggtgatccatgcggcgctggtcagcatggaagatgaactgctgggggagaaaagttgcgcatatctggtggtaaaagagccgctgcgagccgtacaggtacgccgtttcctgcgagagcaggctggcggaatttaaattaccggatcgcgtggagtgcgttgcgtcactgccactgacgccggttggtaaagtcgataaaaaacaattacgccagcggttggcgtcacgttcaccgctctgaaggagaaagaga

SEQ ID NO: 36618 - DNA, 354 bp, Salmonella paratyphi A
gtggtagtgtggcaacacgatagttatgtgactcaaggagaaggcatgtcgaagacacttttacagatccattttaactttagcggcccttttggcgaggagatgactcagcaactggtcgggctggcggagtctatcaatgaggagccgggcttcatctggaaaatctggacagaaagcgagaaaaaccagcaagctggcggcatttacttgtttgaatccgaagaaacggcgcaggcttatattaaaaaacacactgcgcgtctgaaaaatcttggcgttgatgaggtgacgtttaaattatttggcgtgaacgacgcgctgacgaaaataaatcacggcaacctttgccgc

SEQ ID NO: 36619 - DNA, 1293 bp, Salmonella paratyphi A
  misc_feature (286)..(286): n=g, a, t or c
  misc_feature (588)..(588): n=g, a, t or c
  misc_feature (638)..(638): n=g, a, t or c
actctcacgttgaatacctcgttactctcttcttgccgtattctggctgcctttagcggcggcctggattctacggtgcttctgcatcaactggtgttgtggcgagaacgcatcctgacgtcacgctgcgtgctatccatattcatcacggtttaagccctcatgctgatagctgggtgcggcattgcgaaaccgtatgcgaacctggcaggttccgctggtagtggagcggatgacgctggcagataatggcctgggtatcgaggcccatgcgcgtgaagcgtanccgggcgttcgcacagacgctattgcctggcgaagtgctggcaaccgcgcagcaccttgacgatcagtgtgaaacattcctgctggcgttaaagcgtggcagcggtccggccggactttccgcgatgggagaacgctcgccttttgccggaactctgcttcttcgcccgctgttgagagaaacgcggaagacgctggaacagtgggctgtgcgtcatggcttatgctggattgaagatgaaagcaatcaggatgacgcctacgatcgcaattttttacgcctgcgccccttcccgctcttangcacggcgctggcagcattttccctgcggcggtagcccgtagcgcgactnctgcgccgagcaagaaaggctgctggatgagcttctggccagcgatcttacggactgtatcacggcggagggaacattgcggctctctccattgatgttgatgagcgatgtacggcgggcagcgattttgcgtcgctggctggcgatgcgtaatgcgccgatgccctctcgcgacgcgctggaacgtatctggcaggaagtgcgtggcgcgcgacgatgcctctccctgtttacgctttggcgatcacgagattcgccgttatcagtcgcaactgtggtggattaaatccgtggccggacaacacgaaacgacggtcgtctggcccgtctggcaaacaccgctggcgctgctgccggcttagggacggtacagctcgttcctggcggcgaactgcgccgaccgcgagaggaagaatccgtcagcattcggtttaaagcgccaggcgtattacatattgtcgggcgtaacggtggacgtaagttaaagaaaatctggcaggagcaggggatcccgccctggcgacgagataccacgccgttgttgttttacggcgaaacgctgattgcggctgcgggtgtttttgtgacgcgtgagggagcagcagaagataaagaaggggtgagtctggtttggcatgcctgatggcgctgcgct

SEQ ID NO: 36620 - DNA, 387 bp, Salmonella paratyphi A
atgctgggattaaaacaggttcatcacatcgcgatcattgcgacagactatgcggtgagcaaggcgttttattgcgatattctggggttcgatctgctaagcgaagtctggcgggaagagcgtgactcgtggaagggcgatttggcgctaaacgggcagtatgtgattgagcttttctcttttcccttccctccggcgcgtccaagccgacctgaagcctgtggcctgcgccatctggctttcagcgtggaaaatgtggaaaacgccgttgcgcatctggaaaagcatcaggttaagtgcgaaccgatacgcatcgatccgtataccgggaagcgctttacttttttcaacgatccggacggtttaccgcttgagctgtatgagcag

SEQ ID NO: 36621 - DNA, 1474 bp, Salmonella paratyphi A
ttcatccgtcaggaagatcgcccctggagtgaaaaggaatatgaccgtctgcatacgtttacccaaattgtcggcgtggtcgccgagcaaattcaaaaccgggtaaacaataatgtcgattatgatctgttgtgccgcgaacgcgataacttccgtattctggttgcgattaccaacgccgtcctgtcgcgtctggatattgatgagttggtaagcgaagtcgcaaaagagatccaccactatttcaatatcgacgcgatcagcatcgtgttgcgcagccatcgcaaaaataagctgaatatctactccacccactaccttgatgagcatcatccggcgcacgaacagagcgaagtcgacgaagccggcacgctcacggagcgcgtctttaaaagtaaagagatgctgcttatcaacctcaacgaacgcgatccgcttgccccctacgaacgaatgctgttcgatacctggggcaatcagatccagacgctttgcctgctgccgttgatgtccggcaagacgatgcttggcgtgctcaaactggcccagtgcgaagaaaaagtgtttaccaccgccaacctcaagctgctgcgtcagattgccgaacgggtagccattgccgtggataatgcgctggcctatcaggaaatccaccgtctgaaggaacgcctggtcgacgaaaatctggcgctcacggagcagcttaataacgtcgacagcgagtttggcgagatcatcgggcgcagcgaagcgatgtacaacgtgctaaagcaggttgagatggtgggcagagcgacagtaccgtgctgattctgggcgaaacgggaaccggtaaagagttgattgcccgcgccattcacaacctgagcggacgtagcggacgcaggatggtaaagatgaactgcgccgcgatgccggcggggctgctggaaagcgatttgtttggtcatgagcgcggcgcgtttaccggcgccacgcgcagcggattggccgtttcgagctggcggataaaagctcgctgtttctggatgaagtgggcgacatgccgctggagctacagcctaagctgctgcgcgtccttcaggagcaagagtttgaacgtctcggcagcaataaactgatccagaccgacgtgcggctgatcgccgcgactaaccgcgatctggaaaaaatggtcgccgatcgcgaattccgtaacgatctctactatcggctgaatgtatttccgatccagcttcctccgttacgcgaacgtccggaagatattccactactggtcaaagcgttcaccttcaaaatcgcccccgaatggggcgtaatatcgacagcattcccgctgaaacgtgcgcacgctcagcagcatggaatggccggggaacgttccgagctggagaatgtcgtcgagcgcccgtgcctgacgcgcggcaatgtgctacaacgtcgctgccggatattaccgccgtatacctaccat

SEQ ID NO: 36622 - DNA, 1004 bp, Salmonella paratyphi A
  misc_feature (496)..(496): n=g, a, t or c
  misc_feature (985)..(985): n=g, a, t or c
catgaggccaccttgcaacagccgctgttgcgggctatcgacctgaaaaaacactatccggtgaagaaggggatcttttctccggaacggctggtaaaagcgctggacggcgtgtcgtttaatctcgaacgcggtaaaacgctggccgtagtgggggagtccggttgtggaaaatccacactgggtcgcctgctgacgatgattgaaagccaaccggcggcgagctttattaccaggggcaggatctgctcaaacacgatccgcacgcgcagaaactgcggcggcagaaaattcagattgtgtttcagaacccctacgttccctgaacccacgcaagaaagtggggcaaattctggaagagccgttgctgatcaataccagcctgagtaaagcgcagcgtcgtgaaaaagcgctggcgatgatggcgaaggtggggctgaaaaccgagcactacgaccgctatccgcatatgttctccggcggccagcgtcagaantcgctatcgcccgtggtctgatgcttgatccggacgtagtgattgccgacgaaccggtctccgcgctcgacgtgtcgtgcgcgcccaggtgctgaacctgatgatggatttgcaacaggatatggggctgtcttatgtctttatctcgcacgacctgtcggtggtggaacacatcgccgatgaagtgatggtcatgtacttaggccgctgcgtggagaaagggaccaaagagcagatttttaacaatccacgtcatccctatacccaggcgttgctctccgccacgccgcggctgaatccggacgatcgccgtgagcggattaagctgaccggcgagttgcgagtccgctgaacccgccgccggctgcgcttcaacgcccgctgccgccgtcgcttcggaccctgcacgcagttacagccgcagcttaaagagtacgacggccagttggtggcctgctttgccgtcgatcaggatgaaaacccgcaganaccgttgagttaattgcgg

SEQ ID NO: 36623 - DNA, 3475 bp, Salmonella paratyphi A
cacctgcgggtgcacagcgactactctatgatcgatgggctggcgaagaccggggccgctgctgaaaaaggcggcctcattaggtatgcctgcgctggcgatcaccgattttaccaacctctgcggtctggtgaagttctacggagcgggtcatggcgcggcattaaacccatcgtcggggcggactttaacgttcacaacgaactgctgggagatgagctgactcatctgacggtactggcggcgaataatacgggataccagaacctgacgttgctgatctcgaaagcgtatcagcgcggctacggcgcggcaggcccgattatcgagcgcgactggctggtagagcttaaagatggtttgatcctgctttccggcgggcgcatgggcgacgtaggccgctgtctctacgcggcaaccaggcgctggtggaggagtgcgttgctttctatgaagcgcattttcccgatcgctacttcctggaactgatccgtaccggcagacaggatgaagagacctatctccatgctgcggttgaactggctgaggcacgtggtttgccggttgtcgcgacaaacgatgtccgttttcttgaaagcgatgattttgacgcccatgagattcgtgtcgcgatccacgacggtttcacgctcgacgatcctaaacgtccacgcaattattcaccgcagcagtatatgcgcagtgaagaagaaatgtgcgagctgttctccgatattccggaggcgctggaaaatacggtggagattgccaaacgctgcaacgtaacggtgcgtctgggtgaatatttcctgccgcagttcccgaccggcgatatgaccaccgaagattatctggtcaaaaaatcgaaagaggggctggaagaacgtctggctttcctgtttccggacgaagaagagcgcaaaaagcgtcgcccggaatatgacgagcgtctggatattgaactacaggttatcaaccagatggggttccctggctacttcctcatcgtgatggagtttatccagtggtcaaaagataacggcgtgccggtagggccgggacgtggttccggggccggttcgctggtggcctacgcgctgaaaattaccgaccttgatccgctggaatttgacctgctgttcgaacgtttcctgaacccggaacgtgtctcgatgcctgacttcgacgttgacttctgtatggagaaacgcgaccaggtgattgagcacgtcgcagacatgtacgggcgtgatgcggtatcgcagattatcaccttcggtacgatggcggcgaaagccgttatccgcgatgtgggccgcgtgctggggcatccgtacggttttgtcgatcgtatctcgaagctggtgccgcccgatccgggatgacgctggcaaaagcctttgaagcggaaccgcaactaccggaaatttacgaggcggacgaagaggtcaaagcgctgatcgatatggcgcgtaagctcgaaggtgtcacgcgtaacgccggtaagcacgctggcggcgtggtcatcgcgccgaccaaaattaccgactttgcgccgctatactgcgatgaagagggcaagcatccggttacccagtttgataaaagcgacgtggaatatgccgggctggtgaagttcgacttcctcggtttgcgtacgctgactatcatcaactgggcgctggagatgatcaacaagcggcgggcgaagaatggcgagccaccgctggatatcgccgccattccgctggacgataaaaaaagcttcgacatgctgcaacgctcggaaaccacggcggtcttccagcttgaatcgcgcggtatgaaagacctgatcaagcgtctgcaacctgactgctttgaagatatgatcgcgctggtggccctgttcgtcccggcccgttgcagtcagggatggtagataactttatcgaccgtaagcacggtcgtgaagaactctcttacccggacgttcagtggcagcatgaaagcctgaagccggtactggagccgactacggcatcattctgtatcaggaacaggtgatgcagattgcccaggtactttccgggtatactctcggcggcgcggatatgctgcgtcgtgcgatgggtaagaaaaagccggaggagatggccaaacagcgttccgtttttgaagagggcgcgaaaaagaacggtatcgacggcgaactggcgatgaaaatctttgacctggtggagaaattcgccggttacgggtttaacaaatcgcactccgccgcttatgcgctggtttcttaccagacgctatggctaaaggcgcactatccggctgaatttatgggcggtaatgaccgccgatatggacaacaccgagaaggtcgtcggcctggtggacgagtgctggcggatgggactgaaaattctgccgccggatattaactccggattgtaccatttccacgttaacgatgagggcgagatcgtctacggtatcggcgcgatcaaaggcgtcggcgaggggccgatcgaagcgatcatcgacgcgcgtaatcagggcggctatttccgcgaactgtttgatctgtgcgcgcggaccgacaccaaaaggctcaaccgccggtgctggaaaagctgatcatgtccggggcgttcgaccgcctggggccgcaccgccgcgctgatgaactcattgggcgatgcgctgaaagccgccgaccagcacgccaaagcggaagctatcggtcaggcggatatgttcggcgtactggcggaagagccggagcaaatcgagcaatcctatgccagctgccagccgtggccggagcaggtggtgttagatggggaacgtgaaacgtttggggctgtacctgacgggccaccccatcaatcagtatttaaaagaaattgagcgctatgtcggcggggtaaggctcaaagacatgcatccgacagaacgtggtaaagtcaccacggctgcggggctcgtgatttccgcaagggttatggtcaccaagcgcggcaatcgtatcggcatctgtacgctggatgaccgttccgggcgtctggaagtgatgttatttaccgacgcgctggataaataccagcagttgctggaaaaagaccgcatacttatcgtcagcggacaggtcagctttgatgacttcagcggggggcttaaaatgaccgcccgcgaagtgatggatattgacgaagctcgcgaaaaatacgctcgcgggcttgctatctcgctgacggacaggcaaattgatgaccagcttttaaaccgactccgtcagtctctggaaccccaccgctcggggaccattccagtacatctctactatcagagggcggatcgcgtgcggactgtcgttttggcgcaacgtggcgtgtctctccgagcgatcgtttacttaacgatctgcgtggcctcattggttcggagcaggtggaactggagtttgactaattacagaaatactatgagtctg

SEQ ID NO: 36624 - DNA, 838 bp, Salmonella paratyphi A
ttttgttcaagtgacgagtttacgagcaaaacgatgattaagtggccctggaaagcacaagaaataacccagaacgaagactggccgtgggatgatgcgctagctatacctcttctggtaaacctcaccgcgcaagaacaggctcggcttattgcgctagccgaacgttttttgcagcagaaaagactggtagcgctacagggatttgagctcgactcgttaaaaagtgcacgtattgcgttaattttttgcttaccgatcctggagctcggtattgagtggcttgatggttttcatgaagtgctcatttatcccgcgccctttgtagtagatgatgaatgggaagatgacataggtctggtgcacagccagcgtgtcgtacagtcggggcaaagctggcaacaagggcccatcattctgaactggctggatatccaggactcgttcgatgcttcgggtttcaacctcattattcatgaagtcgcgcacaaactggatatgcgtaatggcgatcgcgcagcggcatccctttcatcccgttgcgcgatgtggctggctgggaacacgatctccacgcggcaatgaataatattcaggatgaaatcgaccttgttggcgaaagcgctgccagtatagatgcctatgccgccaccgaccctgcagaatgttttgccgtgttgtcagagtattttttcagcgcgccagaactgtttgctccacgtttcccggcgctgatggcagcgtttttgcgcagttctatcgccaggatccttctcagcgcttacgggtaagcgctgacgaaggcgactacggcgaggaatccgaacattaattcctc

SEQ ID NO: 36625 - DNA, 1930 bp, Salmonella paratyphi A
  misc_feature (824)..(824): n=g, a, t or c
  misc_feature (1835)..(1835): n=g, a, t or c
atgggtaaaattattggtatcgacctgggtactaccaactcttgtgtagcgattatggatggaacgcaggcacgcgtgctggagaacgccgagggcgatcgcactacgccttctatcattgcttatacccaggatggtgaaactctggttggtcagccggctaaacgtcaggcagtgacaaacccgcaaaacaccctgtttgcgattaaacgcctgattggccgccgcttccaggacgaagaagttcaacgtgacgtttctatcatgccgtacaaaatcatcggcgccgacaacggcgacgcatggcttgatgtgaaaggtcagaaaatggcgccgccgcagatttctgccgaagtgctgaagaaaatgaagaaaacggctgaagattatctgggcgaaccggtaactgaagcggttatcaccgtaccggcttactttaacgatgcgcagcgtcaggctaccaaagatgctggtcgtatcgcggggctggaagttaaacgtatcatcaacgaaccgactgccgcagcgctggcttacggtctggataaagaagtcggcaaccgtactatcgcggtttacgacctcggtggtggtactttcgatatctctattatcgaaatcgacgaagttgatggcgaaaaaacctttgaagttctggcaaccaacggtgatacccacctgggtggtgaagacttcgatacccgcctgatcaactacctcgttgacgagtttaagaaagatcagggcatcgacctgcgtaacgacccgctggcgatgcagcgcctgaaagaagccgcagaaaaagccaaaatcgagctgtcttnctgcgcagcagaccgacgtgaacctgccgtacattaccgcagatgccaccggtccgaaacacatgaacatcaaagtgacccgtgcgaaactggaaagcctggttgaagatctggtgaaccgttctatcgagccgctgaaagtcgcactgcaggacgctggcctgtccgtgtctgatatcaacgacgtgatcctcgtcggcggtcagacccgtatgccaatggtgcagaaaaaagtggctgagttcttcggtaaagagccgcgtaaagacgttaacccggacgaagctgtggctatcggcgcacggtacagggcggcgtattgaccggtgatgtgaaagacgtactgctgctggacgttaccccgctgtctctgggtatcgaaacgatgggtggcgtgatgactccgcttatcaccaaaaacaccaccatcccgaccaagcacagccaggtgttctctactgcggaagacaaccagtctgcggtaaccatccatgtgctgcagggtgagcgtaaacgtgcgtctgataacaaatctctgggtcagttcaacctggatggcatcaacccggcgccgcgcgtatgccgcagatcgaagtcaccttcgatatcgatgctgacggtatcctgcacgtctccgcgaaagataaaaatagcggtaaagagcagaagatcactatcaaggcgtcttctggtctgaacgaggaagaaattcagaaatggttcgcgatgcagaagcgacgctgagatccgaccgtaagttcgaagagctggttcagacccgtaaccaggtgaccatctgctgcacagcacccgtaagcaggttgaagaagcaggcgataaactgccggctgatgacaaaaccgctatcgagtctgcgctgagcgcgctggaaactgccctgaaaggcgaagataaagccgctatcgaagcgaaaatgcaggagctggcgcaggtttcccagaaactgatggaaatcgctcagcagcaacatgcgcagcagcaggctaggcntcctgacgcttctgcaaacaacgcgaaagatgaccgacgttgtcgacgctgagtttgaagaagtaaaagataaaaaataatcgccctttgaacgg

SEQ ID NO: 36626 - DNA, 839 bp, Salmonella paratyphi A
  misc_feature (113)..(113): n=g, a, t or c
  misc_feature (364)..(364): n=g, a, t or c
  misc_feature (364)..(365): n=g, a, t or c
gcaaaaattacccacgtgccgtcgatgtatctttctgaactgccgggaaaaaatcacggttgtcgtcaggcagccattgatgggcatattgaaataggcaagcgttgcgcatnaatgggcgttgacaccattatcgtattcgacacccactgtctggtgaatagcgcttaccacattaattgtgccgaccatttccagggcgtctataccagcaacgaattgccgcactttattcgcgacatgacctatgactatgacggtaatcagagctcgccacctgatcgtcgacgagcagtcaaactgggcgtgcgcgctaaaacgtaacatctcgagtctgaagctggagtatggcacgctggtcganntgcgctacatgaacagcgacaagcacttcaaagtggtctccatctcggcgttctgtactgtgcatgactttgccgacagtcgcagactggtgcgacgattctcaaggcgattgagaaatatgacggtaccgtagcggtattcgccagtggttctctgtcgcaccgttttattgacgaccaacgggggaagaggggatgaacagctacacccgcgagttcgatcatcaaatggacgagcgcgtggtcaagctgtggcgcgaaggcaaattcaaggagttttgcaccatgttgccggagtacgccgactactgctacggcgaaggcaacatgcacgacacggtcatgctgctgggaatgctgggctgggacaaatacgacggcaaggtggagttcatcaccgacctgttcgccagctccggtaccggccaggtgaacgctgttttcccgctgcctgcgtaagggggggttatgccg

SEQ ID NO: 36627 - DNA, 371 bp, Salmonella paratyphi A
cactttattgctgaatgtactgaaaatattcgcgagcaggctgatttaccaagcctgttcagcaaggtaaacgaggcgctggcgccaccgggattttccccatcggcggtatccgcagtcgcgcccactggctggatacctggcagatggctgacggtaagcatgattacgcgtttgtgcatatgacgctgaaaatcggtgccgggcgcactggagagccgtcagaagtcggcgaaatgctgtttgggctgattaaagcccacttcgccgacctgatggagaaccgctatctggcgctgtcgtttgagattgccgagttacatccaacgctcaattacaaacaaaacaacgtacacgcgttatttaaatag

SEQ ID NO: 36628 - DNA, 1266 bp, Salmonella paratyphi A
atggcgtggaatcagcccggtaataacggacaggaccgcgacccgtggggaagcagcaaacctggcagcaactctgggggaaatggaaacaaaggtggccgcgatcagggacctcccgatctggatgatatcttccgtaagctgagtaaaaaactcggtggttttgggggcggtaaaggcaccggttccggcggcggtagctcatcgcaaggcccgcgtccgcaactgggaggccgtattgtcgccatcgccgcggcggcagtagtcattatctgggcggccagcggtttttataccattaaagaagccgagcgtggcgttgtgacgcgttttggtaaattcagccatctggtagagccaggtctgaactggaagccgacatttattgacgacgtcacgccggtgaacgtcgaagcggtgcgcgaactggcggcgtcaggcgtgatgctgacgtctgatgaaaacgtcgtgcgcgttgaaatgaacgtgcaataccgcgtcaccgatccgcagaaatatctgtttagcgtgaccagcccggacgatagcctgcgtcaggccaccgacaggcgctgcgctggcgtcattggtaaatacacgatggatcgcatcctgaccgaaggccgtaccgttattcgtagcgatacccaacgcgagctggaagagactatcaaaccgtacaacatggggattaccctgctggacgtgaacttccaggctgcgcgcccgccggaagaggtgaaagccgccttttgacgacgcgattgccgcacgtgaaaacgagcagcagtacattcgtgaagcggaagcgtataccaacgaagttcagccgcgcgccaacggtcaggcgcagcgtattctggaagaggcacgcgcctataaaacccagactatcctggaagcgcagggtgaagtcgcccggtttgcgaagattttgccggaatataaagccgcgccgcagattacgcgagcgtctgtatattgaaacgatggaaaaagtgctgagccatacccgtaaagtactggttaacgacaagagcggtaatttaatggtgctgccgttagatcagatgctgaaaggcgggaatgcgcggcggcaaagagcgacaatagcgccacgaacctgctgcgcctgccgccgtccacaagtctaacgcagcgacgaagcacacgtcgtcctctatcagggcgatattatggagctgcgccgcgcgaatcgtcgtaaacgactaacagcgtcagggggattacgatgctaagtcagtt

SEQ ID NO: 36629 - DNA, 763 bp, Salmonella paratyphi A
atgaggatttgcagcaacgagccttgcatagtgttattaaccgaaaaagatacatggttacgagtaaatggtaaggagccaatcagtttaaaagcgaatcatatggccattctggcttgtgaaaataacgttattgacatttcatcattaaatagcgtgctagtaatacaagtgagtcgcaataatattaaagactatttacaattcctgaataaagatctctcacaccttcccgtctggcaacgcaacgccgatcccttattgaccgccacctgtctgacgccggatatcttcagggtcgcggccgctacagcgcgatggaaacaccggatgaaattgttagtgaacgcacccgtgcgctccttttcaccgtttatcccgctttcttgaccacaaaaaatttattttcttgttaatgcacatgctgcgcagccgcatcagtgacagcgtttaccatatcattcagagcgatattcataaagactggaatctgagcgccgttgccagctgcctgtgcctgagtccaagcttgttaaagaaaaagctcaaaaacgagaataccagttatagccaaataatcacgacctgccgaatgcgttatgccgtaaaccaattattaatggacggaaagaatatctcgcaagtctcacagctttgtgggtataacagcacgtcgtactttatttccgtgtttaaagagttttatggtatgacccccctgcattatgttagccaacatcgggaacgatcggctgcctaattt

SEQ ID NO: 36630 - DNA, 1294 bp, Salmonella paratyphi A
  misc_feature (853)..(853): n=g, a, t or c
  misc_feature (905)..(905): n=g, a, t or c
aatgccgacgaaaatccgatcaaacctctctctcgcgggtatccggacatcacttcggctgcgaagaaagacgaaatgcctctttcgcctatacgacaacgacgtacgcaaaccgtttgcgatacgccattgcgaacgtacgataattaatgccgatcccacgtgcgcaaacctatattaacgcccgtgacttttttcaacactggcggagattcagttcgaatccgggtatccctacatcatgtttgaagatacggtaaaccgcgcgaatcctattgctggtcgcattaatatgagcaacctgtgctcggaaattttacaggtcaatagcgcctctcgttacgacgataaccttgactatacccacatcgggcatgacatctcctgcaatctcggttcgctgaatatcgctcacgtcatggattcaccggacattggccgtaccgtagaaaccgctattcgcggcctgacggcggtgtcggacatgagccatatacgcagcgtgccctcaatagccgccggtaatgccgcctctcatgccatcggtctgggccagatgaatctgcatggctatctggcgagggaaggtattgcctacggttcgccggaggcgttggatttcaccaatctctatttttacactattacctggcatgccgtgcatacttcaatgcggctggcccgcgaacgccagaaaccttcgccggatttgcgcagtcgcgtatgccagtggcgactattttacgcagtatttacaagacgactggcaaccgaaaacggcgaaagtcagggcgctatttgcccgcagcggcattacgctgcccacacgcgaaatgtggctaaagctgcgcancgatgtgatgcgctatggcatctataaccaaaatttgcaggcggtgcgccgnccggttcgatttcttacattaatcatgcgacctccagcattcatccgattgtggccaaaattgagattcgcaaagagggcaaaaccgggcgtgtgtattaccccgcgccgtttatgaccaatgaaaatctggacatgtatcaggatgcttacgatatcggtccggaaaaaattattgatacctatgccgaggccacgcgccacgtcgatcaagggctgtcgctcaccctgtttttccccgataccgccacgacccgcgatatcaacaaagcgcagatctatgcctggcgaaaaggtattaagtcactgtattacatccggcttcgcagttggcgctggaaggtactgaaattgaaggctgcgtatcctgcgcgctataaggaaagccat

SEQ ID NO: 36631 - DNA, 959 bp, Salmonella paratyphi A
atgaaattatctcgtattagcgccatcaactggaacaagatccaggacgacaaagatctggaggtgtggaaccggctgaccagtaacttctggctgccggaaaaagtgccgttatcgaatgatattccggcctggcagacgctgagcgccgccgaacagcagctcaccattcgcgtgtatacgggtcttacgctgctcgacactatccagaacatcgcaggcgcgccgtcgttaatggcagatgcatcacgccgcatgaagaggccgtactgtcgaacatcagctttatggaagcggtacacgcccgctcttacagttctattttctccacgctgtgccagacgaaagaggttgatgccgcctacgcctagagcgaagaaaacccgccgcttcaggtaaaggcgcagattattttagctcattacgtcagcgatgaaccgctaaagaaaaagattgccagcgtctttttagagtcttttctgttctattccggcttctggctgccgatgtatttctccagccgcggtaagctcacgaacactgccgacctgattcgtttaatcattcgcgatgaagcggttcacggttattatattggctataagtatcagatagcgctacaaaaactatcggcaatcgagcgtgaagagttaaagcttttcgcgctggatttgttgatggaactgtacgacaacgaaatccgctacacagaagcgttatatgcggaaaccggctgggttaacgacgtcaaagccttcttgtgctacaacgccaataaagccttaatgaacctgggttatgaggcgttatttccgccggagatggcagacgtgaatcccgcaatccttgccgcgctctcgccgaatgccgatgaaaaccatgatttcttttccggctcaggttcatcttatgtgatgggaaaaacggtcgaaaccgaagacgaagactggaacttttaa

SEQ ID NO: 36632 - DNA, 645 bp, Salmonella paratyphi A
atgttacaggtataccttgttcgccacggtgaaacgcagtggaacgccgagcgacgtattcagggccaatcggacagtcccctgacggcaaaaggagagcagcaggccatgcaggtaggagaacgcgcccgcagcctcggcatcacccatatcatcagcagcgatttaggccgcacaaaacgcacggcggagattatcgcccaggcgtgcgggtgtgatattacctttgactcccgcctgcgcgagctggatatgggcgtgctggaaaagcgccagatcgattcgctgacggaagaagaagagggctggcgtcgtcagctggtcaacggcacgcaggatggccgcattcctggtggggaatcgatgcaggagttgagcgatcgcgttcatgccgcgctggcgtcctgtctggagctaccgcagggcagccgacctttattagtcagtcacggtatcgcgttgggctgtctggtcagtactatcctgggactacccgcctggcggaacgccggttacgtttgcgcaactgctctatttcccgtatcgattaccaggaaagtcagtggctggcgtctggctgggtggtagaaaccgcagggacgtttcgcatctggacgcccctgcattggatgagctacagcgtta

SEQ ID NO: 36633 - DNA, 897 bp, Salmonella paratyphi A
atgttttcaggacttttaatcattctggttccactgattgtgggctatctcattccactgcgacataaagccgcattacaactcattaaccggctactgagctggatcgtgtaccttattctcttttttatgggaataagcctggcgtttttggataacctcgccagtaatctggtggcgatttttcattattccgccgtcagtattacgattattttattgtgtaatatcgccgccttattgtggctggaacgtatcctcccgtggcgtcaccatcatcagcaggaaaaacttccttcgcgtattgccatggcgctggagtcgctgcaactgtgcggcgtagtggtattggggtttgtcatcggcctgagcggactctctgttttacagcacgccaccgaagccagtgaatatacgctgatctttttattgttcctggtggggattcagctacgaaatagcggcatgaccttaaagcaaattgtgcttaaccgccggggaatgatggtcgcggtcgttgtcgtggcaagctcattactgggcggcgtgattaatgcgtttatcctggacttaccgctaaaaaccgccctggcgatggcgtcaggtttcggctggtactctctttccggtattttgctgacggagtcgtttggaccggttatcggcagcgcggcattttttaacgatctggcccgcgagctcttagccattatgcttattcccggtctggttcgccgcagccgttcaacagcgttgggcctgtgcggagcgacctcaatggactttacgttgccggtattacagcgctccggcggcgtagagattgttccagcggctatcgtacatggctttatcctcagcctgctggtccccctcttaatggcgttcttctcggcc

SEQ ID NO: 36634 - DNA, 632 bp, Salmonella paratyphi A
gctgtcgctgccaacaaacgttcggtaatgacgctgttttctggtcctactgacatctatagccatcaggtccgcattgtgttggctgaaaagggtgttagttttgagatcgaacatgtggaaaaggacaatccacctcaggatctgattgacctcaacccgaatcaaagcgttccgacactggtggatcgtgagctgaccctgtgggaatctcgcatcattatggaatatctgatgagcgtttccctcatccgccgctgatgccggtttatccggtcgcgcgcggtgaaagccgtctgtacatgcaccgtattgaaaaagactggtatacgctgatgaacgtcatcgtaaacgggtctgcttccgaggccgactctgcgcgtaaacaactgcgtgaagagctgactgcgattgcgccggtatttggtcagaaaccgtatttcctgagcgacgaattcagcctggttgattgctacctggcgcctctcctgtggcgtttaccgcagttgggtatcgaattcagcggcgcaggggcgaaagagctgaaaggctatatgacccgcgtctttgaacgtgattctttcctggcttctttaaccgaagctgaacgtgaaatgcgcctcggtcggggt

SEQ ID NO: 36635 - DNA, 390 bp, Salmonella paratyphi A
atggctgaaaatcaatactacggcactggtcgccgcaaaagttccgcagctcgcgtgttcatcaaaccgggcaacggtaaaatcgttatcaaccaacgttctctggaacagtacttcggtcgtgaaactgcccgcatggtagttcgtcagccgctggaactggtcgacatggttgagaaactggatctgtacatcactgttaaaggtggtggtatctctggtcaggctggtgcgatccgtcacggtatcacccgcgctctgatggagtacgacgagtccctgcgtggcgaactgcgtaaagctggcttcgttactcgtgacgctcgtcaggttgaacgtaagaaagtcggcctgcgtaaagcacgtcgtcgtccacagttctccaaacgt

SEQ ID NO: 36636 - DNA, 426 bp, Salmonella paratyphi A
atgaaaacttttacagctaaaccagaaaccgtaaaacgcgactggtatgttgttgacgcgaccggtaaaactctgggccgtctggctactgaactggctcgtcgcctgcgcggtaagcacaaagcggaatacactccgcacgtagataccggtgattacatcatcgttctgaacgctgacaaagttgctgtaaccggcaacaagcgtactgacaaagtgtactatcaccacaccggccacatcggtggtatcaaacaagcgacctttgaagagatgattgcccgccgtcctgagcgtgtgattgaaatcgcggttaaaggcatgctgccaaaaggcccgctgggtcgtgctatgttccgtaaactgaaagtttacgcgggcaacgagcacaaccacgcggcacagcaaccgcaagttcttgacatc

SEQ ID NO: 36637 - DNA, 736 bp, Salmonella paratyphi A
atgagctttgaaggaaagattgcgctggtgactggtgcaagccgtggcataggccgcgcaattgcagagactctcgttgcccgcggcgcgaaagttatcgggactgcgaccagtgaaaatggtgcgaagaacattagcgactatttaggtgctaacgggaaaggtttgatgttgaatgtgaccgatcctgcatctattgaatctgttcttgaaaatattcgcgcagaatttggtgaagtggatatcctggttaataatgccggtatcactcgtgataatctgttgatgcgaatgaaagatgatgagtggaacgatattatcgaaaccaacttagcatccgttttccgcctgtcaaaagcagtaatgcgcgctatgatgaaaaagcgttgtggtcgcattatcactattggttctgtggttggtaccatgggaaatgcaggtcaggcaaactacctgcggcgaaagcgggcctgatcggtttcagtaaatcactggcgcgtgaagttgcgtcccgtggtattactgtcaatgttgtggctccgggttttattgaaacggacatgacgcgtgcgctgtctgacgatcagcgtgcgggtatcctggcgcaggtgcctgcgggtgcctcggcggcgctcaggaaatcgccagtgcggttgcatttttagcctctgacgaagcgagttacatcactggtgagactctgcacgtcaacggcggaatgtacatggtttaatca

SEQ ID NO: 36638 - DNA, 930 bp, Salmonella paratyphi A
atgacgcaatttgcatttgtgttccccggtcagggttctcagagcgttgggatgttggccgaaatggcggcaaattaccctatcgtagaagaaacgtttgctgaagcttctgcggctctgggatatgatctgtgggcgctcacccagcaaggtccagcggaagaactgaataaaacctggcagacgcagccggcgttattaaccgcttccgtcgctctttggcgcgtttggcagcagcagggcggtaaaatgcctgcgttaatggcaggtcacagcctgggcgaatattccgcgctggtttgcgctggcgtcatcaactttgctgatgccgttcgtctggtggaaatgcgtggtaaattcatgcaggaagcggttccggaaggtactggcggcatgtctgcgatcatcgggctggatgatgcctctattgctaaagcctgtgaagaatctgccgaagggcaggttgtttcgccggttaactttaactcgccgggacaggtggttatcgccgggcataaagaggcggtagaacgcgcggcgcagcctgtaaagccgctggcgcgaaacgcgctgccgctgccggtgagcgtaccgtcgcactgcgcgctgatgaaaccagcggcagataagctggcggttgaattagccaaaattacctttagcgcgccaacggtgccggtagtaaacaacgttgacgtgaaatgtgaaaccgatgtcgccgctatccgcgatgcgctggttcgccagttgtacaatccggtacagtggacgaagagcgtgaaatttatcgcggcgcagggcgttgaacatctttatgaagtgggtccaggtaaagtcctcactggtctgacgaaacgtattgtcgacaccctgacagcgtcggcgctgaacgagccggcggcgctgtctgcggcacttacgcaataaaag

SEQ ID NO: 36639 - DNA, 957 bp, Salmonella paratyphi A
atgtatacgaagattattggtactggcagctatctgcccgaacaagtgcggactaacgccgatctggaaaaaatggttgagactctgacgagtggattgtcactcgtacaggtattcgtgaacgccatatcgccgcgccggatgaaactgtcgcgacgatgggctttaccgctgcgaatcgcgcgattgagatggcggggatcgataaagaccaaattggcttgattgtggtggctaccacatcagcaacgcatgcatttccaagcgcggcatgtcagattcaaagtatgctcggtattaaaggttgcccggcgtttgatgtcgcggcagcgtgcgcaggtttcacctacgcgttaagcatcgccgaccagtacgttaaatccggcgcggttaaacacgcgctggtggtcggttccgatgtattagcccgcacttgcgatcctggcgatcgcggtacgatcattattttcggcgatggcgcaggcgcggccgtactgagcgcttctgaagaaccgggtattatctccactcatcttcatgccgatggccgttacggtgaattactgaccctgccgaatgccgatcgcgtaaatccggataacccgatttacctgacgatggcgggcaatgaagtctttaaagtggcggtcactgaactggcgcatattgtcgatgagacgctggcggctaataacctggatcgctcagaactcgattggctggtgccgcatcaggctaacctgcgtatcattagcgcgacagcgaaaaaactcggcatgtcgatggacaatgtcgtcgtcacgctggacaggcacggcaatacctccgcggcttctgtgccgtgcgcgctggatgaagccgtgcgtgacgggcgaattaaagccggtcagctggtattgcttgaagcttcgggggtggattcacctggggtccgcgctgattcgtttctagtataag

SEQ ID NO: 36640 - DNA, 471 bp, Salmonella paratyphi A
atggataaatttcgtgtacaggggccaacgacgctccagggcgaagtcacaatttccggcgccaaaaacgccgcgctgccgatcctgttcgccgctctgctggcagaagaaccggtagagatccaaaacgttccaaaactgaaagacgtggatacgtcgatgaagctcctgagccaattaggcgcgaaagtggaacgcaatggatcggtacacattgacgccagccaggtgaacgtgttctgcgcgccttatgatctggttaagaccatgcgcgcctcgatatgggcgctggggccgctggttgcccgttttggtcagggacaagtctctctgccggggggctgtactattggcgcgcgtccggttgatctgcatattaccggtctggaacaactgggtgcgaccatcaagctggaagagggctacgtaaagggcctcgtcgaagggcgtcttaaaggggcgcatatcgtg

SEQ ID NO: 36641 - DNA, 748 bp, Salmonella paratyphi A
gtggccgttgccgatctgaacaccttcgccgcggcggcggtatgtcgtactcagtctgcggtcagtcagcaaatgcagcgtcttgagcaactcgtgggaaaggaattgttcgcccgccatggccgtaacaaacttttgaccgaacacggtatccagcttctggggtacgccagaaaaatcctgcgttttaatgatgaggcgtgttcatcattaatgttcagtaatcttcagggagtgttaacaatcggcgcttctgatgaatcagctgatactatcctgccttttttgcttagccgaatcagctcggtttatccgaaactcgcgcttgatgtacgggtaaaacgcaacgcctatatggtggacatggttaaatcgcaggaagtagatttggtggtgacgactaaccaacctcattcgctggactgtctgaatttgcggacctcgcccacccattggtattgtgcggctgagtatgttttgcaaaggggagagcccgtaccactagtcctgctggacgatcccagtccattccgcgatatggtgctggagacgctaaatgcagcgggtattccctggcggctggcctatgtggcgtctacattaccggcggtacgcgcggccgttaaagccggtcttggcgtaacggctcgacctgtcgaaatgatgagtcccgaccttcgcgtactgggtgccgcagacggattaccgcctttgccggggggatcctctggagggcgggcggggagct

SEQ ID NO: 36642 - DNA, 1629 bp, Salmonella paratyphi A
atgtcattaatcagtatgcatggcgcatggctgtcgttcagcgacgcgccgcttctcgataacgcagagttgcatatcgaagataacgaacgcgtctgtctggtggggcgtaacggcgccgggaaatccaccttgatgaagatcctcaaccgcgaacagggtctggacgatgggcgtattatttatgaacaggatctgatcgtcgcgcgtctgcaacaggatccgccccgtaatattgcgggcagcgtctatgactttgtcgccgaaggtatcgaagaacaagcggaatacctcaagcgctatcatgagatttcccgtttggtgatgaccgctcccagcgagaaaaacctcaatgaaatggcgcgcgtacaggaacagctcgatcatcataatctgtggcagctggaaaaccgtattaatgaagtgctggcgcagcttggactcgatcctaacgccgcgctgtcgtcgctctccggcggctggctgcgtaaagccgcgctgggtcgggcgctggtcagcaatccgcgcgtattgttactggatgaaccgactaaccatctggatatcgaaactatcgactggctggaagggtttctgaaaacctttaacggaacgattatttttatctctcacgatcgttcgtttattcgtaatatggcgacccgcattgtcgatctcgatcgtggcaaactggttacttatccgggaaattacgatcaatacctgctggagaaagaagaagcgctgcgcgtagaagaattacaaaacgcggaatttgatcgcaaactggcgcaggaagaagtctggattcgccagggtatcaaggcgcgccgcacccgtaatgaagggcgcgtgcgggcgttaaaagcgatgcgtcgtgaacgcagcgagcgccgggaagtgatgggcacggcgaagatgcaggtcgaagaggcggcgcgctccggtaaaatcgtttttgagatggaaaacgtcgattaccaggtagaaggaaaacaactggtaaaagatttctccgctcaggtacagcgcggtgacaagattgcgttaattggcccgaacggctgcggtaaaaccacgctactgaaactgatgctgggacagcttcaggctgacagtgggcgcatccacgtaggaacgaagctggaagtcgcctacttcgatcagcatcgcgccgaactggacccggaaaaaaccgtgatggataaccttgcggaaggcaagcaagaggtgatggtaaacggtaagccgcgccatgtactgggctatttgcaggacttcctgtttcaccccaaacgggcgatgacgcccgtccgcgcgctttccggcggcgaacgtaaccgtctgctgctggcgcgactgttcctcaagccgagcaatcttttaattctcgatgaaccaacgaacgatcttgacgtcgaaacgctggaactattagaagaattaattgatggctatcagggcacggtactactggtcagccacgatcggcaatttgtcgataataccgtgacggaatgctggattttcgagggcggcggcaaaatcggacgttatattggcggctaccatgatgcgcgcgcagcaagagcagcatctggcgacgaaacagccagtggcgaaaaaaaa

SEQ ID NO: 36643 - DNA, 1403 bp, Salmonella paratyphi A
gttaaacgcccggtctcggccagtctggctaaggcttttttctatattgtgctgttgtctattctgtccaccggcagcgcattactgacgctgaccagcagtttacgggatgccgaagcgatcaatatcgccggttcgctacgaatgcagagctatcggctgggttacgatctgcaaagccgtagcccgcagattaatgcgcatcgtcaacttttccagcacgcgctcaactcgccggtactgcaaaatctcaacgcctggtatgtgccgcaggcggtgaaaactcgctacgcgcgcctgcacgccaactggctggagatgaatagccgcctacaggacggcgacattgcctggtatcagaccaatatcaacaattacgtcgatcaaattgatctcttcgttctggcattacagcattacgccgagcgtaaagtcatgctggtcgtcgccatatcgctggcgggcggtatcggcatatttacgctggtcttttttaccctacggcgtattcgccagcaggtcgttcgcccgctgaatcaactggtcaccgccagtcagcgaattgaacatggtcagttcgccccgctgccgctggataccagcttacccaatgagctgggattgttggcgaaaacgtttagtcagatgtcgagcgagctgcataaactttatcgttcgctggaagcctcggtggaagaaaaaacgcacgatctgcacgaagcgcaccgccgcctggaggtgttataccagtgctctcaggcgctgaataccagccaaatcgacgtccactgttttcgccatattttgcaaattgtccgtgaacatgacgccgcctggtatctggagttaaccgtgggcgataactggcggattagcgaaggcacgcaaagccccgacctgccgatgcaaatgctgccagtgacgatgcaggacacggtctatggcgaactccactggcaaagccccaacgttaatgcctctacgccgctgctgaacagcgtctccacgatgctggggcgtggtttgtactttaatcaggcgcaaaaacacttccagcaacttttgttaatggaagagcgcgcgacgattgcccgtgagctacacgattcgctggcgcaggtactttcttatttacgtattcagttaacgcttttgaagcgcgccattccagaagataacgccggcgcgcaaagcatcatggcggatttttccagagcgctgaacgacgcctaccgtcagcttcggaagctactcaccacgttccgtctgacgttacagcaggcccgatttacctccgcattgcatgagatgctggaagatttacagagtcagaccccggccaaactcacgttggatttgcgtttacccacgctggcgctggatgcgaaatgcaggtgcatttg

SEQ ID NO: 36644 - DNA, 740 bp, Salmonella paratyphi A
gatttcgacgcttgccaggcgctggtgaaacaggcatttgatgacgaagaactgaaaacggcgctggggctgaattcggctaattcgattaatatcagcccctgttggcgcaaatttgctactactttgaagccgtggcgcaactgccgcagggggcgcgtaacccactggtgatctccgtacccagcggcaactttggcgatttgacggcaggactgctggcgaagtcgttaggcctaccggtgaaacgctttatcgccgccaccaacattaacaatacggtgccgcgttttctgcatgacgggaagtgggcgccaaaagcgacgcaggcgaccctgtcgaatgcgatggatgtcagccagccgaataactggccgcgtgtggaggagctattccgccgtaaaatctggcgtctgactgagctgggctatgcggcggtggatgattctacgacacaacagacgatgcgcgagctgaaagcgaaaggttatatctcggaacctcatgcggcggtggcgtatcgggcattacgcgaccagttaaaccctggcgagtatggcttgtttctcggaacggcgcatccggcgaagtttaaagaaagcgtggagtccattctgggagaaacgctggcattgctgaagcgctcgccgaacgcgccgatctgccgctgctttcacatcatctgcctgcggattttgccgccctgcgtaacgttaatgatgacccgccagtaaccattg

SEQ ID NO: 36645 - DNA, 657 bp, Salmonella paratyphi A
gtggatgatttattgccggatttaacgctggcgttcaatgaaactttccagatgttgagtatttcaacggtgctggcgattcttggcggtctaccgctcggttttctgatttttgtcaccgatcgtcatctgttctggcagaaccgttttatttatctcgtcgcttcggttctggtgaatattatccgctcggtgccatttgttattttactggtgctgttactgccgctaacgcagcttttgctgggcaatacgataggcccgattgcggcctccgtcccgctgtcggtggccgcaatcgcgttttatgcacgcctggtagatagcgcgctccgtgaagtcgataaagggattattgaggcggcgctggcattcggcgctagtccgatgcgtattatctgtaccgtactgttgccggaagccagcgcagggctgctgcgcggcctgacgattacgctggtaagcttaatcggctactcggcgatggccgggattgtcggcggcggcggggtaggcgacctggcgattcgctatggctactaccgttacgaaaccgaagtgatggttgttaccgtagtggcgctgattgtgctggttcaggtcgttcagatgctgggcgactggctggcaaaacgtgccgacaagcgcgacagacac

SEQ ID NO: 36646 - DNA, 1378 bp, Salmonella paratyphi A
  misc_feature (870)..(870): n=g, a, t or c
  misc_feature (1375)..(1376): n=g, a, t or c
gtgattagcctattcgacatgtttaaggtagggattggtccctcctcttcccacactgttggcccgatgaaggccggtaaacagttcgtcgatgacctggtcgaaaaaggattactggataacgttacccgcgtcgctgtcgatgtctacggctcgctgtcgctgacggggaaaggtcaccataccgatatcgccattattatgggtctggcgggtaatgaacccgctaccgtggatattgatagtatccccggttttattcgcgacgtcgaaacgcgcgagcgtctgttactggcccagggacgtcacgaagtcgacttcccgaaagatgacggaatgcgttttcacaacggcaatttgccgctgcatgaaaacgggatgcagatccacgcctggcatgacgacacggtcatttatagcaagacgtactattccatcggcggcggctttatcgttgatgaagagcatttcggccaggaagcgacgaatgaggttactgtaccttatccgtttaaatcggcgaaagaaatgctggagtattgcaacagtaccggcctttcactctccggcatggtgatgcaaaacgaactggcgctgcatagcaagaaagagattgaagagtatttcggtcacgtctggcagaccatgcaggcctgtattgatcgtggtatgaataccgaaggcgtgctgccggggccgctgcgctaccggtcgcgcctctgcgctgcgtcgtatgctggtttccagcgataagctttccaacgatccgatgaacgtcattgactgggtgaacatgtttgctctggcggtgaacgaagagaacgcgcagtggatcgcgtcgtgacggcgccaaccaacggcgcgtgcgcnatcgtgctgcggtactggcttactacgaccattttattgagtctgtcagcccggatatttacacccgctacttcctggcggcaggcgctattgcgcgctgtataagatgaacgcgtctatttccggcgcgaagtcggctgtcagggcgaagtcggggtcgcctgttcgatggcggcggcagggccttgctgaactgctgggcgccagccccggaacaggtttgcgttgccgctgaaatcggcatggagcataacctggggctgacctgcgacccggttgccggtcaggtgcaggtgccgtgtatcgaacgtaacgccattgcttcggttaaagcgatcaacgctgcgcgtatggccatgcgtcgaaccagcccgcgcgtctcgttggataaagtcatcgaaacgatgtacgagaccggaaaagacatgaacgcaaaataccgcgaaacgtgcgcggcgggttggctattaaagtccagtgtgattaaacgccgtttcccctcccnntt

SEQ ID NO: 36647 - DNA, 1317 bp, Salmonella paratyphi A
gtgcaacagatagcccgctctgtcgccctggcatttaataatctgccccgaccccaccgcgttatgctggggtcacttaccgttctgacactggccgtcgccgtatggcggccctatgtttaccacccagaatccgcaccaatcgttaaaactattgaactggagaaaagcgagattcgttccctcttaccggaggccagcgaacccatcgatcaggccgcgcaggaagatgaagctattcctcaggatgagctggacgataaaaccgcaggcgaagtcggcgtccatgaatacgtcgtctccacaggcgatacgttaagcagcattttgaatcagtacggcatcgatatgagcgatattagccgacttgccgcttctgataaggagctgcgcaatctgaaaattggccaacagctttcctggacactgaccgccgatggcgatttacagcgtctgacatgggaagtctcccgccgtgaaacgcgtacctacgatcgcactgccaacggttttaaaatgagcagtgaaatgcagcagggggactgggtcaacagtctgctgaaaggtacggtagggggtagctttgtcgccagcgcgaaagaggccggtttaaccagcagcgaaatcagcgcagtgataaaagccatgcagtggcagatggattttcgcaagctgaaaaagggcgatgaattttcggttctgatgtcgcgcgagatgctggatggcaagcgtgaacagagtcagttgttgggcgtgcggatgcgttccgatggtaaagattactacgccattcgcgctgctgacggtaaattctatgaccgtaacggtgttggcctggcgaaaggctttttacgcttcccgaccgccaaacagttccgcatctcctccaacttcaatccgcgtcgtctgaacccggttaccggacgcgttgcgccgcatcgtggcgttgactttgcgatgccgcagggtacgccggtgctgtcggtgggggatggcgaggtcgtggtcgctaaacgtagcggcgctgccggttactacattgcgattcgtcatggacgcacctacaccacacgttacatgcacttgcgtaagctgctggtgaaaccggggcaaaaagtgaaacgtggcgatcgtattgcgctttctggtaacaccgggcgttccacagggccgcatctgcattatgaagtatggataaaccagcaagccgttaaccctctaacagcaaaattgccgcgcacggaaggtctgacggggtcagatcgtcgtgaatacctggcacaggtgaaagaggttctgccacaactgcgcttcgat

SEQ ID NO: 36648 - DNA, 553 bp, Salmonella paratyphi A
cgtgcggaagtgatggacgtagcgaacgccgtcctggatggcacggatgcagttatgctgtctgccgaaaccgcagccggtcagtatccttctgaaaccgttgccgcaatggcacgcgtctgcctgggcgcagaaaaaatacccagcatcaatgtgtctaaacaccgtctcgacgtgcagttcgacaacgttgaagaagctattgccatgtctgcgatgtatgcggcaaaccatctgaaagtcgttaccgcgatcatcaccatgacggaatccggtcgtaccgcgctaatgacttcccgtatcagctccggcctgccgattttcgccatgtcgcgccatgaacgcacgctgaacctgacgcgctctaccgcggagtaacgccagtgcattttgatagcgcggctgatggcgttgtcgcggcgcatgaagctgttaatccgtgcgcgataaagggtatctggtttccggcgacctggttatcgtgactcagggcgatgtcatgagcaccgtcggttcaaccaataccacgcgtattttgaccgttgagtaaaac

SEQ ID NO: 36649 - DNA, 417 bp, Salmonella paratyphi A
ctgctgtcattttcaagcaacggcagcccgtcaccccaatgttgccaacgtgcagcaggcgacagagctcgctcgcgaacgtgcgccgcaactgcttgtggacggtgaattgcagtttgacgccgcttttgtaccggaggtcgccgcgcaaaaagcgcctgacagcccgctgcaaggccgcgccaacgtgatgattttcccgtcgctggaggcgggcaatattggctacaaaatcgctcagcgtctgggaggctatcgcgctgttgggccactaattcaggggcttgcgcgccgcttcacgacctctcccgaggctgtagcgtgcaggaaattatcgaactggcgttggtggcagccgtgccgcgccaggctgacgtgagccgcgaacgcagcttacacacactggttgaatgaacg

SEQ ID NO: 36650 - DNA, 222 bp, Salmonella paratyphi A
atgtctcaaactatcgacctgaccctggacggtttgtcctgcggtcattgcgttaaacgcgtgacagacagccttgaacaacgtccggatgttgagctggcggacgttaccgtaaccgaagcgcacgttaccggtaccgccagtgcgaccgcgttaattgacaccatcaaacaagccgagtatggcgcgacattaagccagccaaaggctaaacggctgacg

SEQ ID NO: 36651 - DNA, 1109 bp, Salmonella paratyphi A
  misc_feature (885)..(885): n=g, a, t or c
  misc_feature (890)..(892): n=g, a, t or c
  misc_feature (906)..(906): n=g, a, t or c
  misc_feature (912)..(913): n=g, a, t or c
ggcgtcaaagaactgcgcagtctgctgggcgacaaagcgatgctggcgctgatcgtcttcgcctttacgatttcggtttactcctctgctaccgtcctgcccggttcgttgcatcttgcccctatcgccatcgccgatatggatcagtcgcagttgtcgaaccgtattgtgaatagtttttaccgcccgtggtttctgccgccggagatgattacggcaacggaaatggatgccggactggatgccggacgctatacctttgcggtcaatattccgccgaatttccagcgtgatgtgctggccggacgtcagcctgatattcaggttaacgtcgatgcgacgcgcatgagccaggcgtttaccggcaacagttatatccagaatattattagcggcgaggtcaacagctttgtggcgcgcgcggggagataacgttcagccggtgtcgctggagattcggatgcgctttaacccgaatctcgacccggcgtggtttggcggcgtgatggcgattatcaacaacattaccatgctggcgatagtgctgaccgggtcggcgctgatccgcgagcgagaacacggcacggtagagcatctgttagtgatgccggtcacgccctttgagatcatgatggcgaaagtgtggtcgatggggctggtcgtgctggtggtttccggtttgtctttgatgctgatggtgaaaggcgtacttggcgtacgtgaaggatcgatcccattgtttatgttgggcgtggcgctgagctgctcgccaccatttcaattgggatttttatgggcacatcgcccgttcgatgccgcagctggggttattaatgattctggtgctgttgccgctacaaatgctctccggcggttccacgccgncgaannnagtatgccgcaggntgtcannggatattatgctgaccatgccgacgacgcattttgtcagccttgcccaggctattctttatcgcggcgaggtttgagtatcgtctggccgcagttcctgaccctgctggcgaataggcggcgtgttcttcctgatagcgctgttacgcttcagaaaaacgattggcacaatggcgtaaacattattgccggatcgg

SEQ ID NO: 36652 - DNA, 312 bp, Salmonella paratyphi A
  misc_feature (242)..(242): n=g, a, t or c
gtgcgcgaagcctttgtgatgcaggtaaatgccgacgcgcacgaggagtatcagcgtcgtcataacccaatctggccggagctggaaccgtattaaaatctcacggcgcgcatcactacgcgatttatctcgatcaggagcgcaatctgctgttcgccacccgttgagattgaatccgaggagcgctggaacgccgttgccagcaccgacgtttgccagcgttggtggaaacatatgcgtgnacgttatgccgcgaatccggataacagcccggtcagcgcagagctaaaagaggtgttctatctgcagtaa

SEQ ID NO: 36653 - DNA, 1190 bp, Salmonella paratyphi A
gaagcctacaaattcagactggaaccaacgcctgaacagtcgcagcgtttgcggcagttatgtggttgcgcccgttttgtctggaattaggtcttgcggagacaaagcgcatccttggttcaggcgaaaagttacttcggctttcgagttgaacaggatgcttacagtgtggaaaaaaatgccgggacacatctttttacaggatgcttataccgacaatctgcaacaaaagttgaaagacctgcatactgcatggaaacgttgctttgataaaaagctcgcagctaaggccccggtatggaaacgaaaaaatgagggcagagactcaatccgttttgtgaactttgagaaatattgccgccttgaaaatcgcagagtgaagctaccgtcaggtcttgggtgggtaaaattccggcaatctcaacgtgtgaacggtaaaatcaaaaatgcgacaatcagtcagttagcgggacagtggtatatctcgtttcaggttgaagttgaaacggcagaacccaatcacacaagcacaacgatagtcggtctggacgcaggagtaacaaaactcgccacgctttcagacggtacggtataccaaccagtcaacagttttaaagcaagtcagcgcaagctggcaacactccagcggcagttaagccgtaaagtcagattcagcagtaactggcagaaacaaaagcgaaaagtccagcatctgcactcgcacatagccaatatccggcgcgactaccttcataaagttaccagtgaaatcagcaaaaaccacgcgatgatagtcattgaggatttgaaggttagtaacatgtcgaaatcggcaaaaggtacagcagaacagcacggacgaaacgtcaaggccaaatcaggtctgaaccgttcgatactggatcagggctggtatgaaatgcgccgccagcttgagtacaaacagctctggcgtggcggtcaggtgcttgcggttccgccagcatatacaagccagcgttgcgcgtgctgtggtcataccgcgaaagaaaatcgcctgtcacaaagtaaatttgtgtgtcaggcatgcggatatacagcgaacgctgatgtaaacggcgctcgtaacattttagcggcggggcacgccgttcttgcctgtggagggatggtgcagtcaggccgcccgtctgaaacaggaaccagacgct

SEQ ID NO: 36654 - DNA, 1415 bp, Salmonella paratyphi A
gaattcgaaaccacttttgcagatctggggctgaaggctcctatccttgaagcccttaccgatctgggttacgaaaaaccatctccaatccaggcagagtgcattccgcatctgctgggcggtcgcgacgtgctgggcatggccagaccggtagcggcaaaaccgcagcgttctctttaccgctgctcaacaatcttgatcctgagctgaagccacctcagattctggtgctggcgcaacccgcgaactggcgtacaggttgccgaagccatgacggatttctctaaacacatgcgcgcgtaaacgtggttgccctgtacggcggtcagcgttatgacgtgcagttacgcgccctgcgtcaggggccgcagatcgttgtcggtacgccgggacgtctgcttgatcacttaaaacgcggcaccctcgacctctctaaactgagtggtctggtgctggatgaagccgacgaaatgctgcgtatgggcttcatcgaagacgttgaaactattatggcgcagatcccggaaggtcatcagaccgctctgttctccgccaccatgccggaagcgattcgtcgcattacccgccgctttatgaaagagccgcaggaagtgcgcattcagtccagcgtgactacccgtcctgacatcagccagagctactggactgtctggggtatgcgtaaaaacgaagcgctggtgcgtttcctggaagcggaagactttgatgcggcgattatcttcgtacgtaccaaaaacgcgaccctggaagtagcagaagcgctggaacgtagcggctacaacagcgccgcgttgaatggcgatatgaaccaggcgctgcgtgagcagactctggaacgcctgaaagatggtcgtctggacatcctgatcgccaccgatgttgcggcacgtggtctggacgttgaacgtatcagcctggtggtgaactacgatattccgatggactccgagtcctacgttcaccgtatcggtcgtaccggtcgtgcgggtcgcgccggtcgcgcctgctgttcgttgagaaccgcgagcgtcgtctgctgcgcaacatcgaacgcaccatgaagctgaccattccagaagtggaactgccgaacgcagaactgctgggtaaacgccgtctggaaaaattcgccgcgaaagttcagcagcaactggaaagcagcgatctggatcagtaccgtgcgctgctggcgaaaatccagccgtctgccgaagtgaagagctggatctcgaaacgctggccgccgcactgctgaaaatggcgcagggatcgtccgctgattctgccgccggatgcccgatgctcctaagcgtgaattccgtgaccgtgacgaccgtggtccgcgcgatcgtaatgaccgtggcccgcgtgcgatcgtgaaaacgtccccttgt

SEQ ID NO: 36655 - DNA, 1301 bp, Salmonella paratyphi A
gctcaggttgacgtaatcaaatccgaaaccatcgagcagcttattgcagaagatgaaactctgatgctaaacgagctgggtgaaatcctgcacgccatcgagaaaaacgtggtacgtagccgcgtactggcaggcgagccgcgtattgatgcccgtgaaaaagacatgatccgtggtctgaacgtgcgcactggcgtactgccgcgaactcacggttccgctctgtttacccgtggtgaaacgcaggcgctggttaccgcgactctgggtactgcccgtgacgcgcaggtgcttgatgaactgatgggcgagcgcactgacagcttcctgttccactacaacttccctccgtactccgtaggcgaaaccggcatggtcggttctccgaagcgtcgtgaaattggtcacggtcgtctggcgaagcgcggcgtgctggcagtgatgccggacatggataaattcccgtacaccgttcgcgtggtgtctgaaatcaccgaatccaacggttcttcttctatggcttccgtgtgcggcgcttctctggcgctgatggacgctggcgtgccaattaaagccgccgtagcaggtatcgctatgggtctggtgaaagaaggcgacaactacgttgtactgtctgacattctgggcgacgaagatcacctgggcgatatggacttcaaagtggcggttcccgcgacggtatctctgcgctgcagatggatatcaaaattgaaggtatcaccaaagagatcatgcaggttgcgttgaaccaggctaaaggtgcgcgtctgcacatcctgggcgtgatggaacaggcgatcaacgcgcggcgcgatattctctgaatttgcgccggtatccataccatcaagatcagcacggacaagatcaaagacgtgatcggtagaggcggttctgtgatccgcgcgctgactgaagagaccggcatcaccatcgaattgagatgacgtacttgagatcgcgcgacgacgtgaaaacgaaatacgctatcgtcgtatcgagagatcacgcagagatcgagtcggccttctacaatgtaaatgaccgtatcgtgactttgcgcgtttgttgcatcggcggcgtaaagaaggtctggtcacatctctcaaatcgcggataagcgtgtagagaaagtgaccgattatctgcagatgggtcaggaagtcccggttaaggttctggaagttgaccgccagggccgtgtacgtctgagcattaaagaagcaaccgagcagtctcaacctgcggctgtcgcggaagctccggcgagcgaacaggcc

SEQ ID NO: 36656 - DNA, 2493 bp, Salmonella paratyphi A
  misc_feature (1368)..(1368): n=g, a, t or c
atgctacaatgcggcgcaaagaaagttaaccccgtggagccgtttgtgacgtcattgcccgttgccgccgtattgcctgaattgttgacagccctaaaaaccgcgccgcaggttttgttgtccgcgcctaccggggcggggaaatccacctggctgccgttgcaactcctgcaacaggggccagttgctggaaaaatccttctgcttgaaccgcgtcgtctggcggcgcgtaatgtccgcagcgtctggcggaagcgttgaatgaaaagcctggcgaaacggtaggttaccggatgcgcgcgcaaagctgcgtggggccgcgtacccggctggaagtggtgacagaaggcgtattgaccagaatgattcagcgcgatcccgaattacgcggcgtggggctggtgatactggatgaatttcatgagcgcagtttacaggcggatttagcgttggcgctgttgctggatatccagcaagggctccgtgacgatctcaggctgttaatcatgtctgcgacgctggataacgacaggctttgtcagcgactgcctgatgcgccgacgatcgtctcggaggggcgcgcgttcccggtggagcgacgttatcagccgctcgcgacgcatttgcgttttgatgaagccatcgcgatggcgacagcggaactgttgcgcaatgaaaacggttcgctgctgctatttttacccggcgtaggtgaaatacagcgcgttcatgaacatctggcgtcgcgggtaggcagcgatgtcctgctttgtccgctgtatggcgcattgtctttggaggcgcaacgcaaagcaattgttcccgccccgccgggatgcgtaaagtggtgttggcgactaaccttgccgaaaccagtttgacgattgaagggattcgtctggtcgtcgatacggctcaggacgcgtggccgattcgacgcgcgaacgggactgacgcggctggttacgcagcgtatcagtcaggcgtcaatgacgcgcgggggcgcgccggacgactggcgccggggatctgtttacatctgctggccaaagaacaggcggagcgggcggcgggcaaagcgatccggaaatcttacacagcgacctctccggtttgttgatggaagtgttgcagtggggatgtcacgatccggcatcgcttttctggctggacaggccgccggaagtgaatcttcaggccgcccgccgtttattattggtgttaggcgcgctggagggcgagcgattaagcgcgcgggggcagaaaatggcggcaatgggtaacgatccgcgcctggcggcaatgttagtcaacgccggcgaggggatagcgccgccactgcgccatgctcgcggccatccttgaggnaaccgcggcggcggtacggatttaagcgtagtattttcgcgcgacagccgggctggcagcagcgtagccagcagcttttaaaacggctgcaggtgcgtaatggcgagccggaatagcacggcttattatgccgctgtttgccagagcgttttaagccgaccaatccgcggcgtcgcggtcaggaaggcgctatcagttagccaatggtatgggcgcgatgttagatgtggatgacgcgttgggacgtcatgaatggctgaatgcggccctgttgctgcaaggtagcgcctcgccggacgcccgaatattgttggcgcagccgctggatattgcctcgctgattcaggcgtgtcctgatttactgcgccagtctgacacggttgaatgggacgaggcgcagggaacgttgaaagcgtggcgcagaatgcgtattggacagttgacggttaacgttcagccactgcgaagccgtctgaagaggagcttcatcaggcgatgctgaacggcatccgcgataaaggcctgtccgtccttaactggacgccggaagcggagcagttccgtctgcgtctgcactgcgcggcgaaatggctgccggaatatgactggcctgccgtggatgaggcgtcgctgctggcgactttggaaaactggttgctgccgcacatgacaggcgtacagtcgttacggagtctgaaatctctgaatgtgactcaggcattacggggactgcttgactatcccctgctgcaacgtctggatagtgaactgcctgggcattacactgtgccgacgggaagccgaataacgattcgttatcatgaagataacccgcccgcactggcggtcagaatgcaggaaatgttcggcgaggcaagtacgccgacgcttgcgcaggggcgagtgccgctggtgctggaactgctttcgccagcgcagcgaccgctacagattacgcgcgatttaagcgctttctggcagggggcgtatcgcgaagtgcaaaaagagatgaagggtcgttaccccaaacatgtctggccggacgatccgcgatatacggccccaacgcggcgcacgaagaagtattcgtgacgtgttatacgttgcctccaggccggataaggc

SEQ ID NO: 36657 - DNA, 2235 bp, Salmonella paratyphi A
  misc_feature (1638)..(1638): n=g, a, t or c
acgcctgcacccatcagcgatgacgcctgtttacaggagcagtcaggataaccatgctgccggctatctgccaggatggtaaagtctactgttacgccacgctgaatatcagctccgggcgctttcgtctgagcgaaccggccgaccgtgaaacgatggccgcagagctgcagcgcaccaatcccgccgaactgttgtatgccgaagattttgctgaaatggcgttaatagagggacgccggggtctgcgccgtcgcccgttgtgggagtttgagattgataccgcccgccagcagttaaatctgcagttcggtacgcgggatctggtcggtttcggcgtcgaaaatgcctcgcgtggattatgtgcggcaggctgcctgttacagtacgtaaaagatacccagcgcacctccctgccgcatattcgttccattacgatggaacgccagcaggacagcatcattatggatgccgcgacccgccgcaatctggaaattacccaaaacctggccggtggtgtcgaaaataccctcgccgcggtgcttgactgtaccgtgacgccaatgggtagccgaatgcttaaacgctggctgcatatgccggtacgaaataccgacatattgcgtgaacgccagcagaccatcggcgccttgcaggacaccgtcagcgaactgcaaccggtgctgcgtcaggtcggcgatctggagcgtatccttgcgcgtctggcgctgcgcaccgcggtccgcgcgatctcgcccgaatgcgtcacgcctttcagcaactgccggaattgcacgctcagcttgaaaccgttggcagcgcgccggtacaggcgttgcgtaaaaaaatgggcgatttcgccgaactgcgcgacctcctggaacgcgccattattgacgcgccgccggtactggtccgcgacggcggcgttattgcgcccggctaccatgaagagctggacgaatggcgcgcgctggcggatggcgccaccgattatctcgatcgtctggaaattcgcgaacgcgagcgtaccgggctggatacgctgaaagtcggctataacgcggtacatggttattacattcagattagccgtggtcaaagccatctggcgcccatcaattatgtgcgtcgccagacgctgaaaaatgccgaacgctacattattcctgagctaaaagagtacgaagataaagttctgacctcgaaaggcaaagcgtggcgctggaaaaacagctatatgacgaattgtttgatctgctgttgccgcatctggccgatttacagcagagcccaacgcgctggcggagctggatgtgctggttaacctggccgaacgcgcctggacgctgaattacacctgcccgacatttaccgataaacccggtatccgtattaccgaaggtcgccacccggtggttgaacaggtactgaatgagccgtttatcgctaacccgctcaacctgtcgccgcagcgccggatgttgatcattaccggccccaatatgggcggtaaaagtacctatatgcggcaaacggcattgatcgccctgctggcctatatcggcagttacgttccggcgcaaaacgtggaaatcggccccatcgaccgtatttttacccgcgtcgggcagggantgacctggcctccgggcgttcgacctttatggtggagatgaccgaaaccgcgaacattctgcataatgccacggaaaacagtctggtattgatggatgaaatcgggcgcggtacctccacgtatgacgggctgtcgttggcctgggctgcgcggagaatctcgcgaataagattaaagcgttaacgctgttcgctacccactacttcgagctgacccaattaccggagaaaatggaaggcgtggcgaacgtccacctggatgcgctggaacacggcgatactatcgcgtttatgcacagcgtcgaggacggcgcggcaagtaagagctatggcctggcggtcgcggcgcttggggccgtccctaaagaagtcaacaaacgcgcgcgccaaaaactccgcgagctggaaagcatctcacccaatgcggcggcaaccgaggtggacggcacgcaaatgtcgttgcttgccgccccggaggagacatcgcctgccgttgaagcgctggagaatctcgatccggactccctgacgccacgccaggcgctggagtggatctatcggctgaaaagtctggtgtaaacgtgtcgggcccgatag

SEQ ID NO: 36658 - DNA, 648 bp, Salmonella paratyphi A
atgctcaccctgaccgacggacttcctgagacgatgaacttcaacactgttttccgctggcatttgcacttcctgtttttgatcctgttaactttccgtgccgccgccgcgacaccttattaattctgggcgatagcctcagcgccggttaccgtatggccgccagcgcgatggccgtcgctccttaatgataaatggcaaaacaaaacgtcggtcgttaatgccagtataagcggtgatacctcgcagcagggactggcgcgtttgccggcgctgttgcaacagcatcacccgcgctgggtagtggtggaacttggcggcaacgatggcctacgcggttttgcgcctgcgcaaaccgaacagacgctacgtaaaatcattcagacggtgaaagccgccgatgcccaaccgttactgatgcaaattcatctgcccgctaactacggtcgccgttataatgaatcctttagcgccatttatcctaagctcgccaaagagttcgatattcctctgttaccgttttttatggaagaggtatatctgaaaccacagtggatgcaggatgacggtattcatcccaaccgcgacgcccagccgtttattgccgactggatggcgaagcagttgaccccttttctctcctgaatc

SEQ ID NO: 36659 - DNA, 616 bp, Salmonella paratyphi A
gagctttccatccttaccggagttgaactggttgtcaaacgcggtgaaaccattgcgctgattggcgaatcaggatcgggaaaatctacgctgctggcgattctcgccggactggatgacggcagtagcggagaggtcagtctggtcgggaaaccgcttcaccagatggacgaagaggcgcgggcgcacgttcgcgctcagcatgtcggttttgtttttcaatccttcatgcttattcctacgcttaacgcgctggaaaacgttgagctaccggcctcgtacgcggtgaaaacagcggtcagagtaaggcgggggcgaaagcgctgctcgaacaactgggactgggaaaacggcttgaccacttccggcacagctttccggcggcgaacaagcagcgcgtctgtggcgcgcgcgtttaacgggcgtcctgatgtgctgtttgccgatgagccgacgggcaaccttgaccgtcagaccggagataaaatcgccgacctgctattttcgcttaaccgcgagcacggcaccacgctgattctggtgacgcacgacccgggctggcggcgcgctgcgaccggcggctgcggttggtcaacggtcagttacaggaggaggc

SEQ ID NO: 36660 - DNA, 661 bp, Salmonella paratyphi A
atgttgcggattatagacacggaaacctgcgggctgcagggcgggatcgtagagatagcctctgtagatgtcattgatggcaacattgtcaatcccatgagtcacctgatacgccccgatcgccttattacgccgcaggcgatggcgatacaccgtattaccgaagccatggtcgccgataagccgtggattgaagatgtcataccgctttattacggtagtgagtggtatgtcgctcacaatgccagtttcgacagacgcgtattacctgaattgccgggtgagtggatctgtaccatgaagttgtcgcgacgcctgtggccgggaataaaatacagcaatatggcgctctataaatcgcgcaaactaagcgtacaacacgccgccggggctgcaccatcaccgggcgctttatgattgctatatcaccgccgccttgctgattgatattatgcgaaccaccggctggaccgcggaagagatggtcaatatcacgggccgtcctgcgctgttaaccactttcccgttcggtaaataccgcggtaaggcggtatctgaagtcgcaaaacgcgatccgggctatttacgctggctttttaataaccttgataatatgagcccggaacttcgcctgacgcttaaacactacctggaagatgtt

SEQ ID NO: 36661 - DNA, 1128 bp, Salmonella paratyphi A
atgtcagtattccagagctttgggcccagcgagtctaatggccgtaaggtggattactctaccttcctgcaagaggtcaatcaggaccaggttgcgaagcgcgtatcaacggacgtgagatcaacgttaccaagaaagatagtaaccgttacacgacttacattccgattaatgatccgaagctgcttgataacctgctgactaaaaacgtcaaggttgttggcgaaccacctgaagagccaagcctgctggcttctatcttcatttcctggttcccgatgctgttgctgatcggcgtctggatcttcttcatgcgtcagatgcagggcggcggtggcaaaggcgccatgtcgttcggtaagagcaaggcgcgtatgctgacggaagatcagatcaaaaccacgtttgctgacgtcgcgggttgtgacgaagcgaaagaagaagtggcggaactggtcgaatacctgcgtgaaccgagccgtttccagaagctgggcggtaaaattccgaaaggcgtcctgatggtcggccccgcgggtaccggtaaaaccctgctgcaaaagccattgcgggtgaagcgaaggtgccgttctttacgatttccggttctgactttgtggaaatgttcgtcggtgtcggcgcgtctcgtgtgcgtgacatgttcgaacaggccaagaaagcggcgccgtgcattatcttcatcgatgaaatcgacgccgtaggccgccagcgtggcgcaggtctgggcggcggtcacgatgaacgtgagcagacgttgaaccagatgctggttgagatggacggcttcgaaggtaacgaaggtatcatcgtcatcgctgcaactaaccgtccggacgttctggacccggcctgctgcgtcctggccgttttgaccgtcaggtggtggtaggctgccggatgtgcgcggtcgtgaacagattctgaaggtgcatatgcgtcgcgtaccgttagcgacggatattgatgcggcgatcattgcgcgcggtacgccgggcttctccggtgctgacctggcgaacctggtcaacgaagcggcgctgtttgcagctcgtggtaacaagcgcgttgtgtcgatggttgagttcgagaaagcgaaagacaaaatca

SEQ ID NO: 36662 - DNA, 1438 bp, Salmonella paratyphi A
  misc_feature (749)..(750): n=g, a, t or c
  misc_feature (759)..(759): n=g, a, t or c
atgcgattttccagatttatcatcggattgaccaccagtatagcgttcagcgttcaggccgcgaatattgacgaatacatcaaacagcttccggccggcgccaacctcgcgctgatggtgcaaaagattggcgcgcccgccggctattgattatcatagtcagcagatggcgcttcccgccagtacccaaaaggtgattaccgcgctggcggcgctgattcaactcggcccggatttccgttttacgaccacgctggagactaaaggcaacgtcgataacggcatcctgaaaggtgacgtaattgcgcgcttcggtggcgatccaacgctaaaacgtcaggatattcgcaatatggtcgcgacgctgaaaaagtccggcgtcacgcaaatcgacggcaatgtgcttatcgacacgtcgattttcgccagccacgataaagcgccaggctggccgtggaacgacctgacgcagtgtttcaagcgcgcctcccgccgccgccattgttgaccgcaactgtttttctgtgtcgctttatagcgcgcaaaaaccaaacgatttagcctttattcgcgtggcctcttattatccggtaacgatgttcagccaggtacggactctaccgcgcggttcggcagacgcgcagtattgcgagctggatgttgtgcctggcgatttgaaccgttatacgcttaccggctgtttaccacagcgcgccgacccgctgccgctggcctttgctattcagganncgggccagntagcgggcgcgatcctcaagcaggaactgaaagaggccgagataacttaccgcggcacgctgtgcgccagacgcaggttaacgagcccggaacgatcgtcgccagtaaacagtcggcgccactgcacgatctgcttaagattatgctgaaaaagtcagacaacataatcgccgatactgtttttcggatgattggtcatgtcaggtttaacgtgcctggcacctggcgggcgggatcggatgccgttcgccagatcctgcgccaacaggcgggaattgatatcggcaataccattattgccgacggttccggtctttctcgccataatctgatcgctcccgccacgatgatgcaggtgctgcaatatatcgcccaacacgataacgagctgaactttatctctatgctgccgctggcgggctatgatggttcattacaataccgcgccgggctgcatcaggcgggcgtagacggtaaggtttcagcgaaaaccgggtcactgcagggcgtgtataatctggcgggctttattaccaccgcaagcgggcaacggatggcatttgtacagtatttgtccggctacgcggttccacctgccgatcagcgtaatcgacgtattccgctggtacgcttcgagagtcgattgtacaaggatatttatcagaataactaagtgcat

SEQ ID NO: 36663 - DNA, 1112 bp, Salmonella paratyphi A
atgaaatacggccttattattatcggcagcggttcggttggcgccgccgctggttattacgccacccgcgccgggctaaaggtcctgatgaccgatgcgcatatgccgcctcatcaacagggcagccaccacggcgatacccgtcttatccgccacgcttatggtgaaggcgaaaaatatgtcccgctggtgttcgcgcccagacgctttgggatgaactctccacacacaatgaagagcctatttttgtccgctccggcgtcgtcaacctcggcccggccgattccgctttcttagccaacgtcgcacgaagcacgcaacagtggcaattgaacgtcgagcgcctggacgcgacggccctcatgacgcgctggccggaaattcgcgtgcccgataattatatcgggctgtttgaagctgactccggtttcctgcgcagcgaattagccattaccacatggcttcgtctggcccgagaggcaggctgcgcacagctattcaacagcccggtaagccatattcaccatgatgataacggtgtgacgatagagacgagtgaaggctgctaccacgccagcaaagcgctgattagcgcgggcacctgggtcaaaacgctggtaccggagctgcccgttcagcccgtacgtaaagtttttgcctggtttaaggcggatggacgttacagcactaaaaaccgctttccggcctttaccggcgaaatgcccaacggcgatcactattacggtttcccggcggagaacgacgagttaaaaatcggcaaacacaatggcgggcagcgaatacaggcaccggaagagcgcaagccctttgccgccgttgccagcgatggcgcggaagcatttcctttcctgcgtaacgtactgccgggtatcggcggttgtttacatggggcggcatgtacctatgataattcgccggacgaggattttattatcgatacgctgcctggccatgagaatacgcttgtcatcactggactcagcggacatggttttaaattcgccccggtgttaggagaaatcgctgcggattttgcgttgggaaaaacgccctcctttgatctgacgccgttccggctttcccgttttagc

SEQ ID NO: 36664 - DNA, 135 bp, Salmonella paratyphi A
aggggctgtttattaaggtaagctatgcgtcgtctctttcattttctgatgaataatattcgcgaacatttcatgctttacgttattctttggtcgctgctggcagtgatggatattgtttatctccttttcttc

SEQ ID NO: 36665 - DNA, 507 bp, Salmonella paratyphi A
  misc_feature (393)..(393): n=g, a, t or c
  misc_feature (418)..(419): n=g, a, t or c
atgaaaaaaaacctactgggattcaccctcgcatccttgttattcacgaccggttccgccgtggcggcggagtataaaattgataaagaaggccaacatgcgttcgtcaatttccgcatccagcatctgggctacagctggctatacggcacctttaaagatttcgacggcacgttcacttttgacgaaaaaaatccgtcggcagaaaagtgaacgtgaccattaacaccaatagcgtcgacactaaccatgccgaacgtgacaaacacctgcgtacgcggagtttcttaatgttgcgaaattcccgcaggcaaccttcacctctaccagcgtgaaaaaagagggcgatgaactggatattaccggcaatctgacgctcaatggcgtgactanaccggtgacgctggaagcaactganntgggccagggcgacgatccgtggggcggtaacgcgcgggctttgaggccgagaaaaatttaggctgaggattcaatatactacgatct

SEQ ID NO: 36666 - DNA, 1036 bp, Salmonella paratyphi A
  misc_feature (319)..(319): n=g, a, t or c
gtgcaactgcttgaacactatttctcagagcaggggcaggacaggcgttcaccgactcatgcgcgtcgttcgcaaaatgagcagcgtagcgctatctggatattattaatcggatgatcgacaaaccgggcagccggtcgcatcgggtgatcctgctggggcttttctccacgctgttacaggcgaaagggacgctgcggttacataaagacgcacgaccattactgctggtggaagatccggaaacccgtttacatcccattatgctttcagtcgcctggcaattgctcaatctgttaccgctacagcgagtgagcgntcaaccaactcaggcgaattgctctcgctaacgccggtggagcatgtcgtacggctggtgcgcgaatcttcccgcgtcgccgcctgggctctgggcccgggcgggttaagcgcggaagatggacggcgcatcgctttcatatccgctttaatcgcgcgtcgtcgctgtttgcgcgttgctggctactggtggaaggcgagacggaaacctgggttattaatgagctggcgcgtcagtgtggacatcattttgatgcggagggcattaaagtcattgagtttgctcagtctggcctgaaaccgctggtgaagttcgcccgccgtatgggaatcgagtggcatgtcctggtggatggcgacgaagcggggaaaaaatatgccgcgacggtccgcagtctgcttaataacgatcgggaagaagaacgcgaacatctcacggcgctgctgcctcggatatggaacattttatgtatcgtcagggctttgccgatgtttttcaccgggttgcgcacttccgcctaatgtgccgatgaatacccggaaaattatcactaaagctatccaccgctcgtcaaagccggatttggcgattgaagtcgcgatggaagccgggcgcgggggaattgacgccgtgccgccgctgttcagaaagatgttctcgcgcgtggtttggctggcgcggggccgggcggattagcgtttgaatgtggccggaacc

SEQ ID NO: 36667 - DNA, 1106 bp, Salmonella paratyphi A
gtaaccagcatcatcggtaacggtgttgtgctgtctccgagcgcgctgatgaaagagatgaaagaactggaagaccgtggcatccccgttcgtgagcgtctgctgctgtctgaagcctgtccgctgatccttgattatcacgttgcgctggataacgcgcgtgagaaagcgcgtgggcgaaagcgatcggcaccaccgggcgtggaatcgggcctgcttatgaagataaagtggcacgtcgcggtctgcgtgttggtgaccttttcgacaaagaaaccttcgctgaaaaactgaaagaagtgatggaatatcacaacttccagttggttaactactacaaagttgaagcggttgattaccagaaagttctggatgatacgatggctgttgccgacatcctgacttctatggttgttgacgtttcggacctgctcgaccaggcgcgtcagcgtggcgatttcgtcatgtttgaaggtgcgcagggtaccctgctggatatcgaccacggtacttatccgtacgtaacttcttctaacaccacagcaggtggcgtggcgaccggttccggcctgggcccgcgttatgttgattacgttctgggtatcctcaaagcttactccactcgtgtaggtgcaggtccgttcccgactgaactgtttgatgaaaccggcgagttcctctgcaagcagggtaacgaatacggcgccactaccggccgtcgtcgtcgtaccggctggctggacaccgttgccgttcgtcgtgcggtacagctgaactccctgtctggcttctgcctgaccaaactggacgtgctggatggcctgaaagaggtgaaactctgcgtggcttatcgtatgccggatggccgcgaagtgactaccactccgctggcagctgacgactggaaaggtgtagagccgatttacgaaaccatgccgggctggtctgaatccaccttcggcgtgaaagatcgtagcggtctgccgcaggcggcactgaactacatcaagcgtattgaagaactgaccggcgtgccgattgatattatttctaccggccccgatcgtactgagacgatgattctgcgcgacccgttcgacgcgtaa

SEQ ID NO: 36668 - DNA, 1285 bp, Salmonella paratyphi A
ttaaaatcacgcgatatcatcgccctgggctttatgacatttgcgctgttcgttggcgcaggcaatattatctttcctcctatggtcggtttgcaggcgggtgaacacgtctggacagccgctattggctttctgattaccgccgtaggctaccggttcttactgttgtggcgctggcgaaagtcggcggcggcgtagacagcctcagtacgccgattggtaaagtggcgggactcctgctggcgaccgtttgctatctggccgtcgggcgttatttgcgacgccgcgtaccgcgactgtgtcgtttgaggtcggtatcgctccgttgaccggcgattctgcaatgccgttgctgatttacagcgtggtctatttcgctatcgttattctggtttccctctatccgggtaagctgctggatacggtagggaatttcctggcgccgttgaaaattattgcgctggtcatcctgtccgtcgcggctatcgtttggcctgccggtccaatcagcaacgccctggacgcttatcagaatgcggccttttctaacggatttgtgaacggctatctgacgatggatacgctgggcgcgatggtgtttggtatcgttattgtgaacgcggcgcgttctcgcggcgtgaccgaagcgcgcctgttgacgcgttacacggtctgggccggcctgatggcgggcgtggggctgacgctgctttaccttgccttgttccgcttaggttctgacagcgcgacgctggtcgatcagtcagcgaacggcgcggcgattcttcatgcctacgttcagcatacctttggcggcgcgggaagcttcctgctggcggcgctgatctttatcgcgtgtctggtgacggcggtggggctgacctgcgcctgcgctgagtttttcgcgcagtatatcccgctgtcttaccgcacgctggtctttattctcggcggcttctctatggtggtgtcaaatctcggactaagccatctgattcaaatctccattccggtgctgacggctatctatccgccgtgtatcgcactggttgtattaagttttacccgctcatggtggcataattccacccgtatcatcgcgccggccatgtttatcagtctgctttttggtatccttgacggcatcaaagcatctgcctttggcgatatgctgccagcctggagtcagcgtttgccgctggcggaacagggactagcgtggttgatgccaacggtggtgatggtgatcctggcgattatctgggatcgcgcggcgggttcggca

SEQ ID NO: 36669 - DNA, 1354 bp, Salmonella paratyphi A
  misc_feature (122)..(122): n=g, a, t or c
  misc_feature (264)..(264): n=g, a, t or c
ttgatggaaagcaataataagctaaagcgtgggctgagcacccggcacattcgctttatggcattaggttcggcaatcggcaccggcctgttttacggctcggcggacgccatcaaaatggncggggccgagcgtgctgttggcctatattattggcggggtcgcggcatatatcattatgcgcgcattgggggaaatgtccgttcacaaccctgccgctagctcattttcgcgctatgcaggaaaacctcggcccgcttcgantgattaccggctggacctactgttttgagatcctgatcgtcgccattgccgacgtgaccgcgttcggcatttatatgggggtctggttccccgccgtgccgcactggatttgggtacttagcgtggtgctgatcatttgcgccatcaacctgatgagcgtcaaggtgttcggcgagctggagttttggttctccttcttcaaagtcgccaccattattatcatgattgtcgcgggtatcggcatcattgtgtggggaattggcaacggcgggcagcgaccggcattcataacctgtggagcaacggcggcttcttcagcaatggctggctgggaatgatcatgtcgctgcaaatggtgatgttcgcttatggcgggattgagattatcggtatcaccgccggggaagcgaaagacccggagaaatccattccgcgcgccattaactcagtaccgatgcgtatcctggtattttatgtcggcacgctgttcgtcattatgtctatctatccgtggaatcaggtcggcacaaacggcagcccatttgtgctgacgttccagcatatggggattacctttgccgccagcattctgaactttgtggtattgaccgcctcgctttccgctatcaactccgatgtgtttggcgtaggccgtatgctgcatggtatggcggagcaggggagcgcgccgaaaatctttgccaaaacgtcacgccgtggtattccgtgggtcactgtgctggtgatgacgattgcgctgctgtttgcggtttacctgaactacatcatgccggaaaacgtcttcctggtgattgcttcgctggcgacgtttgcgacggtatgggtatggattatgatcctgctgtcacaaatcgccttccgccgtcgtttaccgccggaagaggtaaaagcgctgaaatttaaggtgccgggcggtgtcgtaacgacgatagcgggtctgattttcctggtcttcattattgcgcttatcggctaccatccggatacccgcatctcactgtatgtgggcttcgcctggatagttctgctgttgattggctggatatttaaacgccgtcgcgaccgtcaa

SEQ ID NO: 36670 - DNA, 802 bp, Salmonella paratyphi A
atgttgaatgcctggcacttaccggttgccccatttgtgaagcaacataacgataaattaaccattacgctgtggctgagcggagaaaatccgccgtctcgcgtgacgttgcgctcagaattcgataatgaagaaatctcactggcgatgcgcaaacagcgccgccagccgcagccgggcgtgacggcgtggcgagcgacgctcaatatcgcgttagggcaaccctgtcgccgttacagctttaaattgctttggcacgaccgccagctttggtttacgccgcagggatttaaccgcttcccaccggcgcgtctggaacaatttgccgttgatgtgccggatagcggaccgcagtgggtcgccgatcaaattttttatcagatcttcccggatcgttttgcccgcagccgacgcgtgaagccgatcaggaccgggtgtattaccatcatgccgcaggtcaggagattgtgctgcgcgactgggacgatcctttaaccccccaggcgggcggttccaccttttacggcggctgtctgaatggcatttgtgagaagctgccgtatctgaaaacactgggcgtcacagcgctatatctgaatccggtatttaccgcgccgagcgtccataagtacgacacggaagattatcgccatgtcgatccgcaatttggcggcgatcgggcgctgctgcgcggcgtgaaacccaggcgcagggcatgaggctgatgctggatggcgtgtttaatcatagcggcgactcgcatgcgtggtttgacaggcataaccgcagcactggcgcgcgt

SEQ ID NO: 36671 - DNA, 1212 bp, Salmonella paratyphi A
atgtcaccctctgatgtccccataaactggaaacgcaatctaactgttacctggctgggctgttttttaaccggcgcggcattcagcttggtcatgccttttctccctctctacgttgagcaactcggcgtaacaggccatagcgcgctcaacatgtggtccgggctggtctttagtattacgttcctcttttcagctattgcttcccctttttggggcggcctggcggatcgtaaagggcgtaagatcatgctgttgcgttccgctctcggcatggccattgtgatgctgttaatgggcatggcgcaaaatatctggcaatttctgatcctccgcgcgttattaggcctgctgggcggatttattcccaacgccaatgcgctcatcgccactcaggcgccgcgccacaaaagcggctgggcgttagggacgctctctactggcggcgtcagcggcgctctgcttggcccacttgcgggcggtctgctcgccgaccattacggccttcgcccggtcttttttattaccgccagcgttttgtttatctgttttctgctcaccttcttttttattcgcgagaatttcctgccggtgagcaaaaaagagatgcttcacgttcgggaagtggtcgcctcgttaaaaaatccccgcctggtgttaagcctgtttgtcaccacgctgattattcaggtggcgacggggtctattgcgcccatcctgacgctctatgtgcgcgaactcgcaggcaatgtcagtaatattgcgttcattagcggaatgatagcgtccgttcccggcgtggcggcattacttagcgccccccggctcggcaagctcggcgacagaattggcccggaaaagatccttatcgtcgcgctgattatttccgtactgctgctgattccaatgtcttttgtgcaaacgccgtggcagctcgcgctattgcggtttctgcttggcgcggcggatggcgcgctgctgccagccgttcaaactctgctggtttacaactctaccaaccagatagccgggcgcatattcagttacaaccaatctttccgcgatatcggcaacgtcaccggccctctcatgggcgccgcaatttccgcgagctatggcttccgcgccgtattctgcgtcacggcaggcgtggtgttgttcaatgctatctattcatggaacagcttacgacggcgcagactggcaatagaa

SEQ ID NO: 36672 - DNA, 742 bp, Salmonella paratyphi A
atgccagtgttacacaaccgcatctctaatgacgagctgaaagccaaaatgctggcggaaagcgagccgcgtacgacaatttctttttataaatatttcactatcgcctcgccgcaacagacgcgggacgcgttgtatcaggtgtttacggcgttggacgtttttggtcgcgtttacctggcgcatgagggcatcaatgcgcaaatcagcgtgccgcaaagcaaggtcgagacctttcgtcaacagctttatacgttcgaccccgcgctggacgggctgcgtttaaatatcgcgctggaggatgacggaaagtcattttgggtgctgcgtatgaaagttcgcgaccgtatcgtcgctgacggaattgacgatccgacttttgacgccagtaatgtcggcgattatctgaaggcggcagatgtgaatgcgatgctggacgatcctgatgcggtctttattgatatgcgcaaccactatgagtatgaagtcggccatttcgaaaatgctctggaaatcccggcggatacgtttcgtgaacagttgccaaaagcggttgaaatgctgcgggaacatgcagataaaaagatagtgatgtactgtaccggcggtattcgttgtgagaaagccagcgcctggatgaaacacaacggtttcaataaagtctggcatattgagggtggcatcattgaatacgcccgtcgcgcgcgcgagcagagggcttcccgttcgctttatcgggatc

SEQ ID NO: 36673 - DNA, 2279 bp, Salmonella paratyphi A
gataccagcgatatgctgtatgccgaagcatggcgtgattttaaaggtacggactggaaagaagaaattaatgtccgtgattttattcagcataactatacgccctatgagggggatgaatcttttctcgccgacgcgacgccagcgaccacggcgttgtgggaaaaggtgatggcgggaatacgtattgagaacgcgacccatgcgccggtggatttcgataccaacatcgcgacgacgattaccgcgcacgatgcggggtatattgaaaaaaatctggaaaaaatcgtcggtttacaaacggataagccgcttaaacgcgctttgcatccgtttggcggcgttaacatgattaaaagttcattccacgcttatggccgcgaaatggacgccgattttgaatatacctttaccgatctgcggaaaacccataatcagggcgtattcgatgtttactcgccggatatgctgcgctgccgtaaatccggcgtattaaccggtttgccggatggttatggtcgcgggcgcattattggcgattatcgcggcgtcgcgctgtatggtatccgttatctggtgcgcgaacgcgagctgcaattcgccgacctgcagtcgaatctggagcggggacagaatcttgaggcgacgattcgcctgcgtgaggagttggcggagcatcgtcgcgcgctgctgcaaatgcaggagatggcggcgaaatacggctacgatatctcccgcccggcgcgaaacgcgcaggaagcggtacagtggctctacttcgcttatctggcggcgataaaatcgcaaaatggcggtgcaatgtcgctgggaagaaccgcctcgttccttgatatctacattgagcgcgatttcaacgcgggccttctgacagagcagcaggcgcaagaattgatcgaccatttcatcatgaagatccgcatggtgcgcttcctgccgcccggaatttgattcgctcttttccggcgatccgatctgggccaccgaagttattggcgggatggggctcgatggccgcacgctggtgacgaagaactctttccgttatctgcataccctgcacacgatggggccagcgccggagccgaacctgaccatactgtggtcagaagcgttgccggtggcattcaagaaatatgctgcgcaggtctccatcgtgacctcatctttgcagtatgaaaacgacgatttaatgcgtaccgactttaacagcgacgattatgctatcgcttgttgcgtcacgccgatggtcatcggtaagcagatgcagttcttcggcgcgcgccaaccttgccaaaacgttgctgtacgctatcaatggcggcgttgatgagaaactgaaaatccaggtcgggccgaaaaccgcgccgttaacggatgaggtgctggattatgacgcagtaatggagagcctcgaccattttatggactggctggcggtgcagtacattagcgcgctgaacatcattcactacatgcacgataagtacagctatgaagcttcgctgatggcgctgcacgaccgtgatgtgtatcggacgatggcgtgcggcatcgccggactgtcggtggcggcggattccctgtccgccatcaggtacgctcaggtgaagccgattcgcgacgaaaatggccttgccatcgacttcgctattgaaggcgagtatccgcagtacggcaacaacgatgagcgcgtggacagcatcgcctgcgacctggtgaaacgctttatgcaaaaaattagcgtgttgccgacgtatcgcaatgcggtgccgacgcagtccattttgaccatcacctcgaacgtcgtgtacgggcagaagaccggcaatacgccggatggacgccgcgccggaacgccgttcgcgccgggggcgaacccgatgcatggtcgtgaccgcaaaggggcggtagcctcgctgacgtcggtggcgaaactgccgtttacctacgccaaagacggtatttcgtacaccttctcgattgtgcctgcggcgctcgggaaagaagatgcggtgcggaaaaccaatcttgtcggcctgctggacggctatttccatcatgaagcacaggtagaaggcgggcagcatctgaacgtcaatgtcatgaaccgtgaaatgttgctggatgcgattgaacatccggaaaactacccgaacctgacgatccgcgtttccggctatgccgtgcgcttcaatgcgctgactcgtgagcagcaacaggacgttatttcgcgcacctttactcaggcgatgtaacgt

SEQ ID NO: 36674 - DNA, 1373 bp, Salmonella paratyphi A
gtggcaaaagctcccaaacgcgcctttgtttgtaatgaatgtggtgccgattacccacgctggcaggggcagtgcagcgcctgccaggcctggaacaccattactgaggtgcgccttgccgcgtcgccgacggtggcgcgtaacgaacgtctgagcggatacgccggcagtgcgggcgtatcaaaagtgcagaaactgtctgacatcagtcttgaggaactgccgcgcttttctaccggttttaaagagtttgaccgcgtgctgggcggcggggtggtacccggcagcgccattttgattggcggtaaccccggcgcgggcaaatcaacgttgctgctgcaaacgctgtgcaaacttgccgagcagatgaaaacgctgtacgtcaccggcgaagagtcgctacagcaggtggcgatgcgcgcgcaccgtctcggcctgccgaccgctaatctgaatatgctctccgaaaccagcatcgagcagatctgcctgattgccgaagaagaacagccgaaactgatggtgatcgactccatacaggtgatgcatatggcggacatccagtcgtcgccgggcagtgtcgcccaggtccgcgaaacggcagcctacctgacgcgcttcgccaaaacgcgcggcgtggcgatcgtgatggtcggccacgtcaccaaagacgggtcgctggccgggccgaaagtactggaacactgtatcgattgctcagtattgctcgacggcgacgccgattctcgtttccgcacgtgcgcagccacaaaaaccgctttggcgcagtcaatgagctgggtgtcttcgccatgaccgaacaggggttgcgcgaagtgagcaatccgtccgccatctttttaagccgcggcgatgaggtcacttccggcagttcagtgatggtcgtctgggaaggcacgcgaccgttgctggtggagattcaggcgctggtcgatcactcgatgatggcgaaccccagacgcgtggcggtcggtctggaacaaaaccgtctggctatcctgctggcggtgctgcaccgacacggcggtctgcaaatgtcggatcaggacgtcttcgtcaacgtggtcggcggcgtgaaagtcaccgaaaccagcgcggatctggctttactgctggcgatggtctccagcctgcgtgacaggccgttgccgcaggatctggtggtgtttggcgaagtggggctggcaggcgagattcgtccggtgccgagcgggcaggagcgtatttccgaggcggcgaaacacggttttcgtcgggcgattgtgcctgccgccaacgtaccgaaaaagccgccggaaggaatgcaggtgttcggtgttaaaaagctcgcagatgcgttaagcgtgtttgac

SEQ ID NO: 36675 - DNA, 1181 bp, Salmonella paratyphi A
atgcaaaaactcattaactcagtgcaaaactatgcctggggaagtaaaactgcgttaacggaactttatggcatcgccaatccgcagcagcagccaatggctgaactctggatgggcgcgcatcccaaaaacagctcgcgaatcaccgacccaacggcgaaaccgtctccctgcgtgacgccatcgaaaagaataaaaccgccatgctgggcgaagcggtagccaaccgtttcggcgaactgccgtttctgtttaaagtactgtgcgccgcgcagccgctctctattcaggtgcacccgaataagcgcaattccgaaatcggtttcgcgaaagaaaatgcggcgggtatccccatggatgccgcagagcggaactataaagatcctaaccataaaccagagctggtttttgccctgacgcctttcctggcgatgaacgcgttccgcgaattttctgacattgtctctttactgcaacctgtcgccggcgcgcatatccgctatcgcccactttttgcaggcgccgaatgctgaacgtctgagccagcttttcgccagcctgttgaatatgcaaggcgaagaaaaatcccgcgcgttagccgtactcaaagcggcgcttaacagccagcaaggcgaaccgtggcaaacgatccgcgtgatttcagagtattatcctgacgacagcgggcttttctctcctttgttgctgaatgtggtcaaactgaatcccggcgaggcgatgttcctgtttgccgaaacgcctcatgcttatctgcagggcgttgcgctggaagtcatggcgaactccgataacgttctgcgcgctggccttacgcccaaatatatcgacatccctgagctggtcgcgaacgtgaagttcgaacctaaacctgccggcgagttgctgactgccccggtgaaaagcggctcggagctggacttccccattccggttgacgattttgctttttcactgcacgacctggcgcttcaggagacgagcatcggccaacacagcgccgcgattctgttctgcgttgagggtgaggcggtgttacgtaaagatgaacagcgtctggtactgaagccgggtgaatcggcctttatcggcgcggatgagtctccggtttacgccagcgcacgggccgtttagcgcgtgtttataacaagctgtagcaacgt

SEQ ID NO: 36676 - DNA, 910 bp, Salmonella paratyphi A
atgttagacaacacccgcttacgcatagctattcagaaatcaggccgtttaagcgatgattcacgagaattgctggcccgctgcggcataaaaattaatttacacactcagcgcctgattgcgatggcggaaaacatgccgattgatatcctgcgcgtgcgtgatgatgacattccgggtctggtgatggatggcgtggtcgatctcggtattatcggcgaaaacgtgctggaagaagagctactcaaccgccgcgccagggcgaagatccacgctatttaaccctgcgccgtcttgacttcggcggctggctttatcgctggcaacgcggttgacgaagcctgggacggcccggccgcgctggacggtaaacgtatcgctacctcttatccgcacctcctcaaacgctacctcgaccagaaaggcgtctcttttaaatcgtgtctgttaaatggttctgtcgaagtcgcgcgcgcgcggggctggccgacgctatctgcgatttggtctctaccggcgcgacgcttgaagctaacggcctgcgtgaagtcgaagttatctaccgctctaaagcctgtctgattcagcgcgacggtgagatggcacagagcaagcaacagctgatcgataaattgctgacccgtattcagggcgtgattcaggcgcgcgaatcgaaatacatcatgatgcacgcgccaagtgaacgactggaagaggttatcgccctgctgccaggcgccgaaaggccgacaatttccgctggcaggcgagcaacaggcgtggcgatgcacatggtcagcagcgaaacgttgttctgggaaaccatggagaaactgaaacgcttggcgccagctcgattctggtactgccgatcgagaagatgatggagtgatctgacgcctgatggagt

SEQ ID NO: 36677 - DNA, 600 bp, Salmonella paratyphi A
atgtatcaggttgttgcgtctgatttagatggcacgctgctctcccccgaccatacgttgtccccttatgctaaagagactctgaagctgttgaccgcacgcggcatccattttgtctttgccactggtcgtcatcatgtcgatgtagggcaaatccgcgataatcttgaaatcaagtcttacatgatcacctccaacggcgcgcgagtgcacgataccgacgggaatttggtttttacgcataatctggacagcgacattgccagcgacctgttcggcgtggtgaatgcgaacccggacatcgtgactaacgtttatcgcgacgacgaatggtttatgaatcgtcatcgccccgatgaaatgcgttttttcaaagaggcggtatttaactattcgctgtttgagcctgcgctgctggagccggagggcgtcagcaaagtgtttttcaccagcgacactcatgaaaagttgttgccgctggagcaggcgattaacgcgcgctggggcgatcgggtaaacgtgagcttctccacgctaacctgtctggaagtgatggcgggcggagtgtcgataggtcatgcgttggaggcggtcgctcag

SEQ ID NO: 36678 - DNA, 1026 bp, Salmonella paratyphi A
atgtttcagcagcaaaatgactgggaaacaagagaaaatgcgtttgccgcttttgctatggggccgctgaccgatttctggcgtcacgggaagaggcggagtttatcggcgtgggtaaacattccggtgcgctttgtccgttttcggaatgattctaacgatcggacgatcgtcatttgtcctgcccgcattgagagttatgtaaaatacgctgaactggcgtatgacctttttcatctcggttttgatatcttcatcatcgaccaccgtggtcaagggcgctccgggcggatgttatcggacccgcatcggggccacgttgatcattttaacgattatgttgaggacttagcggcgttctggcagcaggaaattgagccggggccgtggcgtaagcgttatatcctggcgcactcaatgggggggcgcgatagccaccctgttcctgcaacgccatcgtgtgcggtgcgacgctattgcgctcaccgcgccgatgtttggtattgtgatacgcttgccttcctttatggtgcgccatattctcgactgggccgaagggcaccagcgtatccgtgaagattacgctattggtaccggtcagtggcggcgttgccgtttgggatgaatgcgctgacccacagccgccagcgttatcagcgcaacttacgattttatgccgacgagccgcagctgcgcgttggcggccccacctggcattgggtacgcgaaggcattctggcgggtgagcaggtactggctggggcgagcgatgacacgacgcctacgctactgattcaggcggaagaagagcgggtagtggataaccgcacccacgatcgtttttgtgaaattcgcgccgcggcgggatacccttgtgaagggggaaaaccgctggttatcaaaggcgcgtaccatgagatcctttttgaaaaggacgccatgggctcagtcgcgcttaacgccattgttgaatttttcaacaagcctaatttatccagcggaaatcgctttgcttagaggttaaat

SEQ ID NO: 36679 - DNA, 623 bp, Salmonella paratyphi A
atgacctttgaatggtggttcgcctatctactgacctcaactctgctgagtctttctccgggttcaggcgccatcaataccatgacgacgtctatcaaccatggatatcgtggcgcagcggcttctatcgccggactccagaccggactggggatacatatcgtactggtgggcgtcggactgggtacgctcttttcgcgctcgctcctcgcttttgaaattctgaaatgggctggcgcggcttatcttatctggctgggtatccagcaatggcgcgcaggcgctatcgatctgcatactctcgcccagacgcaatcgcggggtcggctgttcaaacgggcgatatttgtcaatctaaccaatcccaaaagtattgtctttcttgccgccctgtttccgcaattcatcatgccgcagcaaccgcaactggcgcagtacctcattctcggcgtcaccacgattgtggtggatatgattgtgatgaccggttacgccacactggcgctagcgcacttgccgcctggattaaaggaccaaagcagatgaaggcgctgaataaagcgtttggttcgttgtttatgctggtaggcgcgctcctggcgtcggcaagacacgcgtgatag

SEQ ID NO: 36680 - DNA, 1809 bp, Salmonella paratyphi A
gcggaagtgttgagtctggaatcaggggccaaacaggttttgcaggaaacctttggctaccaacagtttcgcccgggccaggaagcgattattgatactgcgctctccggtcgcgactgtctggtcgtcatgcccaccggcggcggcaaatctctgtgctatcaaatccccgcgttgttgctggacggattgaccgtcgtcgtttcgcccctgatctcgttgatgaaagaccaggtcgatcagctactggcgaacggggtggcggcggcctgtctgaactccactcaaagccgcgagcagcagcttgaggtgatggcggggtgcgtaccggacagattcgtctgctgtatattgcgccggaacgcctgatgctggacaactttcttgatcatctggcgcactggaatccggtattgctggcggtggatgaagcgcactgtatctcgcaatggggacatgatttccgtccggaatatgcggctctcggtcagcttcgccagcgttttcccgctttgccgtttatggcattgaccgccaccgccgacgacaccacgcgccaggatattattcgtctgcttgggcttaacgatccgttaatccagatcagtagctttgaccgaccgaatatcgctacatgctgatggagaagtttaagccgctcgaccagctaatgcgctatgttcaggagcaacgcggcaaatcgggtatcatctactgcaacagtcgggcgaaagtggaagataccgcgcgcttgcaaagtcgcggcattagcgcggcggcctatcatgcggggctggaaagactattcgcgccgatgtgcaggaaaaatttcagcgcgacgatctgcaaatcgtggtggcgaccgtcgcttttggaatgggcataaacaaacctaacgtacgtcgtcgtgcatttcgatatcccgcgtaatattgaatcctactatcaggaaacgggccgcgggcgcgacggactgcctgcggaaccatgctattttacgatccggctgatatggcctggctacgtcgttgtctggaagagaaaccagccggacagcttcaggatattgaacggcataagctgaatgcgatgggcgcttttgccgaagcgcaaacctgccgccgcctggtattgcttaattactttggcgaaggccgacaagaaccgtgcggcaactgcgatatctgtctcgatctgcccaaacaatatgatggcttaaacgatgcccagattgcgctttctaccattggtcgggttaaccagcgttttggcatgggctacgttgtcgaggtgatccgcggcgcgaataaccaacgcatcccgcgatttcggtcatgacaaactcaaggtttatggcatgggacgcgaaaagagccatgagcactgggtgagcgtgattcgccagctcattcatctggggctggtaatgccaaatactgcgcagcactccgcattacagttgacggatgccgcgcgtccggtactccgtggagacgttccgctaaagcttgcggtgccgcgcattgtcgccctcaaaccccgcgtgatgcagaaatcgttcggcggtaattacgatcgcaaattgttcgctaagttgcgcaactgcgtaaagctatcgctgatgaagagaatatcccgccgtatgtggtctttaacgacgccacgttgatagaaatggcggaacagatgccggtttccgccagcgagatgttaagcgttaacggggttgggatgcgcaaactggagcgcttcgggaaagaattcatggcgctcatccgcgcgcatgtcgatggtgatgacgaagagtag

SEQ ID NO: 36681 - DNA, 1236 bp, Salmonella paratyphi A
ttgcgtctgaaaaacctgaactcgctgaaaggagaatggaaggtcgactttaccgccgaaccgtttgccagtaacgggttattcgccattaccggcccgaccggcgcgggaaaaaccaccttgcttgacgccatctgcctggcgctgtaccacgaaacgccgcgcctgaatacggtatcgcaatcgcaaaacgatttgatgacgcgcgatacggcggaatgtctggccgaagtggagtttgaggtaaaaggcgacggttcgcgcgttctggagccagaaccgagcccgaaatcagcctgacgcaatctccaggccccacgcgtgagctggcgcggtgttcagacggaaagatctttgccgataaggtaaaggataaactggagatgatcgccacgttgaccgggctggactacgggcgcttcaccgttcgatgttgttatcacaggggcagttcgcggctttcttaacgccaaaacgaaagagcgcgcagagcttctgaggagctcaccggcactgagatttacgggcagatctccgcacaggtatttgaaaaacataaatccagcccgtctcgaactggaaaagttacaagcgcaggccaggcgcgtcgccctattggcggacgaacagttacagcaactggaagccagtttgcaggcgcttactgacgaagagaaacgcctgctggccgaccagcagggacagcagcagcaccttcactggctgacccgaaaaaacgagctccacactgaattacacgcccggcagcaggcctgtacgcgcgcaagaggcgcgagaaaaagcgcaccgcagctcgcggcgttgacactgcgcaacctgctcgccagttgcgcccgcactgggagcgcattcaggaacaaacccgcgccgttgagcgtgttcgccagcacagtgatgaagtgaatgctcgcttacaaagcgcgtatcgcctgcgccagcgtaaatccgcctgcgcgcatcgacaattcacacaactgaacgccacagggcagcggttgaagacatggctggcggaacacgacggcatccgcgtctggcgcagcgaactggcgggatggcgagcattattaacacaacaatcccacgaccgggcgcaactgagccaatggcaacagcagttgctgagcgatacgcgtcagcgtgatgcgtaccgggtctcacgctcgaccttcagccacaggcgctggcggaagccagggcattgcatacccgaca

SEQ ID NO: 36682 - DNA, 1229 bp, Salmonella paratyphi A
ctttttttgcatggaacaattatgcgcatcctccacacctctgactggcatctgggacaaaacttctacagtaaaagccgcgccttggagcatcaggcttttctggactggctgctggagaccgcgcaggcccatcaggtggatgccattattgtcgctggcgatatttttgataccggttcggcgccaagctatgcccgagaactttataaccgtttcgtcgttaatttacagcaaacgggctgtcatctggtggtgctggccggtaatcatgattccgtcgccacgataaacgagtcgcgcgacattctggcgtttctcaatacaaccgtgatcgccagcgcgggctatgcgccgcggctacttcatcgtcgcgacgggtctccgggcgccgtactgtgccccattccctttttgccccgcgcgacattattaccagtcaggcggggttatccggcagcgagaaacagcagcaacttcttcatgcaattgccgattattatcaacagcagtatcaggaagcatgccacgtacgcggcgaacgaaagctgccggttatcgcgacggggcatttaaccaccgtcggcgccagcaaaagcgatgcggttcgcgacatttatatcggtacgctggatgcctttccggcgcagcatttccctccagcggattatatcgcattggacacattcaccgcgcgcaatgtgtcggcggcacagagcatatcgctattgcgctcgcccatcgccctcagctttgatgagtgcggcaaaagcaaatgcgtgcatctggtgaccttcgaccaggggaaatggcaaagcaccgaaagtctggctgtccccgtaactcaaccgttggcggttttaaaaggcgacctggcgtcaattaccgaacagcttgagcagtggcgcggcgttgagcaatcgccccccgtctggctggatattgaaatcaccaccgatgattatctgcatgatatccaacgcagaatacagacattaacggagtcactccccgtagaggtattactggtgcgccgtagccgcgaacagcgtgagcgctcgctggcgaacgagcggcgggaaacattaagcgagcttagcgtggaagaggtttttgcgcggcgtctggcgctggaagcgttagataccccgccacgcgagcgcctgaatcagctcttttccagcacgctctacgcgttgaatgaggagcatgaggcatgaaaattctca

SEQ ID NO: 36683 - DNA, 689 bp, Salmonella paratyphi A
atggcgagacgtattctggtcgtagaagatgaggcgccgatccgtgaaatggtgtgcttcgtgctcgaacaaaatggctttcagcccgtagaagccgaagattatgacagtgcggtgaataaacttaatgaaccctggccggatctcatccttcttgactggatgttgcccggtgggtcagggttacagtttattaaacatctcaaacgtgaggccatgacccgggatattcctgtggttatgctgaccgcgagaggtgaggaagaagatcgtgtgcgcgggctggaaaccggcgctgacgattacattaccaagccgttttcccccaaggagttggtggcgcgcattaaagccgttatgcggcgtatctcgcgatggcggtcgaagaggtgatcgagatgcagggactgagccttgatcctggctctcaccgcgtgatgaccggcgacagcccgctggatatggggccgaccgaatttaaattactccatttctttatgacgcacccggaacgggtttacagccgcgaacagctgctcaatcatgtctggggcaccaatgtgtacgttgaagaccggacggtcgacgtgcatattcgccgtttgcgtaaggcgctggagcacagcggccacgaccggatggtgcaaacggtacgcgggacagggtatcgtttttcgacccgcttttaa

SEQ ID NO: 36684 - DNA, 1280 bp, Salmonella paratyphi A
gtgctggaacggctgtcatggaaaaggctggtgctggagctggtgctctgttgcatccccgcgcttatccttagcgctttttttggttatctgccgtggtttttactggcggcggtgacgggactgcttgtctggcatttctggaatttgttacgcctctcctggtggctttgggtcgacagaagtatgacgccgccggggcggggaagttgggaaccgctgttatacggtttacaccagatgcagttgcgaaataagagcgtcgccgcgagctggggaacctgattaaacgttttcgcagcggcgcggagtcgctgcctgatgccgtggtactgaccacagaagagggcggcattttttggtgtaacggtttggcgcaacagatactgggcgtacgctggccggatgacaacgggcagaatattctcaatctactgcgttatccggagtttacccagtatttaaaaacgcgtgatttcacccgtccgcttcatttggtgctcaataccgggcggcacctggagatccgcgtcatgccttataccgataaacaactcctgatggtggcgcgcgatgtgacgcaaatgcatcagcttgaaggcgccagacgtaactttttcgccaacgttagccatgagttgcgtacgcccttgacggtattgcaaggctatctggaaatgatgcaggaacaggcgctggaaggggcgatgcgagagaaagcgctgcatacgatgcgcgagcaaacgtatcgtatggaagggctggtaaaacaactgcttacgctgtctaaaattgaggcggctccggcgctgttattaaatgaaaaagtggatgtaccgatgatgctgcgggtcgtggagcgtgaagcgcagacgctcagccagcagaaacatacctttacgtttgaggtcgacgatagtcttagcgttctgggtaatgaagagcagctacgtagcgcgatctcaaacctggtgtataacgcggtaaaccatacgccggcgggaacgcatattacggtgagctggcgacgtgtcgcatggcgctgagttttgcattcaagataacggtccggggattgctgccgagcatattcctcgtctgaccgaacgcttctaccgcgtcgataaagcgcgttcgcggcaaacgggcggcacggcctgggattggcgattgtgaaacatgcgttgaatcaccatgaaagccgccttgaaatcgacagttcgcctggcaaaggaacgcgatttagctttgtgctgccggaacgtttaattgccaaaaat

SEQ ID NO: 36685 - DNA, 1323 bp, Salmonella paratyphi A
atgagtaatgtaacccaccagccaaagatcggcttcgtttccctgggctgtccgaaaaacctcgttgattcggaacgcatcctgactgagctgcgtaccgaaggctatgacgttgtgccacgctatgacgatgcggatatggttatcgttaatacctgtggctttattgacagcgcggtacaagagtcactggaagccattggcgaagcgctgaacgaaaacggtaaggtaatcgtcaccggctgcctgggcgcaaaagaagatcagatccgcgaagtgcatccgaaagtactggaaatcaccgggccgcatagctatgagcaagttctgcagcacgtacatcattacgtaccgaagccgaagcacaatccatttttaagcctcgtaccggaacagggtgtaaaactgacgccgcgccattatgcgtatctgaaaatttctgaaggctgtaatcaccgctgcacgttctgcatcatcccgtcgatgcgcggggatctggtcagccgtccgattggcgacgtattaagcgaagcgaaacgtctggttgatgccggggtcaaagagattctggtgatttcgcaagatacctccgcctacggcgtagatgtgaagcaccgcaccggattccataatggcgaaccggtgaaaaccagtatggtgagcctgtgcgaacagttatcaaaactgggcgtctggacacgtctgcactacgtctacccctacccacacgttgatgatgtgattccgctaatggcggaaggcaaaatcctgccttatctggacattccgctgcaacatgccagcccgcggattcttaaactgatgaaacgtcctggttccgttgaccgccagctggcgcgcattaagcagtggcgcgaaatctgcccggaactgaccttacgctccacctttattgtcggcttccccggcgaaacggaagaagacttccagatgctgctcgacttcctgaaagaggcgcgcctcgatcgtgtaggctgcttcaagtacagcccggtggaaggcgcaggcgcgaatgagctgccggatcaggtgccggaagaggtgaaagaagagcgctggaaccgctttatgcaactgcaacaacaaatctccgctgagcgcttgcaggaaaaagtgggccgcgaaattctggtgatcgtcgatgaggttgacgaagaaggcgctatcgggcgtagcatggcggatgcgccggaaattgacggcgcggtctatttgaacggcgaaaccaacgtcaagctgggcgatatcgtgcgcgtgaaagtggaaaacgccgacgaatatgatttgtggggcagccgggtt

SEQ ID NO: 36686 - DNA, 912 bp, Salmonella paratyphi A
atgcgattatttaactggcgccgtcaggcgattttacatgctatgccggtggtaaaacccgaccagatacgcacgccgtggcgggagttctgcgtcgttttcgccgccagcatgtcgcgttggtcgccgggggattcgtactggcgttaattctggtggcgatttttgcccgttcggacgccctacgatgcggaaaactattttgactacgatagcctgaacaatggcccctctttgcagcactggtttggcgttgactcgctgggaagagacatctttagccgggttctcgttggggcgcagatctcactggcggcgggcgtgttcgcggtatttatcggcgcgataatcggcacggtgttgggattgctggcaggatattatgaaggctggtgggatcgtttcattatgcgcatttgcgatgtgctgttcgccttccccggcattttgctggcgattgccgttgtggcggtgttaggcagcggtattgctaatgtgatcgttgcggtggcgattttctctattccggcgtttgcacgtctggtgcgcggaaataccctggtcttaaaacagcagacgtttattgagtctgcccgcagtatcggcgccagcgacacgacgattttgtttagccatatcttgccgggaacggtctcgtcaattgtggttttctttacgatgcgtatcggtacgtcaattatttccgcggcaagcctgtcatttctcggattaggcgcgcagccgccaacgccggagtggggagcgatgctcaatgaagcgcgggcggatatggtcatcgcgccgcacgtagcgctcttcccggcggtggcgattttcctgactgtgctggcgtttaacctgttaggcgacgggttgcgcgatgcgctggacccgaagattaaggggtaagcc

SEQ ID NO: 36687 - DNA, 1071 bp, Salmonella paratyphi A
atggcaggaaacacaattggacaactctttcgcgtaaccactttcggcgaatcacacgggctggcgcttgggtgtatcgtcgatggcgtaccgcccggcatcccgttgacggaggccgatctgcagcacgatctcgacagacgccgccccggcacctcgcgctatactacccagcgccgcgaaccggaccaggtaaaaattctctccggcgtgtttgatggcgtgacgaccggcaccagcattggcctgctgattgaaaacaccgatcagcgctcgcaggactacagcgcgattaaagatgtttttcgtccgggacacgcggattacacctatgagcagaaatacggcctgcgcgattaccgtggcggtggacgttcttccgcgcgtgaaaccgcgatgccgtagcgcaggggcgatcgccaagaaatacctggcggaaaagttcggcatcgaaatccgcggctgcctgacccagatgggcgatattccgctggagattaaagactggcgtcaggttgagcttaatccgttcttttgtcccgatgcggacaaacttgacgcgctggacgaactgatgcgcgcgctgaaaaaagagggtgactccatcggcgcgaaagtgacggtggtggcgagcggcgtgccggcagggcttggcgaaccggtttttgaccgactggatgcggacatcgcccatgcgctgatgagcatcaatgcggtgaaaggcgtggagatcggcgaaggatttaacgtggtggcgctgcgcggcagccagaatcgcgatgaaatcacggcgcagggttttcagagcaaccacgctggcggcattctcggtggcatcagtagcgggcaacacattgtggcgcatatggcgctgaagcctacttccagcattaccgtgccgggacgtacgatcaaccggatgggtgaagaagtcgaaatgatcaccaaagggcgccacgatccgtgtgtggggattcgcgcagtgccgatcgcagaagccatgctggcgatcgtgctgatggatcacctgctgcgccatcgggcacagaatgcggatgtaaagacagagat

SEQ ID NO: 36688 - DNA, 849 bp, Salmonella paratyphi A
atggctgaaattaccgcatccctggtaaaagagctgcgtgagcgtactggcgcaggcatgatggattgcaaaaaagcgctgactgaagcgaatggcgacattgagctggcaatcgaaaacatgcgtaagtccggcgctatcaaagcagcgaaaaaagcaggcaacgtggctgctgacggcgtaatcaaaaccaaaatcgacggcaacgtcgctttcattctggaagttaactgccagactgacttcgtggctaaagatgctggcttccaggcatttgctgacaaagtgctggatgccgctgttgctggcaaaatcactgacgtagaagtcctgaaagcgcagttcgaagaagagcgcgttgctctggttgcgaaaatcggcgagaacatcaacattcgtcgcgtagcttccctggaaggcgacgttctgggttcttaccagcacggtgcgcgcattggcgttctggttgccgctaaaggcgctgacgaagagctggttaaacagctggcgatgcacgttgcggcaagcaagccggaattcgttaagccggaagacgtgtctgttgacgtggtagagaaagagtaccaggtacagctggacatcgcgatgcagtccggtaagccgaaagaaatcgcagagaaaatggttgaaggccgcatgaagaaattcaccggcgaagtttccctgactggtcagcctttcgtcatggaaccgagcaaatctgttggccaactgctgaaagagcacaacgctgacgtgactggcttcatccgctttgaagtgggcgaaggcattgagaaagtcgagactgactttgcagcagaagttgctgcgatgtctaagcagtcc

SEQ ID NO: 36689 - DNA, 725 bp, Salmonella paratyphi A
atggcaactgtttccatgcgcgacatgctcaaggctggtgttcactttggtcaccagacccgttactggaacccgaaaatgaagcctttcatcttcggcgcgcgtaacaaagttcacatcatcaaccttgagaaaactgtaccgatgttcaacgaagctctggctgaactgaacaagatctctgctcgtaaaggtaaaatccttttcgttggtactaaacgcgctgcaagcgaagcggtgaaagaagctgctaacagctgcgaccagttcttcgtgaaccatcgctggctgggcggtatgctgactaactggaaaacagttcgtcagtccatcaaacgtctgaaagacctggaaactcagtctcaggacggtactttcgaaaagctgaccaagaaagaagcgctgatgcgtactcgtgagcttgagaaactggaaaacagcctgggcggtatcaaagacatgggcggtctgccggacgctctgttcgttatcgatgctgaccacgagcacattgctatcaaagaagcgaacaacctgggtatcccggtatttgctatcgttgataccaactctgatccggacggcgttgacttcgttatcccgggtaacgatgacgcaatccgtgctgttagcctgtacctgggcgctgtcgctgcaaccgttcgtgaaggccgttctcaggatctggcttcgcaggcggaagaaagctcgtagaagccgagtaa

SEQ ID NO: 36690 - DNA, 984 bp, Salmonella paratyphi A
  misc_feature (120)..(120): n=g, a, t or c
  misc_feature (171)..(171): n=g, a, t or c
atgagtaagatttatgaagataactcgctgactatcggtcatacgccgctggttcgactgaacgtatcgtaatggacgcattctggcgaaggtggagtcgcgcaacccgagcttcacgtncaagtgccgtatcgcgccaatatgatttgggatgccgaaaagcgtggcgtnactgaaacctggcgtggaactggtggagccgaccagcgcaacaccggtattgcgctggcgtatgtcgcgccgcgcgcgttacaaactcaccctgaccatgccggaaaccatgagcattgaacgccgcaagctactcaaagcattaggcgcgaatttggtgctgaccgaaggggcgaaagggatgaaaggcgctattcagaaagccgaagaaattgtcgccagcgatccgcaaaaatatctcctgctccagcagttcagcaaccctgccaacccggaaatccatgaaaaaaccaccggcccggaaatctgggaagacaccgatggtcaggtggatgtgtttatctccggcgtcggcactggcggtacgttaaccggcgtcacgcgttatatcaaagggacgaagggtaaaaccgatcttatcaccgttgcggtagaacccactgactccccggttatgccccaggcgctggctggtgaagagatcaaaccgggcccgcataaaattcagggcatcggcgcaggcttcatccccaggcaacctggatctgaaactgattgataaagtggtgggcatcaccaatgaagaagccatttctaccgcgcgccgtctgatggaagaggaaggtattctggcgggaatttcttccgcccggttgctgcacgcttaagctgcaggaagatgaaagctttaccaataagaatattgtggttatcctaccttcatcaggtgagcgttatctgagcaccgcgttgttcgccgatctctttactgagaaagaactgcaacagtgatgccagcatgttaaaaacgcg

SEQ ID NO: 36691 - DNA, 1771 bp, Salmonella paratyphi A
atgatttcaggcattttagcatccccgggtatcgctttcggcaaagactgctgctgaaagaagacgaaatcgtcattgaccggaaaaaaatttctgccgacaaggttgatcaggaagttgaacgtttttctgagcggtcgtgccaaggcatctgcgcaactggaagcgatcaagacaaaagctggtgaaacgttcggtgaagaaaaagaagccatctttgaagggcatattatgctgctcgaagatgaggagctggagcaggaaatcatagccctgattaaagataagcacatgacggctgacgcagcgcacatgaagttatcgaaggtcaggccactgccctggaagaactggatgatgaatacctgaaagagcgtgcggctgacgtacgtgatatcggtaagcgcctgttgcgaacatcctgggtctggccattatcgatctgagcgcgattcaggaagaagttatcctggttgccgctgacctgacgccgtcagaaaccgcgcaggatgaacctgcagaaagtgctgggcttcatcaccgacgcgggcgacgcgacgtctcatacctccatcatggcgcgttctctggaactgccagcgatcgtaggtaccggtagcgtcaccgctcaggtgaaaaacggcgactatctgattctggatgccgtaaacaaccaggtttacgtcaacccgaccaacgatgttattgagcaactgcgcgccgtccaggagcaggttgcgaccgagaaagcggaactcgcaaaactgaaagatctgccggcaatcacgctggatggacatcaggtcgaagtttgcgccaacatcggtaccgttcgcgacgttgaaggcgctgagcgtaacggcgcggaagggcgttggtctgtatcgtactgaattcctgttcatggatcgcgacgcgctgccgacggaagcaagagcagtttgccgcctataaagcggtcgctgcaagcgctcggctcgccaggcggttatcgtccgtaccatggacattggcggcgaccaagagctgccgtacagtaccttcccgaaggagaaaacacgtccttgggctggggcgcgttggtatcgccatggatcgcacagagatcctgcgtgaccaggttcgcgcgatttctgcgtgcctccgctctcggtaaattgcgcattatgttcccgatgatcatctctgttgaagacagcctcgctgcgccaaagagattgacatctacaaacaggaatgcgtgacgaaggtaaagcatttgacgaaagcattgagattggcgtgatggtggaaacaccggctgcggcgacaattgcgcgtcatttagccaaagaagttgatttctttagtatcggcaccaatgatttaacgcagtacaccctggccagttgaccgtggtaatgatatgatttcacacctttaccagccaatgtcaccgtccgtactgaacttgatcaagcaagttattgatgcttctcatgcagaaggtaaatggactggcatgtgtggtgagcttgcaggcgacgaacgtgctacacttctgttgctggggatgggtctggacgaattctctatgagcgccatttctatcccgcgcattaagaagattatccgtaacacgaacttcgaagatgcgaaggtgttagcagagcaggctcttgctcaaccgacaacggacgagttaatgacgctggttaacaagttcattgaagaaaaaacaatctgctaatccacgagatgcggcccaatttactgcttaggagaagatcat

SEQ ID NO: 36692 - DNA, 843 bp, Salmonella paratyphi A
atggctgaaacgcaaaatgatccgctattgccgggatattcatttaatgcccatctggtcgccgggctgacgccaattgaagcgaatggatatctggatttttttatcgatcgtccgttgggcatgaagggatatattcttaacctgaccatccgcggagagggcgtcattaataataatggcgagcagtttgtctgtcggcctggcgatatattattgtttccgccgggcgagattcatcactatggacggcatccggatgccagcgagtggtatcaccagtgggtttatttccggcctcgcgcctactggcaggagtggctgacctggccgacaatctttgctcagacaggatttttccgcccggacgaggcgcgccagccgcatttcagcgaactgttcgggcagatcatcagcgccgggcaaggggaaggtcgctattctgagctactggcgatcaatctgctggagcagttgttgctcagacgtatggcggtaattaatgagtcgttgcacccgccgatggatagccgtgtgcgcgatgcctgccagtatatcagcgaccatctggcggacagtcattttgatatcgccagcgtcgcccagcatgtctgcctgtcgccctcccggttatcgcatctgttccgccagcagttaggcattagcgtattgagttggcgcgaagatcagcgtatcagccaggcgaaactcctgcttagcaccacgcgaatgccgatagcgaccgttgggcgcaatgttggatttgacgatcagctctatttttctcgggtatttaaaaaatgcaccggggcaagtcctagcgagttcagggccggatgtgaa

SEQ ID NO: 36693 - DNA, 759 bp, Salmonella paratyphi A
aggcatctcgcagctgtggcccaacgtaaagcacgttcggcgttctcataactacgcattgtatgcgaatgagtagcacgatgttaccgctaatacgctgccggtgtgcgttcgaccttctatggtaataatcgtgccgaggctagaccgtttgccgccatcgcacaacgccttgctgattaagtgtcgaagacattacagcgcttctacggctggagcgatgcgtgcggcgttagaaatcgcttatgatgccaaaacgccgtggacgcttgatcctgtcgcggtgggcgtgctggaatttcgccggcgattgtgcctggatctcttgtctatgcgccggcggcaatacgcgcatatgcctcggaaatcatggcgtcagccggcatggcgttgggcggacgcggcgtagataccaccgtagggcgttggccgacactctgcggcgtcaggctggcgcgtcaaatagactgcatcgttgtggttaccggagagatagattacgtcactaacagtcagcgcacgctgagcattcccggcggcgatccgttaatgactcgcattgtgaggctactcggtgcgcgttgtcggcagttgtcgccgccagttgcgcgttaccgggcgccgcgctggacaatgtcgcgtcggcctgctgctggatgaaactggctggacaggccgcggcagagcgtagcgaaggaccgggcagcttcatcccggcttttcttgatgcgctctatcatctggatgtggaggcggcca

SEQ ID NO: 36694 - DNA, 746 bp, Salmonella paratyphi A
atggaacaagcgcatacccggctcatcgcgcaactgaatgaacgaatttcagcggcggataatacgccgctatacatgaaattcgcccagacggtaaaggatgccgtgcgcagcggtattcttgagcacggtaatattttgcctggcgaacgcgatctcagccagcttaccggcgtctcgcgcatcacggtacggaaagcgatgcaggcgctggaagaagagggggttgtcacgcgcgcccgcggctacggtacgcaaatcaataatatctttgaatattccctgaaagaggcgcggggattttctcagcaggttgtctgcgcggcaaaaaaccggatacgctatgggttaacaaacgcgtggtaagttgtccggatgaggtcgcgcagcacctggcgatccccgcaggcagcgacgtctttttactcaaacgcattcgttatgttgatgaggacgcggtatcgattgaagagtcctgggtgcccgcgcatctgattcatgatgtcgacgcgattggcatttcgttgtatgactattttcgtcgccagcacatttaccctcagcgtacccgatcccgcgtcagcgcccggatgccggatgatgagtttcagtcgcatattcaaatggatggtaaagtgccggtgctggtgattaagcaggtggcgctcgatcagcagcagcggcctattgaatacagcatcagttattgtcgtagcgacctatacgtttttgtgtgcgaggagtag

SEQ ID NO: 36695 - DNA, 550 bp, Salmonella paratyphi A
  misc_feature (10)..(10): n=g, a, t or c
  misc_feature (12)..(12): n=g, a, t or c
ggaatgaagnanaccaccggctggatgacgctcggccagttctctgaaatcttctttatgctgcgctgccctttttcactaagcgctctggtattaaaaagctattattgcttggtcttgttaccgctgcgatacgctacggcttttttgtctatggcggcgcggaaacgtacttcacttacgccctgctgttcctcggtattttgctgcacggcgtaagttacgatttctactacgtcaccgcctacatttatgtcgataaaaaagcgccggttcatatgcagtaccgtgcgcaagggcttatcaccctctgctgtcagggattcggcagcctgctgggctatcgtctcggcggcgtgatgatggaaaaaatgtttgcttatccgcaaccggttaacggtctgacattcaactgggcgggcatgtggacgtttggcgcagtgatgattgccgtcatcgcgctactgtttatgattttctttcgcgaatcggacaaagagatcactgctattgacgatcgcgatattgcgtcgacacaaggggaagtaaa

SEQ ID NO: 36696 - DNA, 2186 bp, Salmonella paratyphi A
tgcgccagtgtgtcacccgcgtacaacatgcgtacaaagcgtacgggcgtcacgcagcacgggtaaactgcgggaacgcactgcgctggtgatgagcagcgtccgccgctgatttagtgcaggcggtgaaaaagccgggctacggcgcagaagcgattgaagatgacatcaaacgccgcgagcgccagcaggaaaccgccatcgccaccatgaaacgttttcgctgcaggcaatcgtcgcctggcggtcgtataccggtcatggtctgggggatgatcggcgataacatgatggtgaccggcgacaaccgcagcctgtggctggctattggcctgatcacgcttgcggtgatggtctttgcgggcggtcacttttaccgtaacgcgtggaaaagcctgctgaacggcacggcgacgatggatacgctggtggcgctcggcaccggggtcgcctggctctactccatgagcgtcaacctgtggccgcagtggttcccgatggaagcgcggcacctctattacgaagccagcgcgatgattatcggtctgattaatctcggacacatgctagaagcgcgcgcccgtcagcgttcctcaaaagcgctggaaaaattactcgatctcaccccgcccaccgcacgcgtcgtgacagaagacggcgaaaaaagcgtccgctggcggacgttcagccggggatgctgctgcggctcactaccggcgatcgcgtgccggtggatggccaaattacccaaggcgaagcgtggcttgatgaagccatgctgaccggcgaacccattccgcagcaaaaaggcgaaggcgacagcgttcatgccggcaccgtcgtccaggacggcagcgtcctgttccgcgccagcggtgggcagtcataccacgctgtcacgcattattcgcatggtacgccaggcgcaaagcagtaaaccggaaattggccaactggccgataaaatctccgcggtattcgttcccgtcgtcgtggccattgcgctgttcagcgccgctatctggtatttcttcggaccggcgccgcaaattgtttatacgctggtcatcgccaccaccgtactgattatcgcctgcccttgcgcattaggcctggcgacgccaatgtcgattatttccggtgtaggccgcgctgccgaattcggcgtgctggtacgcgacgccgatgccctgcaacgcgccagtacgttggataccctcgtttttgataaaaccgggacgctgacggaaggcaagccgcaagtggtggcggtaaaaacctttaacggcgttgatgaagctcaggcattacgtctggcagccgcgctcgaacaaggctccagcacccgctggcccatgcgattctggaaaaagccggcgacgataaactgccgcagtgaacggtttcagaactctgcgcggactgggcgtcacggtgaagcggaaggccatcaactgcttctggggaaccaggcgttgctgaacgaacagcacgtcgccacggatgatatgacggcggaaatcaccgcgcaggcctcgcaaggctcgactccggtcctgctggcgattgacggtaaagcggcggcgttactggcggtaccgatccattgcgcacgatagtattgccgcgcttgaacgcctgcacaacgccggataccgtctggtaatgctcaccggggataacccaacgacggctaacgcgattgccaaagaagcgggtattgacgaagtcattgcgggcgttctgccggaatgcaaagccgatgcgattaaacgtctgcaaagccagggtcgtcaggttgcgatggtcggcgatggtatcaacgatgcgcccgcgtggcgcaggcggacgtcggtatcgcgatgggcggcggcagcgatgtggcgattgaaaccgcggcgattacgctgatgcgccatagtctgatgggcgtggcggatgcgctggccatttcgcgcgcgatgttgcgcaatatgaagcaaaacctgcttggcgcatttatctacaacagcattggtatcccggtggccgccggtattctgtggccatttaccggtaccttgttaaacccggtagtagcgggcgcggcaatggcgctgtcttccattaccgtcgtgagcaatgccaaccggctattgcgctttaaaccgaaagcgtaaaaacgctatagtcagcagcatcagctg

SEQ ID NO: 36697 - DNA, 793 bp, Salmonella paratyphi A
  misc_feature (695)..(695): n=g, a, t or c
atggagttattaaatcaacttaaacgtttatggcgcgcgctgcgtggtaccccaaatagttggcctgctatcgatctctccctgcccggcggtcgtcatctgcatctggttggcagtattcatatggggacacgcgatatggctcctcttccagcaaagctggtgaaaaaactacgccaggccgacgcgctggtcgttgaagcggatatttctggtaacgaaacgccattcagcaatctccccaaatgcccgccgttggtcgaacgtctcagcgccgggcagctaagcgcactggaaaaacgggtcagcgagttgggtatgccgctgatccattttgataatcaacctttatggcagatagctatggtgctacaggccacgcaggcgcaacggctgggattgcgcccggactatggcattgattatcagctattacaggctgcccgcgaaatgtcgctgccggtgcaagagctggaaggggcgaaacaccagctcgaactactctgcgatctgcccgatggcgggatggcgctgctcgacgacacgctgacgcactggcacaccaacgcacggcttttgcaggtgatgatcggctggtggcttgaagcagcgcaccagcgtcgcgttcgcttcccagaacgtttagccagccgctgtatgatgtactgatggtaaaacgcaatgaagcctggcgnacgcgctgctggcactgtcgccgggacgctacgtggtagccgtaggggcgctacatctgtacggcgaaggcaacctaccgcaaatattgaaataaaaa

SEQ ID NO: 36698 - DNA, 790 bp, Salmonella paratyphi A
  misc_feature (626)..(626): n=g, a, t or c
atgccgattcaggttctgccgccgcagcttgcgaaccaaatcgccgctggcgaagtggtggaacgccctgcgtcggttgttaaagagctggtagagaatagtctggatgcaggcgccacccgcgttgatatcgacatcgagcgtggcggcgcgaagcttattcgtattcgcgacaatggctgcggcattaaaaaagaggagctggcgctggcgctggcccgtcatgccaccagtaaaatcgcctcgcttgacgatctggaagcgattatcagtctgggatttcgcggcgaagcgctggcgagtatcagttcggtctcgcgtttgacgctaacgtcgcgcacggcggagcaggcggaagcctggcaggcgtatgcggaagggcgtgacatggacgtgacggtaaaacccgccgcgcacccggtcggcaccaccctggaagttctggatctcttttataatagcccccccggcgcaaattcatgcgtaccgaaaaaacggaatataatcatatcgatgagatcatccgtcgtattgcattggccagtttgacgtcacgcttaacctgtcgcacaacggcaaattggtacggcagtactcgcgtgtcgcaaaggacgagacaaaaaagnacgcgattaaggcgccactctgccacgccgtttctcgaacaggcactggcgatacgagtggcagacatggcgatacatgaccctgcggcctgggtcgccgatccgaatcacaccaccacggcgttaacggagatccagtactgctatgtgaatgagaccatgaa

SEQ ID NO: 36699 - DNA, 840 bp, Salmonella paratyphi A
atgacaacagacaatccgctgatctcaatttatatgccaacctggaacaggcagcagttggctatccgggcgattaaatcagtactacgtcaggactaccgtcactgggagatgatcatcgtggatgattgctcttcatcttatcagcagctacaacaatttgttgaggagctgaacgacccgcgcgtccgttatacccataacgccaggaataccggcgcctgcgcggttcgcaaccaggccattatgcaggcgcaagggcactacattaccggtattgatgatgacgatgaatggacgccaaaccgtctgagcgtgtttctggcccataaacaccagttgactacgcacgcctttttgtatgccaacgactatgtgtgcgagggcgaggtctactctcagcctgccagcctgccgctgtatccgaaatccccttattcgcgccgcttgttctacaagcgcaatattattggcaatcaggtttttacctgggcctggcgttttaaagcgagtttgttcgataccgaactcaaggcggcgcaggattacgacatttttctgcgcatggtggtggagtatggcgaaccgtggaaagtcgaagaggcgacgcaaattttacatatcaaccacggcgagatgcagattacctcttcgccgaaaaagttctccggctatttccatttttatcgtaagcacaaagataaattcgatcgcgccagtaaaaaataccagctttttacgctgtaccaaattcgcaataagcgaatgacctggcgcacgttgctgacgttgctctccgtgcgtaatagcaaacgcctggcggccgggctgcgggggcga

SEQ ID NO: 36700 - DNA, 486 bp, Salmonella paratyphi A
  misc_feature (129)..(129): n=g, a, t or c
atgctggaagacttacgcgcgaatagctggagcttacgcccctgttgcatggtgctggcctaccgtatcgctcatttttgttccgtctggcgcaaaaagaatgtgctgaataatctgtgggctgcgcgngtgctggtgctgtatcgcgtaatcacggaatgcctgttcgggtatgaaatccaggccgccgcgaccattggtcgcgggttcactatccatcatggttacgcggcagtgatcaacaaacatgtcgtcgccggcgacgattttaccattcgccacggcgtcaccattggcaatcgcggcgcggacagcctggcttgtccggtgattggtcacggcgttgagctgggggcgaatgtcatcctgcttggcgatattactatcggtaatcacgtcacgattggcgcgggtagcgtggtgcttgacagtattccggatcatgcgctggtggtgggagaaaaagcacgggtgaaggtcagcaca

SEQ ID NO: 36701 - DNA, 1643 bp, Salmonella paratyphi A
ctgctgttgcgtcggtaatcgcaggtgattgagctgtctgagcagagtgacgcgcagatgcggtagttgcggcgcgattgatcgccatgattttccaggagccaatgacctcgctcaacccggtatttaccgttggcgagcaaattgccgaatctattcgtttgcatcagggcgccagccacgaagaggcgctggggaacgaaacgtatgctcgatcaggtacggatcccggagtcgcaggcgattttatcgcgttatccgcatcagctttccggcgggatgcgccagcgagtcatgatcgcgatggcgctatcctgtcgtccggcggtattgattgccgatgaacccaccacggcgctggatgtcactatccaggcgcaaattctgcaacttatcaaagtgttgcagcaagagatgtcgatgggcgtgatttttatcacccacgacatgggtgtcgtggcggatatcgcgatcgcgtgctggtgatgtatcagggcgaggccgtggaaaccggcagcgtagagcagattttccatgcgccgacgcatccttatacccaaacgttactggccgccgtccctcagcttggcgcgatgcggccactcgctgccacgccgtttcccgttgatttccgctgacgaaccggccctttatgaatcgcagattgagcaagacacggtggtggaaggcgaacctattctccaggttcgggggctggtgacgcgattcccgctgcgtagcggtctctttaaccgcgttacgcgtgaagttcatgccgttgagaatatcagtttcgatctctggcccggcgaaacgttatcgctggtgggcgagtccggtagcggaaaatcgacgaccggacgcgcgttgctgcggttggttgaatcccggcagggggagattatctttaacggccagcgcattgactcgctgtctgcgggtaaactccagccgttgcgccgcgatattcagtgtattttccaggacccttacgcctcgctcgacccgcgccagaccgtggggtattccattatggaacctttacggattcatggcctggggcagggagacgctgcggcaaagcgcgtggcctggttgcttgagcgtgtcggattacgtcctgaacatgcctggcgttatccgcatgagttttccggcggtcaacgtcagcgcatctgcatttgtcgcgcgttggcattgaatcctaaagtgattattgccgatgaggcggtctccgcgctggatgtttccgttcgcgggcagatcattaatttactgctcgatttacaacgggaaatgggatcgcctacctgtttatttcgcatgatatggcggtcgtggagcgaattagccatcgcgtggcggtgatgtatcttggtcaaattgttgagatggggcgcgcgcgccgtttttgaaaatccgcagcatccttatacgcgtaaattgatggcgcggtgccggttgccgatccctccagacaccggccgcggcgcgttctgctatcagatgatatacccagcaatattcataaacgtggcgaagagacgcccgccgtttcattacagttggtcgggccgggacattatgttgcgcgaccgctgcaggataatgcgctctcgcgcttataacattcagactggcag

SEQ ID NO: 36702 - DNA, 995 bp, Salmonella paratyphi A
gtgagtcgtacaactattctcgatgacgccacgggagcgatatcgatgaacaacgccattctcagccggttcaatttattaaacgcggtacagcgcctttcatgcgcgtcacgctggctcttttttccgcgggcctggcgactttcgcgctcctttattgcgttcagcctatactaccggtactttcccaggagtttggcgtctcccccgccagcagcagcgtgtcactttctatgtctaccggccatgctggctatcggcttacgttttaccggccgctttctgatgcgataggccgtaaaccggtgatggtcaccgccttgttattagcctcctgctgcacattgttatcaaccatgatgaccagctggcatggtattctgattatgcgcgcgctgatcggtctgtcgttaagcggcgtccggtggaggaatgacctacctgagcgaagaaatccatcccagctttgtcgctttctctatgggactctatattagcggtaattccatcggcgggatgagcgggcgtttattaagcggcgtcatgaccgacttttttaactggcgcatcgggccggccatcggatgctttgcgctggcgtctgcgctgatgttctggaagattttacccgcctcgcaacatttccgtcctacatcgctacggcctaaaacgctatttattaatttccgtctccactggcgcgatcgagggttaccactgctgtttgcggaaggttttttactgatgggcgcgttcgtcaccctgtttaactacattggttatcgcctgatgctctccccttgggaattaagccaggccgtggtcggactgttatccgtagcctatctcaccggcacatggagctcgccgaaagctggcgcaatgacctcacgctatggccgggggcggtgatgctgttctctatcgcagtaatgctgggcgggcttttactgacgctttttacctcgctttggctgatttttgccgggatgctg

SEQ ID NO: 36703 - DNA, 818 bp, Salmonella paratyphi A
atgcataaaaccattgctgtattactgggcatagtgtgttttttaccggttatggcgaaagccaggggggctgaaacagacgccacggatgccagcgacgtcaaaacgcttttttttaaccatgacgatcgggtgcccgtcgccgatcctacccaatcgccgtgggatgccatcgggcaactagagaccgccagcggtaatttgtgtacggcaacacttatctccccgcatatcgccctgacagcaggtcactgcctgctaacgccaccgaaaggaaaaccagacaaggcggttgcgctgcgttttgtggcgcgaaaaggagtatggcgctatgaaatccacggcattgaaggccgcgttgaaccgtcgctgggccgacgtctgaaagcggatggcgatggctggattgtgccgcctgccgcggcaagctgggattttggtctggtaatattgcgctacccaccttccggtatcacgccagtgcctttatttaccggcgataaagcggcgctcactgcggcgttgaaagccgcagaccgaaaagtcacgcagtccggttatccagaagatcatctgaatgcgctctattcccatcaggattgcgtcgtgaccggctgggcgcagaatgccgtactctcacaccagtgcgacacgttacctggcgacacggctcgccgctcttattgcacacggatagcggatggcagcttattggcgtacaaagctccgcccctgcggctaaagatcgctggcgcgccgataaccgcgctatatccgtcaccggctttcgcgataagctgaaagctctggcgcaggat

SEQ ID NO: 36704 - DNA, 1363 bp, Salmonella paratyphi A
caattcgtttataccatgcatcgtgtcggcaaagtggttccgccgaaacgtcatattctgaaaaacatctcgctgagcttcttccctggcgccaaaatcggcgtgctgggccttaacggcgccggtaagtctaccctgctgcgcatcatggcgggtctcgataaagatatcgagggcgacgcgcccgcagcccggcattaagattggctacctgccgcagaacctcagctaaacccggaacacacggtacgcgagtcgattgaagaggccgtttcggaagtggttaacgccctcaaacgtctggatgaagtgtacgcgctgtacgccgatccggatgccgacttcgacaagctggccgcagagcagggccggcttgaagagattatccaggcgcacgacggtcataacctgaacgtgcagcttgagcgtgctgctgacgccctgcgtctgccggactgggatgccaaagtcgaaaaactgtccggcggcgagcgccgccgcgtggcgctgtgccgtctgttgctggaaaagccggacatgctgctgctcgacgaacccaccaaccacctggatgccgaatctgttgcgtggctggaacgtttcctgcacgacttcgaaggcaccgtcgtggcgattacccacgaccgttacttcctcgataacgtcgccggctggattctggaacttgaccgcggcgaaggtattccgtgggaaggcaactactcctcctggctggagcagaaagatcagcgtctggcgcaggaagcgtctgccgaagcggcgcgccgtaaatccattgagaaagagctggagtgggtgcgtcagggcgcgaaaggccgtcagtcgaaaggtaaggcgcgtctggctcgctttgaagaactgaacagcgttgagtatcagaaacgtaacgaaaccaacgaactgtttattccaccaggaccgcgcctggggaacaaagtcattgaagtcagcaacctgcgtaaatcctacggcgaccgcgtactgatcgacgacctgagcttctcggtgccgaaagcgctatcgtcgggatcatcgggccaaacggcgcgggtaaatcgaccctgttccgcatgatgtccggtcaggagcagcctgatagcggcaccattacgctgggtgaaacgtcaagctggcctcggtcgatcagttccgcgacgcgatggacaacagcaaaaccgtctgggaagaagtgtccggcgggctggatatcatgaagatcggcaacactgaaatgccaagccgcgcctatgtaggccgcttcaacttcaaaggcgtcgatcagggcaaacgcgttggcgaattgtccggcggtgagcgtggtcgttgcatctggcgactgcct

SEQ ID NO: 36705 - DNA, 989 bp, Salmonella paratyphi A
gtgttaaaaaaatatctttcgcttttactcctgtgcgcggcgcctgctttcgccaaacccgttctcaccgtctatacctacgactcgttcgccgccgactgggggccaggccggcggtgaaaaaagcgtttgaagccgattgcaactgcgagctgaaactggtggcgctggaggatggcgtttcgctgctcaaccgcctgcggatggaggggaagaacagcaaagccgatgtggtgttggggctggacaataatctgctggaggcggccacgcaaactaaactctttgccaaaagcggcgtggcgaatgaggcggtcaaggtgcccggcggctggaaaaacgacacatttgtgccgttcgattacggctatttcgcctttgtctacgataaaagcaagctgaaaaatccgccgaaaagcctgaaagaactggtcgagagcgatcaaaaatggcgggtgatttatcaggacccgcgtaccagtacgccagggctggggctgttactgtggatgcgcaaagtctatggcgataacgcgcgcaggcctggcaaaaactggcggccaaaacggtgacggtgacgaaaggctggagcgaggcctacggtttatttctgaaaggtgaaagcgatttggtgctcagttacaccacctctccggcgtatcacattattgaagagaagaaggacaattacgccgccgcgaacttcagcgaaggccattacttacaggtagaagctcgcggcgcgtaccgtcgccagtaagcagccggaactggcggagaaattcctcaaatttatggtttctccggcgtttcagaacgccatacccaccggcaactggatgtacccggtagcggacgtcgccttacccgcagggtttgaatcattggccaaacccgccacaacgctggaattcacgccgcaacaagtggcagcacaacgccaggcatggattagcgaatggcaacgcgccgtcagccgttaattcccg

SEQ ID NO: 36706 - DNA, 1648 bp, Salmonella paratyphi A
atgccctcaggtcgcctgcaacaacaatttatccgtctctggcaatgttgtgacggtaaaacgcaagacaccacgcttaatgagctggcggatctgctgaactgttcgcgtcgccatatgcgtacgctgctaaatacgatgcaggcgcgcggttggctaacatgggaagccgaggtcggacgcggaaagcgttcgcgtctgacgttcctgtataccggactggcgctgcaacagcagcgggcggaagacctgctggaacaagatcgaatcgatcaactggtacaactggtcggcgataaaagcgctgtcaggcaaatgctgatttcccatctgggacgcagcttccgccaggggcggcatattctgcgggttctttactatcgtccgatgcacaatctcctgccgggaaccgcattacgtcgctcggaaactcatattgcccggcaaattttcagttcgctcacgcgggtaaatgaggaaaacggggaactggaagcggacattgcgcaccactggcagcaaatttcccctttactgtggcgcttctacctgcgccccggcattcattttcatcatggccgcgagctggagatggaagatgtcatcgcctcgctgacgcgtatcaatacgcttccgctttactcgcacatcacaaagatagactcccctaccgcgtggacgctggatattcatctttcccagccggatcgctggttgccgtggctgctgggccaggtcccggcgatgattttgccgcgggagtgggaaacgctggctaatttcgccagccaccctatcggcaccgggccttatgccgtgcggcgtaatacgccaaaccagctcaagatactcgcctttgatgattacttcggctatcgggcgttgatagacgaagtgaacgtctgggtactgccggatatcagtgaagaaccggcctgcggcttgatgctggaagggccaatacaaggcggtgaaaaagcgatagaaagccgactggaagaggggtgctattacctgctattcgacgccagaacgccgcggcgcgatccgcaggtcagagaatgggtaagccacgtcctctcccccaccaatttactctatcatgccgatgaaccgctacagcagctctggttcccggcctatgggcttttaccgcgctggcaccacgcccgtccaggcccgggcgaaaaacccgccgggctggaaaccctcacgctgaccttctatcgcgaacacattgagcaccgggttatcgcccgtatcatgagcgcgcttctggctgaacatcaggtgcatctgcatattcaggagatcgactacgatcaatggcacgccggcgagatcgaaagcgatatctggctcaatagcgctaaattttacgctgccgctggatttctcgctgttcgcgcacctgtgcgaagtaccgctcttgcagaactgcattccgcgcgactggcaggacgacgccgcgcagtggcgcgctggcgagatgaacctggcgaactggtgccagcaactgctggccaacaaagcgattgtgccgttgatccaccactggctgattatccagggacaacgcagtatgcgcgggctgcgcatgaataccctcggctggtttgattttaaatcggcgtggtttgcgccgcca

SEQ ID NO: 36707 - DNA, 1398 bp, Salmonella paratyphi A
  misc_feature (326)..(326): n=g, a, t or c
cacatcggtgcttaccacgttgaaactgacaacgggatgatcaccttcctggacaccccgggccacgccgcgtttacctccatgcgtgctcgtggtgctcaggaacggatatcgtggttctggttgttgcagcagacgacggcgtgatgcgagaactatcgaagctatccagcacgcgaaggcccaggtgtgcgttcgtggttgcggtgaacaaaatcgataagccggaagcgtatccggatcgtgtgaagaacgaactgtcccagtacggcattctgcattagagtggggcggcgagacagttcgttcacgtgtctgcgaaaggngcaccggtatcgacgaactgcttgacgctatcctgctgcaggccgaagttctggaactgaaagcggttcgtaaaggtatggcgagcggcgcgctgatcgaatccttcctggataaaggtcgtggtccggtggctaccgttctggtacgcgaaggtacgctgcataagggcgatatcgtgctgtgtggcttcgaatacggccgcgtgcgtgcgatgcgtaacgaactgggtcaggaagtgctggaagcgggtccgtccattccggtggaaatcctcggcctgtccggcgttccggctgccggtgacgaagtgaccgtggttcgcgacgagaagaaagcgcgtgaagttgctctgtatcgtcagggtaaattccgtgaagttaaactggctcgtcagcagaaatctaaactcgagaacatgttcgccaacatgaccgaaggcgaagttcacgaagtgaacatcgtgctgaaggctgacgtacagggttccgtggaagcgatctccgactccttgctgaaactgtctaccgacgaagtgaaagtgaagatcatcggttctggcgtaggtggtatcaccgaaaccgacgcgaccctggctgcggcgtccaacgcgattctggtgggcttcaacgttcgtgctgatgcttctgcgcgtaaagtgattgaattcgaaagtctggatctgcgttactactccgtcatctataacttgatcgacgaagtgaaagcggcgatgagcggcatgctgtctccggaactgaaacagcagatcatcggtctggctgaagtgcgcgatgtgttcaaatcgccgaaattcggccgatcgcgggctgtatggttaccgaaggtacaattaaacgccataacccaatccgcgtactgcgcgacaacgtggttatctatgaaggcgagctggaatccctgcgccgcttcaaagatgacgttaacgaagtccgtaacggcatggaatgtggtatcggcgtgaagaactacaacgacgttcgcgttggcgatatgattgaagtgttcgagattatcgagatccaacgtaccatcgcttaatcttcgtcgtct

SEQ ID NO: 36708 - DNA, 942 bp, Salmonella paratyphi A
atgagtcgtcctcgtcgtcgtggccgcgacattcacggcgttctgctgctggataagccgcagggtatgtccagcaatgacgtgctgcagaaagttaagcgcatctacaatgccaaccgcgccgggcataccggcgcgctggacccgctggcgaccggcatgttgccgatttgcctcggcgaagcgacaaaattttcgcagtacttgctggattctgacaaacgctatcgtgttatcgcccgtctggggcagcgcacggatacctctgacgccgatggtcaaatcgtgcaggagcgtccggtgactttcagcgctgagcagcttgcgagcgcgctggagacctttcgtggggatatcgaacagattccctcgatgtattcggcgctgaagtatcagggcaagaagctgtacgaatatgcccgccagggtatcgaagtgccgcgcgaagcccgcccgattaccgtctatgagctgctgtttattcgccatgaaggtaatgagctggagctggaagttcactgctccaaaggcacctatattcgtaccattattgatgatttaggtgagaagctgggctgtggcgcgcacgtaacgtacctgcgtcgtctgacggtcagcaagtatccggtggatcgtatggtgacgctggagcatttgcagacgctggtagcacaggcggaacagcagggcgttccggcggcgcagtggctcgatccattattgatgccaatggatagtccggcttcggactatcctgttgttaatctgccgttaacatcttcggtatacttcaaaaatggcaacccggttcgtaccacgggcgcgccgttgaagggactggttcgtgtgacggaaggtgaagacgataaatttatcggtatgggcgaaattgacgatgaaggccgtgtcgcgcctcgtcggctggtagtagagtacccggcg

SEQ ID NO: 36709 - DNA, 267 bp, Salmonella paratyphi A
atgtctctaagtactgaagctacagctaaaatcgtttctgagttcggtcgtgacgcaaacgacaccggttctaccgatgttcaggttgctctgttgactgcacagattaaccacctgcagggtcactttgcagagaataaaatagatcaccacagccgtcgtggtctgctgcgtatggtttctcagcgtcgtaaactgctcgactacctgaaacgtaaagatgttgcacgctacaccgcgctgattgagcgtctgggtctgcgtcgc

SEQ ID NO: 36710 - DNA, 2653 bp, Salmonella paratyphi A
  misc_feature (697)..(697): n=g, a, t or c
gaaatgaacgacgaacccttgcgtcctgatccggatcgcttgttggaacaaacgcccccgccccaccgggggaagttgaaaattttcttcggcgcctgcgcaggcgtcggaaaaacctgggcgatgctggcgcaacgcagcggctgcgagcgcaggggctggatgtggtgatcggcgtggtagagacgcacggccgtgaagagaccgccgcactacttgacgggctgaccattctgccgccaaaacgtcactcgcaccgggggcggcaaattcgcgaatttgacctggatgccgccctcgcccggcgtccggcgctgattttaatggatgagctggcgcacagtaacgcgcctggctcacgccatcctaagcgctggcaggatattgaagagctgctggaagcgggaatcgacgttttcaccaccgtgaacgtacaacatctggaaagtctgaacgatgtggtgagcggcgtcacggggattcaggtgcgcgaaaccgtccccgatcccttttttgatgccactgatgaagtcgtactggtcgatctgccgcccgacgatctgcgccaacggctcaacgaaggtaaagtgtatatcgccggtcaggggaacgcgctattgaacattttttccgcaaggcaatctgatcgccctcgcgagctggcgctacgcggacagccgatcgcgtggaacgaatntagtctggcgcgcgcatccgagcgaagaaaaagtatggcacacccgcgatgcgattttactgtgtatcgggcataacaccggcagcgaaaaactggtgcgtaccgcggcgcgtctggcctcccggctcggcagcgtctggcacgccgtctatgtcgaaacgccaacgttacaccgcttaccggaaaaacaacggcgggctattttaagcgcgctgcgctggcgcaggagcttggcgcggaaaccgccaccctgtccgatcccgccgaagagaaagcggtcgtgcgctatgcccgcgagcataatctggggaaaatcgtcatgggccgcccggcgtcgcgacgctggtggcgacgtgacgctttcgccgaccgtcttgccaggcgcgcgccggatctcgatcaggtgatcgtcgcgctggaagagccgccagcccgcgcattggcgcaaacgcctgataaccgtccttttaaagagaaatggcgtgggcagattcagggctgtctggtcgccggcgtttgcgccatcaccacgcttatcgctatgcagtggcttgtcaccttcgacgccgccaatctggtgatgctctatttgctgggcgtagtggtgattgcgctgctttacggacgctggccgtcggtggtagcgacggtgattaacgtggcgagtttcgatctcttttttatcgcgccacgcggtacgctcgccgtttcggacgtgcagtatttgctgacctttgccgtgatgctgacggttggtctggtgattggcaatcttactgccggggtgcgctatcaggcgcgcgtcgcccgttatcgggaacagcgtacccgccatttatatgaaatgtctaaagcgctggccgtcgggcgtagcgaacatgatatcgccgcgaccagcgagcggtttatcgcctcgacgtttcaggcgcgcagccaaattttattacctgatgctaacggtaagttgctgcctctcacccaccagcaaggcatgacgccgtgggacgacgcaattgcgcgctggagttttgataaaggccagcctgccggcgcaggcaccgataccctccctggcgtgccttatcaaatcctgccgctgaaaagcgccgataaaacgtacggtctggctatcgtcgaaccgggtaatttgcgtcagttaatggtgccggagcagcaacgcctgctggaaacattcactctgcttgtcgccaacgcgctggaacgactgacgctgaccgccagcgaagaacaggcgcgtctcgcgagcgagcgagaaagtattcgcaacgctctgctggcggcgctgtcgcatgatttacgcacgccgctgacggtattgttcggccaggcggaaattttgacgctggatttagccagcgcaggatcgccccacgcgcgtcaggccagtgaaatccgccagcatattctcaacaccacccggctggtgaataatttgctggatatggcgcgtattcagtccggcgggtttaatcttaaaaaagagtggctgacgctgggagaggtcgtcggtagcgcgttacagatgttagagccgggtttattgcatccgattacattgtcgctgccgcaacagttaacacttatccatgtcgatggccctttatttgagcgtgtcctgatcaacttgctggaaaacgccgttaagtatgccgggccgcaggccagtatcggcattgatgctgcggttaaggacgatcgtttacaactggatgtctgggatagcgggccgggtattcctgcggggcaagaacagaagattttcgataaattcgcccgcggcaacaaagagtccgccgtccccggcgtggggctggggctggcgatttgccatgctatcgtagaggtacacggcggcaccgttaccgcctataatcgaccgcaggcggcgcctgtttccgtgtgacgctgccgcaaggaaaaccacctgaacttgac

SEQ ID NO: 36711 - DNA, 1077 bp, Salmonella paratyphi A
atggctatcgacgaaaacaaacagaaagcgttggcgcacaatgggccaaattgaaaagcaatttggtaaaggctccatcatgcgtctgggtgaagaccgttctatggatgtggaaactatctccaccggttcgctttcactggacatcgcactcggtgcggcggtctgccgatggggcgtatcgtcgaaatttacgggccggaatcttccggtaaaacgaccctgacgctgcaggtgattgccgctgcgcagcgtgaaggtaaaacctgtgcgtttatcgatgcggaacacgcgcttgaccctgtttacgcacgcaagctgggcgtcgatatcgataacctgctttgttctcagccggataccggcgagcaggcgctggaaatctgtgacgctggcgcgttcaggcgcggtggacgtcattgtggtcgactccgtagcggcgtaacgccgaaagcggaaatcgaaggcgaaattggcgactctcacatgggtcctgcggcgcgtatgatgagccaggcgatgcgtaagctggcggggaacctaaaacagtccaacacgctgttgattttcatcaaccagatccgtatgaagattggcgtgatgttcggtaacccggaaaccaccaccggcggtaacgcgctgaaattctacgcctctgttcgtcttgatatccgtcgtattggcgcggtgaaagagggcgataatgtcgtgggtagcgaaacacgtgtgaaagtggtgaaaaacaaaatcgccgcgccgtttaagcaggccgagttccagatcctctacggcgaagtctatcaacttctatggcgaactggttgacctgggcgtgaaagagaagctgatcgagaaagcgggcgcatggtacagctacaacggcgagaagattggccagggtaaagcgaacagttcgtacctggctgaaagagaacccggcgacagaatagagatcgagaaaagggttcgtgaattactgttgagtaatcagaatgccacgcccgatttcgccgttgacgatagcgaagggttgcagaaaccaacgaagatttttaatcatcaggtgatggtgggtcg

SEQ ID NO: 36712 - DNA, 500 bp, Salmonella paratyphi A
atgagtgaacccacatcgcgccgtcccgcttatgctcgtctccttgatcgtgcggtacgtattcttgctgtccgcgatcacagcgagcaggaattacggcgtaaactctccgcgccggtgatgggcaaaaatgggccggaagagattgatgcgacggcagacgattatgagcgcgtgatcgcctggttccacgaacatcactatcttgatgacgagcgcttcgtgatgcgctttatcgccagtcgtagccgcaaaggctatggcccggcgcgtattcgccaggaattgaatcagaaaggcatttcccgtgaatcgactgaaaaagcgatgcgagaatgtgaaattgactggagtgaaatggcacgtgaacagcccgttcgcaaatatgggagccgctcccttcaaacttttcagaaaaggttaaggtacagcgctttttgctctatcgcgggtatctgatggacgatatccagcaaatatggcgaaattttgcagattga

SEQ ID NO: 36713 - DNA, 2621 bp, Salmonella paratyphi A
accgctgagatccgtcaggcgtttctcgactttttccatagtaaagggcatcaggtagttgccagcagttccctggtgcctaataatgaccccactctgttgtttaccaatgccgggatgaaccagttcaaggatgttttccttgggctcgataaacgtaattattcccgtgcaaccacttcccagcgttgcgtacgcgcggggggtaaacacaacgatctggaaaacgtcggatacactgcacgtcaccatactttcttcgaaatgctgggcaacttcagcttcggcgattacttcaaacacgacgccattcagttcgcatgggaattactgaccggtgaaaactggtttgctctgccaaaagagcgtttatgggtcaccgtttatgaaaccgacgacgaaacctatgagatctgggaaaaagaagtcggcatcccgcgcgagcgtatcatccgtatcggcgacaataaaggcgcgccatacgcatcggataacttctggcagatgggtgataccggtccctgcggtccgtgcaccgaaatcttctacgatcatggcgaccacatctggggcggccctccgggaagcccggaagaagacggcgatcgctatattgagatctggaacatcgtctttatgcagttcaaccgtcaggctgacgggactatggaaccattgccgaaaccgtctgtagataccggtatggggctggagcgtattgccgcggtactgcaacacgttaactctaactatgacatcgacctgttccgcacgttgattgaagcggtagcgaaagtcaccggcgccaccgatctgggtaataaatcgctgcgtgttatcgccgaccatatccgttcctgcgcattcctggttgccgatgcgtgctgccgtcaaatgaaaaccgtggctatgtgctgcgtcgcattattcgtcgcggtgcgtcacggcaacatgctgggcgcgaaagagaccttcttctacaagctggttgggccgctgattgaggtaatggcgtcgcaggcgaagagttgaaacgtcagcaggcgcaggtcgagcaggttctgaaaacggaagaagagcagttcgcccgtacgctggagcgcggtctggcgctgctggatgaagaactggcgaaattgcagggcgacaccctggatggcgaaaccgctttccgtctgtatgatacttatggtttcccggtcgatctaacggcggacgtctgccgtgagcgcaacatcaaagtcgatgaagtcggttttgaagccgctatggaagagcaacgccgtcgcgcgcgcgaagctagcggttttggcgcggactacaacgcgatgatccgcgttgacagcgcttctgaatttaaaggttatgaccatctggaactgaacggcaaagtgaccgcgctgtttgtcgatggtaaagcggttgaagcgattaacgcgggacaggaagcggttgtcgtgctggatcagaccccattctatgcggaatcaggcggtcaggttggcgataaaggcgagctgaaaggcgctggatttactttcgctgtggacgacacgcaaaaatatggtcaggcgattggtcatatcggcaaattgtctgcgggcgctctgaaagtgggcgatgcggtacaggctgacgtagatgaagcgcgccgcgcacgtatccgtctgaaccactccgccacgcacctgatgcacgcggcgttgcgccaggtgcttgggacacacgttgcgcagaaaggttcgctggttagcgataaagtgctgcgcttcgacttctcgcacaatgaagcgatgaagccgtcggagattcgtcaggttgaagatttggtgaatgcgcaaattcgccgcaacctgccgattgaaacgaacatcatggatctcgacgcggcgaaggcgaaaggggccatggcgctgtttggcgagaaatatgacgaacgtgtacgcgttctgagcatgggcgatttctctactgaactgtgcggcggtactcacgccagtcgtaccggtgatatcggtctattccgtattatctctgagtccggcaccgcagcgggcattcgtcgtattgaggcggtaaccggtgaaggcgctatggccaccgttcatgcgcaaagcgatcgcttaaacgatattgcgcatctgctgaagggcgacagccagaatttgggcgacaaagtgcgtgccgtgctggaacgtacacgtcagctggaaaaagagttgcagcagttgaaggaccaggccgcagcgcaggagagtgcaaatctttccagtaaagcggtcgatctcaacggcgtgaagctcctggtcagcgagcttgctggtattgagccgaaaatgctgcgaaccatggttgatgatctgaaaaatcaactggtgtctaccgttatcgtactggcaacggttgttgaaggtaaggtttctctgattgcgggcgtgtcgaaggatgtgaccgaccgggttaaagcaggggaattgattggtatggtcgctcagcaggtgggcggtaagggtggcggtcgtccggacatggcgcaagccggtggtacggatgcggcagctctgcctgcagcgttagccagtgtacaaggctgggtcagcgcaaaattgcaataattataa

SEQ ID NO: 36714 - DNA, 2074 bp, Salmonella paratyphi A
ctggataatgtcgcggttgtcgctattgatgtccctggagaaaaggtgaacaccctgaaagcggagtttgccgcgcaggtacgcgccatcctgaagcagatccgggaaaataaagcgttgcagggcgttgtttttatctcagccaaagcagataactttattgctggcgctgatatcaacataataggccactgccaaaacgcgcaggaagcggaaacctggcgcgtcagggacaacaactgatggcggagatccaggcgttgcctgttccggttatcgccgccattcacggcgcctgtctggggggcggccttgaaatggcgctggcctgccatcggcgcatctgtaccgatgacgttaaaaccgttcttggactgccggaggtacagttagggcttttaccgggatcgggcggaacgcagcgacttccacggctggtgggggtcagtaccgcgctggatatgatcctgataggtaaacagcttcgcgccagacaggcgcttaaagccgggctggttgatgatgtggtgccgcaaactattttactggaagcggctgtcgagctggctaaaaaagaacgtctggcgcaacggacattaccggtccgtgaacgtatcctggcagggcgctggggcgcgcgctgttatttcgcctggtgcgtaaaaagacggcgcaaaaaacgcagggtaattatccggcgacggagcggatcattgatgtgattgaaaccggactggcgcagggcagcagtagcggctatgaccggaagcgcgcgctttcggcgagctggcgatgacgccgcaatcgcagggctgcgcgctgttttttttgccagtaccgaggtgaaaaaagatcccggtagcgatgcgccgcccggcccgctgaacagcgtgggcatcttaggcggcgggttaatgggcggcggtatcgcctgggttacggcctgtaaaggcggtttgccagtacgaattaaggatataaatactcaggggatcaatcatgctctgaaatacagctgggatctgcttgaaacaaaagtacgccgccgccatatcaaagccagcgaacgcgataaacagttggcgttgatatcaggttcgaccgattaccgtggtttcagtcatcgtgatctggtcattgaagcggtgtttgaagatctgccgttaaaacaacagatggtggcggaagtggagcaaaattgcgctactcacaccatttttgcctccaatacttcttccctgccgattggcgatattgcggcgaatgcggccagaccggaacaggtgattggattgcacttttttagcccggtcgaaaaaatgccgctggttgaggtcattcctcacgcgtctacttccgcgcagaccatcgccacgaccgttaagctggcgaaaaaacagggtaaaaccccgatagtcgtcagtgataaagccgggttttatgttaaccgaattcttgcgccatatatcaatgaggcgattcggatgctgactgaaggcgaacgcgtcgaacatattgacgccgccctggtaaaatttggttttccggtggggccaatccaacttttggatgaggtaggaatcgacacgggcactaaaattattcctgtgcttgaggcggcgtatggagaacgttttagcgcgcctgcaaatgttgtcgcttcaattttgaatgacgatcgcaaaggtagaaaaaatggtcgcggtttctatctttatggcgaaaaagggcgtaaaagcaaaaaacaggttgaccctgctatttataagcttattggcgtgcaagggcagagtcgactgtctgcgcacgagtggcagagcgctgtgtcatgttaatgcttaacgaagcggcgcgctgtttcgacgaaaaagtgattcgcagcggcgcgcatggcgatatcggcgccgtgtttggtatcggttttccgccgtttctcggtggcccgttccgctatatggatgctctcgggccgggtgaaatggtggcgacattacagcgcctggccgcactttacggtcctcgttacgcgccttgtgaacaattagtgcgcatggcggagcgcagggagcatttc

SEQ ID NO: 36715 - DNA, 1320 bp, Salmonella paratyphi A
atgcgtcaggctttaccgttggtcacacgccagggcgatcgcattgctattgtcagtggttacgaaccccctttgctcgtcaggccactgcatttcatggtattcccgctgttgatctcggcaagatggtggtaggcgagctgtggcgcgcagtgaaattccagccgatgccattgagcaactggtttttggtcaggtagtacaaatgccggaagcccccaatattgcgcgcgaaattgtgctgggtacggggatgaatgttcataccgatgcctatagcgtaagccgcgcctgcgccaccagttttcaggcggtagcgaatgtggcggaaagcctgatggctggcacgatacgcgcgggtatcgctggcggcgcagattcgtcgtcggtactgccaataggcgtgagtaaagccctggcgcgggtactggttgatgtcaataaagcccggacgacccgccaacggtgacgcttttttctcgtctgcttacgcgacctgctgcccgttcctcccgctgttgctgagtattccaccggtctgcgcatgtgcgataccgccgaacagatggcgaaaacgtatggtattacgcgtgaacagcaggacgcgtggcgcatcgttcacactcacgcgccgcgcaggcatgggcggagggcaaactggcggaagaagtgatgacgacctatgtgccgccgtataaaaacccctttgcagaagacaacaacattcgcggcgcctccacgctggcggactacgctaaactcgtcccgcttttgaccgaaaacatggctccgtaaccgccgccaacagtacaccgctgtaccggccgtgccgccgttattctgatgaccgaatcccgcgctaaagagctggggctgcacccgcttggttatctgcgcatacgcctttaccgctattgatgtctggcaggacatgctattggggccggcctggtcaacgcgtggcctggagcgggccgggttgacgatggccgatctgacgctttttgacatgcatgaagcgtttgccgctcagactctggcgaacttacaactgctgggcagcgaacgatttgcccgtgaggtgcttggtcgtgccaggcgacaggggaggtggatgacgctaaattcaacgtgctcggcgctcaatcgctacgggcatccttttgccgcaacgggcgcgcggatgataacccaaacgttgcatgaattacggcgtcggggcggaggttttgcctggtcacggcctgtgcagctggcggtcttggcgcggcgatggttctggaggcggaataatgactaccacatcagcttttatgctta

SEQ ID NO: 36716 - DNA, 308 bp, Salmonella paratyphi A
  misc_feature (186)..(186): n=g, a, t or c
gtcgaaatacagaggaaatctacaatgagtaaatgcagtgctgatgaaaccccggtttgctgctgtatggacgttggaaccatcatggacaactccgattgcaccgcgtcatacagccgcgtattcgctacccgcgcagaggctgaagagacgctggcggcgttaaccgaaaaagcgcgtagtggnagtctgaaccttgccaaattacgccaacctttaccgaggaatccgaaggcgttcgtctggatattgattttgttttcgcctgcgaagcagaaacgctgatcttccagctcggcctgcgttaa

SEQ ID NO: 36717 - DNA, 945 bp, Salmonella paratyphi A
atgattgaatttaaccatgtcagtaaaaccttcggcgatcaacaggctgttagcgacctcaatttgcactttagcgaaggcagcttttcggtgttaattggtacctccggttcgggaaaatcgaccactctgaagatgattaaccgactggtagagcatgatagcggaacgatccgttttgccggggaagagatccgcagcctgccggtgcttgaactgcgccgtcgcatgggctatgccattcagtctatcggtctttttccccactggacggtggcgcaaaatatcgccaccgtaccgcaactacaaaagtggtcgcgtgcgcggattaacgatcgtattgatgaactgatggcattattgggtctggaaagcgcgctggctttctgctatccgcatcagctttccggcgggcaacagcagcgggtcggcgttgcgcgggcgctggctgccgatccgcaggtattgctgatggacgagcctttcggcgcgcttgatccggtaacgcgcggcgcattgcagcaggagatgacccgcattcatcagctactgggacgcaccatcgtactggtgacgcatgacattgacgaggcgttacgcctcgccgaccatctggtgctgatggacgggggccacgttatccaacagggatcgccgctttcgatgctgacctcgccggaaaatgatttcgtgcaggcgttttttggccgcagcgagctgggcgtaaggctgctttcgttacgtagtgtaggcgattatgtacgccggaatgaacagctcagcggcgacgcgctggtggaagagatgacgttacgcgatgcgctatcgatgtttgtcgcccgccggtgcgacgtcctgccggtggcgaatcagcagggcgagccctgtggtacgctccattttcgcgatctgctttcggagacgtccccccgtgaaacgactgtg

SEQ ID NO: 36718 - DNA, 729 bp, Salmonella paratyphi A
gtgaaacgactgtgtgatccgcttctctggcttattgttctgttcttgcttctgctgtttggattgccttatagccagccgttcttcgccgcgctgtttcccgatttgccgcgcccggtctaccaacaggagagttttgccgccctcgcgctcgcccatttctggttggtgggcatctcaagtctgtttgccgtcgtggtgggcgtcggcgcagggattgcggtcacgcgagaaagtgggaaagagtttcgtcccctggtggagactatcgccgtcgtcgggcagacctttcccccggtggcggtactggcgatcgcggtacccgtcatgggttttggtcagcaaccagccattatcgccttgatcctgtatggagtgttgcccatcctgcaggcgaccctggccgggctgggcgcagtgcctgccagcgtgatgagcgttgccagcggtatgggaatgagccgtcgccaacagttgtatcaggttgagctgccgctggccgcgccggtgattctggcgggcattcgaacctcggtgattatcaatattggtacggcgaccatcgcttcaacggtgggggccagtacgttaggcacgccgatcattatcgggcttagcggctttaatacggcctatgttatccagggggcactgctggtggcgctggcggcgatcatcatcgatcgcctgttcgaaaggctgacgcgcgcgcttacccggcacgcaaaa

SEQ ID NO: 36719 - DNA, 1316 bp, Salmonella paratyphi A
  misc_feature (1301)..(1301): n=g, a, t or c
gtgatcgtattcacgaattcatatttttatgcaacagttcaaagaaagttaatcgtactcaatgtatgttacgcgcttttaattgaagtgtggtttgcgggtatgtacgagtttaatctggtgttgctgctgcttcagcagatgtgcgtgtttctggtcattgcgtggctaatgagtaaaacgcgcctgttcatcccgcttatgcaggtcacggttcgtctgccgcacaagcttctgtgttacgtcacgttttctatcttctgcattatgggcacttattttgggctacatatcgaagattcgattgccaatacccgcgcgattggcgcggtgatgagtggcctactcggcgggccggtcgtcggcgggctggtcggcctgaccggtgggttacatcggtattctatgggcggcatgacggcgctgagctgtatgatttccaccatcgtcgaagggctgctgggcgggttggtacacagcgttctcatacgtcgcggacgcccggacaaagtgtttagcccgctgacggcgggagcaattacgtgtgttgccgaactggtgcagatgctgattattttattgatagccaggccgtttgacgatgccctgcatctggtcagtaatattgccgcgccgatgatggtgacgaataccgttggcgccgcgctgttcatgcgtattgtgctcgataagcgcgccatgttcgaaaaatatacttcggcattttctcgtaccgcgctgaaggtcgccgcgtcaacggaggggattctgcgtcagggatttaacgaagtgaacagtatgaaggtggcgcaggtgttatatcaggagttggatatcggcgccgttgccatcaccgatcgcgaaaaactgctggcttttaccggtattggcgacgatcaccatctaccgggcaaacccatttcatcaggttatacgctgaaagcaattgaaaccggagaggtggtttatgccgatggcaacgaagtgccgtaccgctgttcgctacacccgcagtgtaaactcggctcgacgctggtgatcccgctgcgtggcgaaaatcagcgagtcatgggcaccattaaattgtacgaagcgaaaaaccggctgttcagctcaattaaccgtaccctgggagagggtattgcgcagcttttatccgcgcagatcctggccgggcagtatgaacggcagaaggcgttgctgacgcagtcagagatcaagctgttgcacgcgcaggtgaatccgcattttctgtttaatgcactcaataccattaaagcggtgattcgccgcgacagcancaggccagccaactg

SEQ ID NO: 36720 - DNA, 1992 bp, Salmonella paratyphi A
atgtcctcacgtaaagagcttgccaatgctattcgtgcgctgagcatggacgcagtacagaaagccaaatccggtcacccgagtgacccgatgggtatggctgacattgccgaagtcctgtggcgtgatttcctgaaccacaacccgaccaacccgtcctgggccgaacgcgaccgcttcgtgctgtccaatggccacggctcaatgctgatttacagcctgctgcacctcaccggttatgacctgccgatgtccgaactgcagaatttccgtcagctacattcaaaaacccctggtcacccggaagtgggctacaccgctggcgttgaaaccactaccggcccgctggggcagggtattgccaacgccgtcgggatggcgattgccgagaaaactctggcggcgcagtttaaccgtcctggccacgacatcgttgaccacttcacctacgtctttatgggcgacggctgcatgatggaaggcatttctcacgaagtgtgctctctggctggtactctgaaactgggcaaactgatcgcgttctatgatgacaacggtatctctatcgatggtcatgttgaaggctggttcaccgatgacaccgcgaaacgttttgaagcctacggctggcacgttatccgtggcattgacggtcacgatgccgacgccattaaacgtgccacggaagaagctcgcgccgtgactgacaaaccgtccctgctgatgtgcaaaaccatcatcggcttcggttcgccgaacaaacagggtacccacgattcccacggcgcgcgctgggcgaccggaaatcgcgctgacccgcgaacagttgggctggaaatacgcgccgttcgaaatcccgtctgaaatctacgcccagtgggatgcgaaagaagccggccaggcgaaagagtctgcatggaatgagaaattcgcggcttatgagaaagccttcccgcaggaagctgctgaattcactcgtcgtatgaaaggcgacatgccggctgacttcaatgcgaaagcgaatgagttcatcgctaaactgcaggcgaatccatccaaaatcgccagccgtaaagcgtcccagaatgccatcgaagccttcggtccgctgttgccggaattcctcggcggctccgctgacctggcaccgtctaacctgaccctgtggtccggttcgaaagcgattaacgaagatgccgcagtaactacattcattacggtgtgcgcgaattcggtatgaccgctatcgccaacggtatcgccctgcacggcggtttcctgccgtacacctccaccttcctgatgttcgtcgaatatgcccgtaacgcagtgcgtatggcagcgttgatgaaacagcgtcaggtgatggtctatacccacgactccatcggtctgggcgaagatggcccgacgcaccagccggtcgagcaggtggcaagcctgcgcgtaacgccgaacatgtccacatggcgtccgtgcgaccaggtggaatccgcggtggcgtggaaatatggcgtagagcgtcaggatggcccaaccgcgctgattctgtcccgtcagaacctggcgcagcaggagcgtactgaagagcaactggcgaatatcgcccgcggtggttacgtactgaaagattgtgcgggccagccgcagattatcttcattgcgaccggttctgaggttgagctggcggttgccgcctacgaaaaactgactgccgaaggcgtgaaggcgcgcgtggtttccatgccgtccaccgacgcgttcgacaagcaggatgcggcctaccgtgaatccgtgctgccgaaagcggtctctgcgcgtgtggcgattgaagcgggtatcgctgactactggttcaaatacgtcggcctgaacggcgctattgtcgggatgaccaccttcggtgaatccgccccggcagagctgctgtttgaagagtttggcttcacggtggacaacgtgatcgccaaagcgaaagcgctgctgtaatcc

SEQ ID NO: 36721 - DNA, 442 bp, Salmonella paratyphi A
tatgccgttacgctatggctacgtctgctggcgatcgtgtcgacgtcgcagctatggatgcagtatgtgccggttcagcggtttattcgcgccctgttcgcttcacgtctgccacccggcatcgcttacctgttcgctggcccgctgctggtcgtcgaacagctcaaacgacaactgacgatcgttcatgaagcccagcgcgcgcgcgggtaccgctggatgaaggctggtatcagcggctacgggcaatgcctgcgctgatcgtgccgcttacgcaaaatgcgcttaacgatctgacaatacgcggcgcggcgttggatatgcgggggtttcggctgcatcgagcccgaaccacgctgtgggcgccgaaagatagcatgttacaacgggttgcgcggtatggcatggtactgctaatactggcggaagcgggagtatggat

SEQ ID NO: 36722 - DNA, 138 bp, Salmonella paratyphi A; identical to SEQ ID NO: 19174

SEQ ID NO: 36723 - DNA, 1612 bp, Salmonella paratyphi A
atggattcgcaacgcaatcttttagtcatcgctttgctgttcgtgtctttcatgatctggcaagcctgggagcaggataaaaatccgcaacctcagactcaacagaccacgcagacaacgactacgcagcgggtagcccgccgaccagggcgtaccagcagtgccaggggaaaatgattacggtgaaaaccgatgtgcttgatttgactatcaacacccgtggtggtgatgtcgagcaggccttgctcccggcttacccgaaagaactgggttccaacgaaccgttccagctgctggaaaccaccccgcagtttatctatcaggcgcaaagggcctgacacgcgctcggtccggataacccggcgaacggcccacgtccgctgtacaacgtcgagaaagatgcgtttgtactggccgacggtcagaacgaactgcaggttccgatgacttatactgacgccgcagaacacgtttaccaaaacgtttgtctttaagcgtggcgattatgcggttaacgtgaactatagcgtgcagaacaccggcgaaaaaccgctggaagtctccacctttggtcagttaaaacaatccgtcaacctgcctcctcatcgcgacaccggcagcagcaactttgcgttgcatacgttccgcggcgcacggtactccacgccggatgagaagtatgagaaatacaaattcgacaccattgccgataacgaaaacctcaacgtcagctccaaaggcggttgggtggcaatgttgcagcagtatttcgctaccgcatggattccgcgtaacgacggcaccaacaatttctacaccgccaatctgggtaacggcattgtcgctatcggctataaagcgcagcgggtactggtacagccaggccagactggcgcgatgaccagcaccctgtggtcgggcccggaaattcaggataaaatggcggctgttgcaccgcacctggatttgaccgtggactacggctggttgtggttcatctctcagccgctgttcaagttgctgaagtggatccacagctttgtaggcaactggggcttctccattatcatcattacctttatcgttcgcggtatcatgtacccgctgaccaaagcgcagtacacgtcaatggcgaagatgcgtatgctgcagccgaaaattcaggcgatgcgcgaacgtcttggcgatgataaacagcgccaaagccaggagatgatggccctgtacaaagcggagaaggttaacccgctgggcggctgcttcccgctgatcatccagatgcctatcttcctggcgttgtactacatgctgatgggttccattgaactgcgtcatgcgccgttcgcgctgtggattcatgacctgtctgcacaggacccgtactacattctgccgatcctgatgggcgtaacgatgttcttcattcagaagatgtcgccgaccaccgtgaccgacccgatgcagcagaagatcatgacctttatgccggtcatctttacggtgttcttcctgtgggttcccgtcaggtctggtgctgtactatatcgtcagcaacctggtcaccatcattcagcagcagctgatttaccgtggtctggagaagcgtggcctg

SEQ ID NO: 36724 - DNA, 1388 bp, Salmonella paratyphi A
atgagccataacgacactatcgtcgcccagggcaaccccaccgggaacgcggtggcgtgtggtatcctgcgtatttccggtctgaaggcgcgcgcgttgcgcaagaggtgctgggcaagctgccgaagccgcgctatgccgactacctgccgtttaaagatgttgacggcagcgcgctggatcagggtattgcgctgtggttccccggcccgaactccttcaccggtgaagatgtgctggagctacaagggcacggcggtccggtgattctggacctgctgttaaaacgtatcctgacgcttccaggcgtgcgaattgccgaccgggcgagttctccgagcgagcgttcctcaacgataagctcgatttagcccaggcggaagccattgccgacctgatcgatgccagttccgaacaggcgggcgttcggcgctaaactcgttacagggggcattttccgcccgcgttaaccaccttgtggaagcacttactcacctgcgaatctacgtcgaagcggctattgattttccggatgaggagatcgactttctctctgacggcaaaatcgaagcgcagctcaatggcgtcatcgccgatcttgacgccgtggcaccgaagcgcgccagggcagcctgtgcgcgaagggatgaaggtagtgattgccggacgcccgaatgccgggaaatccagcctgctgaatgcgctggcaggccgtgaagcggccattgtcaccgatatcgccggtaccacgcgcgacgtgttgcgcgagcacatccacatcgacgggatgccgctgcatatcatcgataccgccggactgcgcgacgccaacgacgaagttgagcgtatcggcatcgaacgcgcctggcaggagattgaacaggccgatcgagtgctgtttatggtggatggcaccacgacggacgccgttgaccctgccgacatctggccggactttatcgcccgtctgcccaaaaatctaccgattaccgtggtacgtaacaaggcggatatcaccggcgaaacgctgggtattagtgaagtaaacggtcactcactggttcgcctctcggcgcgtaccggcgaaggcgtcgacgtgttgcgtaacaacctcaagcagagcatggggtttgagaccaatatggaaggcgcttcctgggcccgccgccgtcacctgcaggcgctgcggaagccgctaaccatcttgaacagggcaaagcgcagctattaggcgcatgggcgggggaactgctggcggaagagttcgcctggcgcagcaaagcttaagcgagattaccggcgagtttacctccgacgacctgctgggacggattttctccagcttctgtatcggtaaataacgttgtgttgcccggtggcgcgatgct

SEQ ID NO: 36725 - DNA, 1929 bp, Salmonella paratyphi A
atgcgactatcgacgatattctcagctttgatcacgctgctcacgggattaacgatcttcgtgactctgataggttgctcgctaagcttttataacgccgtacagtataagtatgtcagtcgtgtgcaggcgacggcgacagccattgatacgcacctggtgacccatgatattgtctcgctgacgccgcaaatcgacgagctcatgatcgcttccgatattgtgcgtgtcgatctgttgcagggggagcgcagcgtctacagccattctcgcgccagaggttatcggccagccggcaccagcgacatgtatcgcgagctggtcgtaccgctgataaaacatccaggaatgtcgctacgtctggtttatcaggacccgatgggtaattattttcactcactgatcaccacggcgccgctgacgctggcgatcggttttatcgttctgattttgtttttatcggtgcgctggctgcagcggcagctttccgggcaggagcttctggaaattcgctcaacgcgtattctgaacggcgaacgcggggcgaatgtccgcggttctgtttacgaatggccagcgcgcaccagtagcgcgcttgatgtattgctttccgaaattcagtttgctcacgaacagcgtagtcgcctggacaccctcattcgctcctacgccgcgcaggacaccaaaaccggactcggtaaccgtctgttctttgataaccagctggcgacgctgctggaagatcaggaaaaagtgggagtgcatggcgtggtgatgatgatccgcttgccagacttcaatcttctgcgcgacagcctgggaggcaatcaggcggaagagcagatgtttatgcttatcaatctgctatcgacattcattatgcgttacccaggctcgctgctggcgcgttatcaccgcagcgactttgccgtgctgctaccgcatcgaacgctgaaagaagcggaaagtattgccggacaacttttaaaagctgtcgatgcgctaccggctaacaaaatgctcgatcgtgacgatatggtacatatcggcatttgcgcctgcgcgcagcggacagtccaccgatcaggtgatggaacatgctgaagccgcggcgcggaatgccgcctgcaggggggaaatagctgggctatctacgacgacactctgccggaaaaagggcgcggcaatgtgcgctggcgcacattgattgagcagatgctgaaccggggcggaccgcgactttatcaaaaaccggcggtcacgcgagaaggtcgcgtacatcatcgggaattgatgtgtcgcatctatgacggtaaagaagaggtgagctcggcggagtatatgccgatggtgttgcaatttggtttatcggaagagtatgacagattacaaattagccgcctgattacgttgctgggctactggccggatgaaaatctggcaatgcagttgacggttgagtcgctgattcgtccgcgttttcagcgctggttgcgcgatacgttaatgcagtgtgaaaaatcacagcgaaatcgcataattattgaacttgcggaggcagatgtttgtcaacacatcagccggttacaacccatccttcgcttagtcaatgcgcttggcgttcgggtggcggtgacacaggcgggtttgacgctggttagcacgagctggattaaagcgctcaatgtggaattactcaagctgcatccgagtctggtcagaaacattgagaagcgaacggaaaaccagcttctggttcaaagtctggtagaggcctgcgcgggcacgcctacgcaggtttacgcgacgggcgtccgttcgcgcggcgagtggcagacgctgacaaaacgcggcgtggctggcgggcagggtgatttttttgcctcctcccaactacttgacacaaacgtgaaaaaatattcgcaaaga

SEQ ID NO: 36726 - DNA, 858 bp, Salmonella paratyphi A
  misc_feature (451)..(451): n=g, a, t or c
gtggttggtaaagtaagcggattttgttttccgccccagctttcaggattatcccttagtatgttgaaaaaatttcgtggcatgttttccaatgacctgtccattgacctgggtaccgcgaataccctcatttatgtaaaaggacaaggcatcgtattgaatgagccttccgttgtggccattcgtcaggatcgtgccggttcgccgaaaagcgtggctgcagtcggtcatgatgcgaagcagatgctgggccgtacgccgggcaatatcgctgcgatccgtccgatgaaagatggcgttatcgctgacttctttgtgaccgaaaaaatgctccagcactttattaaacaagtgcacagcaacagctttatgcgcccaagcccgcgcgtactggtatgcgtgccggtcggcgcgacgcaggtagaacgccgcgcgattcgtgaatccgctnacagcaggcgcccgtgaagtctttttgatcgaagagccgatggcggccgcgatcggcgcaggtctgccagtttctgaagcaaccggttcaatggttgtggatatcggtggtggtaccactgaagttgccgtgatctccctgaacggcgtggtttactcttcttctgtccgtattggtggtgaccgcttcgacgaagccatcattaattacgttcgtcgtaactacggttctctgattggtgaagccaccgcagaacgtatttacacgagatcggttcgcttatcctggcgacgaagtcgcgagatctaagtgcgtgtgcgctacctggcggaaggcgttctacccggcttttacctgtactcatacgagattctggtagacgtgcagggaccgctgtacgctatcct

SEQ ID NO: 36727 - DNA, 699 bp, Salmonella paratyphi A
atgtctattgccgtaaatatgaatgacccgaccaacacgggcgtcaaaacgacgaccggcagcgggtcgatgaccggaagcaacgctgccgatctgcaaagcagtttcctgaccttactggtcgcgcaattgaagaaccaggacccgactaacccattacaaaataatgagttaacgacacagttggcgcaaatcagtaccgtgagcggcattgaaaaactgaatacgacgctgggggctatttccgggcaaatcgataatagtcagtccctacaggcgaccacgctgattgggcatggcgttatggtgcctggcacacaattctggcgggtaaaggcgcggaagaaggggccgtgacgtccacgacgccgtttggctggaattgcaacagcctgcggacaaagtgacggcaaccattaccgataaagatggccgggtggtacggacgctggagatcggtgagttgcgagccggggtacacacctttacctgggatggtaagcaaacggacggaacaacggtaccgaatggttcttacaacattgcgattaccgccagcaatgggaacgcaactggtggcgcacgctgcaattcgctctggtacagggcgtgacgaagggcagtaacggcaacctgttggatctgggtacctacggcaccaccacactcgacgaagttcggcaaataatctaagccctt

SEQ ID NO: 36728 - DNA, 1956 bp, Salmonella paratyphi A
  misc_feature (132)..(132): n=g, a, t or c
atgaatattttaggttttttccagcggctgggtagggcgttgcagctccctatcgccgtgttgccggtggcagcgttgttgctgcgattcggccaaccagatttgctgaatatgccgtttatcgcgcaaggncggggtctattttcgataacctggcgctggttttcgctatcggcgtggcctccagttggtctaaagatagcgcgggcgggcacgtggcggcgagccgtgaggttacttcgtcatgaccaaagcgatggtgacgattaacccggaaatcaacatgggcgtgctggcggggattattaccggtctggtcggcggcgcggtttataatcgctggtctggtatcaaactgcctgattttctcagtttcttcggtggaaaacgttttgtaccgatcgcaacgggctttttctgtctggtgctggccgctattttcggttacgtctggccgccggtacagcatggcatccatgcgggcggtgaatggatcgtttccgcagcgcgttgggttccggtatctttggcttcatcaaccgtctgctgatccccaccggtctgcatcaggtactgaacaccatcgcctggttccagattggcgaattcaccaatgccgcaggtactgtattccacggcgacatcaaccgcttctatgctggcgacggcacggcggggatgtttatgtccggcttcttcccgatcatgatgtttggtctgccgggcgccgctctggcgatgtatttcgccgcgccgaaagaacgtcgtccgatggtgggcggtatgctgctgtctgtcgcgatcaccgcgtttctgaccggcgtaaccgagccgctggaattcctgtttatgttcctggcgccgctgctgtacctcctgcacgccattttgactggtatcagcctgttcgtcgcgacgttgctgggtatccatgcgggcttctctttctcggcaggcgcgatcgactatgttctgatgtataacttgccagcggccagcaataacgtctggatgttgctggtgatgggcgttgtattctttatcatctacttcctgctgttcagcgcggttattcgtatgtttaacctgaaaacgccgggccgcgaagataaagttgatgagatggtaacggaagaagccaacagcaacaccgaagaagggttaacgcaactggcgaccagctatattgctgcggttggcggtacggacaacctgaaagctatcgatgcgtgtattacccgtctgcgcctgaccgtgaacgactctgctcgtgtcaacgatgcggcctgcaaacgcctcggcgcttccggcgtggtgaaactgaacaaacagaccattcaggttattgtcggcgcgaaagcggaatcgattggcgatgaaatgaagaaagtggtggcgcgggggccggtcgcggcagcgtctgctgatgcggctcacgttgcgacacctgctccggcggccaaaccccaggcggtgccgaatgcggtgactatcgctgaactggtctctccgattaccggtgaggtagtggcgctggatcaggtaccggatgaagctttcgccagcaaagcggtcggcgacggcgtggcggtgaaacccaccgataaaaccgtggtttctccggcggcgggtactatcgtgaaaatcttcaacactaaccacgcgttctgtctggaaaccgaaaaaggcgcggagatcgttgtccatatgggtatcgataccgtcgcgctgaacggtcagggctttaagcgtctggtagaagagggtgcggaagtcacggcgggtcagccggtgctggaactggatctggacttcctgaatgccaatgcgcgttccatgataagcccggttgtttgcagcaacagcgatgacttcagcgctctggtcatcaaagcggatggtcacgtggtagcgggtaaaacgccactgtacgagatcaagagcaaataatcgctt

SEQ ID NO: 36729 - DNA, 1650 bp, Salmonella paratyphi A
agtgaggctgaagcccgcccgactaactttattcgtcagattattgatgaagatctggcgagtggtaaacataccactgtccatacccgttttccgccggagccgaatggctatctgcacatcggccacgcgaaatctatctgcctgaactttggcatcgcgcaagattatcagggccagtgcaacctgcgtttcgatgacaccaacccggtaaaagaagatatcgagtacgttgattcgatcaaaaacgacgtcgagtggttaggctttcactggtctggcgatattcgctactcctccgattactttgaccaactgcacgcctatgcggtcgagctgatcaataaaggcctggcctacgttgatgagctgacgccggagcagatccgcgaataccgcggtacgctgaccgcgccgggtaaaaacagcccgttccgcgatcgcagcgtcgaagagaacctcgcgctatttgaaaaaatgcgtaccggcggttttgaagagggtaaagcctgtctgcgcgccaaaatcgacatggcgtcgccgtttatcgtgatgcgcgatccggtgctgtatcgcattaaattcgccgagcatcatcagaccggcaacaagtggtgcatctacccgatgtacgactttactcattgcatcagcgatgcgctggaaggtattactcattctctgtgtacgctggagttccaggacaaccgtcgtctgtacgactgggtactggacaacatcaccattccggttcacccgcgccagtacgaattctcgcggctgaatctggaatacaccgtgatgtccaagcgtaagctgaacctgctggtgaccgacaaacacgtcgaaggctgggatgatccgcgtatgccgactatttcggtctgcgccgtcgcggctacaccgcggcttctattcgggagttctgcaaacgcatcggcgtcaccaagcaggacaacactattgagatggcgtcgctggaatcctgcattcgcgaagatctgaacgaaaacgcgccgcgatggcggtaatcgatccggtaaaactggttatcgaaaactacccgcagggtgagagcgaaatggttaccatgcctaaccatccgaataaaccggagatgggcagccgtgaagtgccgtttagcggtgagatctggatcgatcgcgcagatttccgcgaagaagcgaacaagcagtacaagcgtctggtgatgggtaaagaagtgcgtctgcgtaatgcctacgtcattaaagcgagcgcgtagagaaggatgccgaagggaatatcaccaccatcttctgtacctatgatgctgatacgctgagtaaagatccggctgacgggcgtaaagtgaaaggcgtaatccactgggttagcgcagcacatgcgctgccgattgaaattcgtctctacgaccgtctgttcagcgtgccgaacccgggcgccgcggaggacttcctgtccgttatcaaccccgaatcattagtgattaagcaggggtatggcgagccgtcgctgaaagcggcggtagcagggaaagctttccagtttgaacgtgaaggttacttctgccttgacagccgctatgcaacggccgataagctggtctttaaccgcaccgtgggcctgcgtgatacctgggcgaaagcg

SEQ ID NO: 36730 - DNA, 990 bp, Salmonella paratyphi A
atgctgacttttgcccgccaacaacagcgacgaaacgttcgctggcttctgagcctgtcactgctggtgctactggctacacttctgagcttatgcgcaggcgaacagtggattgcccccggtgactggttaagcgcccggggggaactgtttgtctggcaaattcgccttccccgcacgcttgcggtattgctggttggcgctgcgctgcgctatctggcgccgtgatgcaggcgctgtttgaaaatccacttgctgaaccgggcctgctcggcgtttcgaatggggccggtgttgggcttattgccgccgtcttactggggcaggggcaactggcaggatgggcgctgggactgtgcgctatagccggcgcgctcattattacgttaatcctgctgcgttttgcgcgtcgccatctctctaccagccgcttgttgttggcgggcgtcgcgctgggcattatctgtagcgcgctgatgacgtgggctatctatttttccacctctttcgatctgcggcaattaatgtactggatgatgggaggatttggcggcgttgactggcagcagagctggctaatgattgcgctcatcccggtactgatctggatatgttgccagtcgcaaccgctgaatatgctggcgctaggggaaacctcgggcgcgtgcagcttggcctgccgctgtggttctggcgcaatttgttggtcgtcgccaccggctggatggtgggcgtcagcgtggcgatggcgggggcgattggttttatcggtctggttattccgcacatcctgcgcttatgtggtttaaccgatcaccgggttttacttcccggctgcgcgctggccggggctatcgcctgctattggctgatgtggtcgcccgactggcgctggcgtcggctgaactgcctatcggggtggtcaccgccacattgggggcaccagtgtttatctggctgctactcaaatccgcgcgttagcgcatcggt

SEQ ID NO: 36731 - DNA, 1035 bp, Salmonella paratyphi A
atgtctgaaataaatcagaacgtaaaagatagccgtcagcagtattaccagcatatttccgggcagaatctgacgccgctgtgggaatcgttacatcacctggtaccgcagacgccaaacgccaactgcgcgccggcctactggaattatcaggaaattcgtccgctactgatggaaagcggcaatgtcattggcgcgaaagaggcgatccgccgggtgctggtgctggaaaatccggcattgcgcggtcagtcgtcgatcacggcgaccttatacgctggtttacagctgatcctgcccggcgaagtcgcgccgagtcatcgccataaccagtcggcgctgcgttttatcgtcgaaggtaaaggcgcatttaccgcggtggacggcgagcgcacgccaatgcataccggcgattttatcctgacgccgcagtggcgctggcacgatcatggtaatccgggatcagagccggtggtatggctggatggtctggatctgccgttagtcaatctcctgggctgtggttttgtggaagactatcccgaagatcagcagccggtgacgcgaaaagagggcgattatctgccgcgctatgcagcgaatatgctgccgctgcgccaccagcgcgggaactcgtcgccgattttcaactaccgttacgaccgcagtcgcgaggcgctgcacgatctgacccgtatgggcgatccggatgagtgggaaggttacaagctgcgttacgttaatcccgtcaccggcggttatccgatgccgtcgatgggcgcgttcctgcaattgctgccaaaaggctttgcctcgcgtgtggcgcggagcaccgacagcactatctaccacgtcgttgaaggggctgggcaggtcactatcggcaacgaaacttttcatttttccgcaaaagacatttttgtggcgccgacctggcatgaggtgtcgtttcgcagcagcgaagacacggtattattcagcttttcggacaagccggttcaggaagccctggggctgttccgcgaagcacgttat

SEQ ID NO: 36732 - DNA, 2008 bp, Salmonella paratyphi A
ctgaccaccaatcagggcgtgcgcatcgccgacgatcaaaattctcttcgcgccggcagccgtggccctacgctgttggaagattttatcctgcgcgagaaaattacccactttgaccataagcgtatcccggagaggatcgttcacgcccgcggatctgcagcgcacggctatttccagccatataaagacctgagcgacatcacgaaagccgcgtttctgtgcgatccacagaaaattaccccggtctttgttcgcttttcgacagtacagggcggcgcggggtctgctgataccgtacgtgatatccgcggttttgcgaccaaattttataccgaagagggaattttcgatctcgtcggtaataacacgccgatcttttttatccaggatgcgcataagtttccggattttgtgcacgccgttaagcccgaaccacattgggctattccgcaaggacagagcgcgcacgacaccttctgggactatgtttccttacagcctgagacgctgcacaacgtcatgtgggcaatgtcggatcgcggtattccacgcagttatcggacgatggaagggttcggcattcacaccttccgtctgatcaatgcacaagggaaagcgacctttgtccgtttccactggaaaccgttggcgggtaaagcctcgctggtatgggatgagtcacaaaaactgaccggtcgcgatccggattttcaccgccgggatctgtgggaggccatcgaagcgggcgatttcccggaatacgagctgggcctacaactcattgccgaagaggatgaatttaaattcgattttgatctgctcgatccgaccaaactgattccggaagagttggtgccagtacaacgcgtcggcaaaatggtgttaaaccgtaatccggataactttttcgctgaaaacgaacaggcggcatttcatccaggacatattgttcccggcattgattttaccaacgatccgctgttacaggggcgtctgttctcttataccgacacgcaaatcagtcgtctgggcgggccaaacttccacgaaattccgattaaccgccctacctgcccctaccataacttccagcgtgacggtatgcaccggatggatatcgacaccaatccggcgaactatgaaccgaactccattaatgacaactggccgcgcgaaacgccgccagcaccaaaacgcggcggcttcgaatcataccaggaacgcgtggatggcaataaaatccgcgaacgcagcccttcttttggtgaatattactcgcatcctcgcctgttctggctcagtcagacgccgatagagcagcagcatattattgacgcgttcagctttgagctgggtaaagtcgcccgcgcgtatattcgggaacgggtggtcgatcagttagcgcatattgatgtcacgctggctcagggcgtcgcgcataatctcggttttgcactcacccatgagcaaacgcaaattgccccgcctcctgatgtcaacggtctgaaaaaagatccggcgctcagcctgtatgcggtgccggacggcgatgttaaaggccgagtggtcgctattctgctgaacgacaaggttaacgccgccgaactgttgaccattttgcaggctttaaaagccaaagcgtcgcacgcaaaactgctctattcacggatgggtgaagtaacggctgatgacggttcaacattaactattgcggcaacctttgccggcgcgccgtcgctaacggtcgatgcggtaatagtaccgtgcgcaatattgccgatatcgagagttgcgcgatgcccgttactaccttctggaagcctacaaacatctgaagcccatcgcactggcaggcgacacccgacggtttaaggcgcttttaaacattgatagccagggggaagaaggacttgttgaggcagataacgttgaccaccactttatggacactctcgtgacgctgatggcggcacaccgtgtctggtcgcgtgcggggaaaattaac

SEQ ID NO: 36733 - DNA, 1936 bp, Salmonella paratyphi A
atgccaaaacgtacagacataaaaagtatcctgattctgggcgcgggcccgattgttatcggtcaggcgtgtgagtttgactactccggcgctcaggcgtgtaaagcgctgcgcgaagagggctaccgcgttattctggtgaactccaacccggccaccatcatgaccgacccggaaatggccgatgccacctacatcgagccgattcactgggaagtggtgcgcaaaatcattgaaaaagagcgtccggatgcggtgctgccgaccatgggcgccagacggcgctaaactgcgcgctggagctggagcgtcagggcgtgctggaagagttcggtgtgaccatgattggcgcgaccgccgacgccattgataaagccgaagaccgtcgtcgcttcgatatcgcgatgaagaaaattggtctcgacaccgcgcgttccggtatcgcgcacactatggaagaagcgctggcggttgccgctgacgtgggcttcccgtgcatcatccgtccttcctttaccatgggcggcaccggcggcggtatcgcttacaaccgtgaagagttcgaagaaatctgcgaacgcggtctggatctctcgccaaccaacgaactgctgattgatgaatcgctgatcggctggaaagagtacgagatggaagtggtgcgtgataaaaacgacaactgcatcatcgtctgctctatcgaaaacttcgatgccatgggtatccacaccggtgactcgatcaccgtggcgcccgcgcagactctgaccgacaaagaataccaaatcatgcgtaacgcctcgatggcggttctgcgtgaaatcggcgtcgaaaccggcggttctaacgtccagttcgcagtgaacccgaaaaacggtcgtctgatcgttatcgaaatgaacccgcgcgtctcccgctcctcggcgctggcgtcgaaagccaccggtttcccgattgccaaagtggccgccaaactggcggtggttataccctcgacgagctgatgaacgacatcaccggtggccgtacgccggcgtcgtttgagccgtctattgactacgttgtcaccaaaattccgcgctttaactttgagaaattcgccggtgctaacgaccgtctgaccacccagatgaaatcggtcggggaagtgatggcgattggccgcacccagcaggaatccctgcaaaaagcgctgccgtctctcggaagtgggcgccaccggcttcgacccgaaagtcagcctcgacgacccggaagcgctgaccaaaatccgccgcgagctgaaagatgcgggcgcagatcgtatctggtatatcgccgatgccttccgcgcaggcctctccgtcgacggcgtgttcaacctgaccaacatcgaccgctggttcctggtacagattgaagaactggtgcgtctggaagagaaagtggctgaagtcggtattaccgcctcaacgccgacttcctgcgtcagctcaagcgtaaggggtttgccgatgcgcgtctggcgaaactggcgggcgtaccgaagcggaaatccgtaagctgcgtgaccagtatgacctgcatccggtctacaagcgtgtggatacctgcgcggcggaattcgccaccgataccgcctacatgtactccacttatgaagatgagtgcgaagcgaacccgtccgttgaccgcggcaaaatcatggtcctcggcggcggcccgaaccgtatcggccagggcattgagtttgactactgctgcatacacgcctcgctgggctgcgcgaagacggttacgagaccattatggtcaactgtaacccggaaaccgtctctaccgacatacgacactttccgaccgcctatacttcgagccggtgacgctggaagacgtgctgaaaatcgtgcgtatcgaaaagccgaaaggctttctcgtgcagtgggggatcctcgaa

SEQ ID NO: 36734 - DNA, 1159 bp, Salmonella paratyphi A
ttgattaagtcagcgctattggttctggaagacggaacccagtttcacggtcgggccataggggcaacaggttcggcggttggggaagtcgttttcaatacttcaatgaccggttatcaagaaatcctcactgatccttcctattcccgccaaatcgtcactcttacttatccccatattggtaatgtcggcaccaatgaagccgatgaagaatcttctcaggttcatgcgcaaggtttagtgattcgcgatctgccgttgattgccagcaacttccgtaacacagaagacctctcttcttacctcaaacggcataacattgtggcgattgctgatatcgatacccgcaagctgacccgactgctgcgtgagaaaggcgcacagaacggctgcatcattgcagcgatagcccggatgcgaactggcgctggaaaaagcgaaagcatttcctggactgaacggtatggatctggcgaaagaagtgaccacgacggaaacttaccgctggacgcagggtagctggacgctgaaagacggtttaccggaagcgaaatctgaggatgacctgccgttccatgtggtggcctacgattttgcgccaagcgcaacattctacgtatgctggtggagtcgcgtgccgctgacggtggtgccagcgcagacctctgctgaagaggtgctgaaaatgaatccggacggcatcttcctgtcaaacggccctggcgacccggctccgtgcgactacgccatcgaggcgattgagaaattcctccagaccgacattcctgtgttcggcatctgcctcggccatcagctgtggcgctggcgagcggtgcgaagaccgttaagatgaagttcggccatcacggcggcaaccatccggtaaaagatatggacagaaacgtggtgatgatcaccgcgcagaaccacggctttgcggtggatgaagactcgctgccagccaacctgcgcgtgacccacaagtcgctgttcgacggcacctgcaagggattcaccgtaccgataaaccggcgttcagcttccagggtcacccggagcgagcccaggcccgcacgatgcggcgccgctgttcgaccactttatcgagcttattgagcaataccgtcagtccgcgaaataatcaggagtaataagagcc

SEQ ID NO: 36735 - DNA, 824 bp, Salmonella paratyphi A
atgcatgaagcacaaatccgcgtcccattgccggcccggtggcgcatgggacggcagttaatccaggccgccatggcgatggaaggtgttcagctgggtgccgcgctggagcgcgaaggctcttccttgctgggcagcgatgctggcgaactggcaggggcgggaaagtccggcgtgatcgttcaaagcagccttgaggcggtaaaagatgattttgacgttttcatcgattttacccgtccggaaggcacgttgacgcatctgcgttttgccgccagcatggtaaagggatggtgattggtactaccggctttgacgacgccggtaaacaagccattccgaggcgtcacaagagattgcgatcgttttcgccgcaaactttagcgtcggcgttaacgtcatgctcaagctgctggagaaagccgcgaaggtaatgggctactatagcgatattgaaattattgaagcgcaccaccgccataaagtggatgcaccgtcgggtacggcgctggaaatgggcgaggcaatcgccggggcgctggataaaaatctgaaggactgcgcggtctactcgcgtgaaggttataccggcgagcgcgtaccgggcacgattggctttgcaaccgtacgcgcggggacatcgtcggcgaacataccgcgatgtttgccgatattggcgagcgcgtagagattacgcataatgttccagccgcatgacgtttgcaaactgtgcgttgcgagcggcgttatggctaaaaacgaagaaaaatgggctatttgacatgcgggagatgctgggctgatgtaatatagcgactaatacc

SEQ ID NO: 36736 - DNA, 216 bp, Salmonella paratyphi A
atggccaaagaagacaatattgaaatgcaaggtaccgttctcgaaacgttacctaataccatgttccgcgtagagttagaaaacggtcacatggttactgcacacatctccggtaaaatgcgtaagaactacatccgcatcctgacgggcgacaaagtgaccgttgagctgaccccgtacgacctgagcaaaggccgcattgtcttccgtagtcgc

SEQ ID NO: 36737 - DNA, 850 bp, Salmonella paratyphi A
atggtactgatgatcgtcagcgggcgttccggatcaggtaaatctgtcgctctgcgcgcgctggaagatatgggattttactgcgtggataacctccccgtcgtgctgttgcccgatctggcgcgaacgctggccgatcgccagatttccgccgccgtcagcattgatgtgcgcaatatgcctgaatcacctgagatttttgaacaggcgatgaataatctgcctggcgctttctcgccgcaattgctgtttcttgatgccgaccgcaataccttgattcgccgctacaggacacgcgccgtttgcatccgctttccagcaaaaatctttctttggagagtgcgatcgataaagagagtgacttgctggagccgttacgctcacgtgcggatctgatcgtcgacacttcagaaatgtccgtccatgagctggcggagatgctgcgtacccggctattgggcaaacgcgagcgcgaactgacgatggtatttgagtccttcggctttaaacatggtatcccgattgatgcggactatgtgtttgatgtccgctttctgcccaacccacactgggacccaaaactgcgccccatgaccgggcttgataagccggtagccgcgtttcttgaccgacacacagaagttcacaattttatctatcagactcgcagctatcttgagctatggttaccgatgctggagaccaacaaccgcagctaccttaccgtcgctatcggttgtaccggcgggaaacaccgttcggtgtatattgcagaacagctggcagactactgccgcgcggtaaaaatgtccagtctcgccatcgcacgctggaaaaacgcaaaacatga

SEQ ID NO: 36738 - DNA, 726 bp, Salmonella paratyphi A
  misc_feature (657)..(657): n=g, a, t or c
caaacgagcatcgcgccgttaacgtttttgcgccgtctacttttacgtatccttcgtgcgctcgccgtcttttggggcggcggcattgcgctgtttagcgtggttccggtgcctttttcggcggtgatggcggaacggcagattagcgcctggctcggcggagagttcggttatgtggcgcattctgactgggtcagtatggcggatatctcgccgtggatggggctggcggtaattacggcggaagaccagaagttccctgagcactggggctttgatgttccggcgattgaaaaagcgctggcgcataatgagcggaatgagagccgtattcgcggcgcctctacgctttcgcagcaaacggcgaaaaatctctttttatgggatggacgcagttgggtgcgcaaaggtctggaggccgggctaacgctgggcattgaaactgtctggagcaaaaagcgcatcctcacggtttatctgaatatcgcggagtttggcgatggtatttttggcgtggaggctgcggcacaacggtattttcataaacctgccagtcgcttgagtgtgtctgaagccgcgttgctggcgcgggtattgccaaatccgttacgctataaggcgaatgcgcttctggctatgtgcgtacgcggcacgggngattatgcgccagatgcccaactgggcggggaatcttttatgacgcgcaaccagcttaattaattttgc

SEQ ID NO: 36739 - DNA, 699 bp, Salmonella paratyphi A
atgacaaccttaagctgtaaagtgacctcggtagaagctatcaccgataccgtatatcgggttcgtttagtgccggacgcggcgtttacattccgcgctggtcagtatttgatggtcgtaatggacgagcgtgacaaacgcccgttttcgatggcctcaacgccggacgagaaagggtttattgaattacacattggcgcctccgagctcaatctgtatgcgatggcggtcatggatcggattctgaaagaccgggaaatcgtcgtcgatattccgcatggcgacgcctggctacgtgacgatgaagagcgtccgttgattctgatcgcgggcggtacgggcttttcttatgtgcgctccatcctgttgacggcattagcgcgcaacccgaatcgcgatgttaccatttactggggtagtcgcgaagaaaagcacctctatgatctctctgagctggaagcactctctgttaaccatccgaatttgcgtattgaacctgtggtcgagcagccggaagaaggctggcgtggacgtacaggaacggtacttacggcggtattgcaggattatggtacgctggcggggcacgatatttatattgccggacgttttgagatggcgaaaatcgcccgcgatctgttctgtcatgagcgtaacgcgcgggaagatcgtctgtttggcgatgcgttcgcatttatt

SEQ ID NO: 36740 - DNA, 407 bp, Salmonella paratyphi A
atgcgtttattgcatactatgctggcgtcggcgatttgcagcgttccatcgctttttacaccaacgttctgggcatgaaattgctgcgtaccagtgagaatccggaatacaaatactcgctggcctttgtgggatatggtccggaaacggaagaagcggtcatcgaactaacctataactggggcgttgagagctacgacatgggcaatgcgtatgggcacatcgcgctgagcgttgataatgccgctgaagcctgtgaacgtattcgtcagaacggcggcaacgtgacccgtgaagcggggccggtaaaaggcggttcgaccatcatcgccttcgttgaagatccggatggctataaaatcgaattgattgaagctaaagacgcaggccgcggtctgggtaactga

SEQ ID NO: 36741 - DNA, 925 bp, Salmonella paratyphi A
atggcaacaattaaagatgtagcgaaacgagcaaacgtttccactacaactgtatcacacgtaatcaacaaaacgcgttttgtcgctgaagaaacgcgtaacgcggtctggacagcaattaaagagctgcactactctcccagcgccgtcgcgcgtagcctgaaggttaaccataccaagtcgataggcttactggcgaccagcagcgaagcggcctattttgccgaaattatcgaggcggttgaaaaaaactgtttccagaaaggctatacgctgattttaggcaacgcctggaataacctggaaaaacagcgcgcctacctgtctatgatggcgcaaaagcgcgtggatggcctgctggtgatgtgttctgagtatccagaacctctgctttccatgctggaagagtatcgccatattccgatggtggtgatggactggggtgaagcgaaggccgattttaccgacacggtgattgataacgcctttgcaggcggctatatggcgggtcgttatctggttgagcgcggccaccgggatatcggcgttattcccggcccgctggagcgcaacaccgggcggggcggctggcaggctttatgaaagccatggaggaggcgctgatcaacgtgccggacaactggattgttcagggcgacttcgagccggagtccggttaccacgcgatgcagcaaatcttatcgcagtcacatcgccctacgccgttttctgcggcggcgatattatggcgatgggcctttgcgcggctgacgaaatggggttcgtaccgcaggacgtttcggtgatcggttatgacaatgtgcgtaacgcccgttactttaccccggcactgacgacgattcaccagcccaaagactctttaggcgaaaccgcatttaatatgctattggatcgcatcgtcaat

SEQ ID NO: 36742 - DNA, 686 bp, Salmonella paratyphi A
atggaaaatcaacctaagttgaatagcagtaaagaagttatcgcgtttctggccgagcgttttcctcactgttttagtgcggaacgcgaagctcgcccgctgaaaattggtatttttcaggatctggtagagcgagttgggggcgaaatgaacctcagcaaaacgcaacttcgttccgctttacgtctttatacttcaagctggcgttacctgtacggcgttaagccggcgcaacgcgcgtcgaccttgatggcaatccgtgcggcgagctggaagaacagcatgtcgaacatgcgcgtaagcagcttgaagaagccaaagcccgtgttcaggcgcagcgcagcaagcgaaaaaacgcgaagctgccgcagcggctggcgaaaaagaagacgcgcgcgacgcgagcgtaaacctcgcccggtagcgcgtcgtaaagaaggcgctgaacgtaaacctcgcgctgataaaccgacgacgaaacgccgcgtgcgcctcgcgaagagaagcacacgccggtttctgatatttcagtattgaccgtagggcagtccctcaaggtgaaagcgtgtaataatgcgatggatgccaccgtattagaaatcaccaaagatggtgtccgtgtacagctgaattcgggtatgtctttgattgtacgcgcagaacacctggtgttctgaaacggaggc

SEQ ID NO: 36743 - DNA, 1341 bp, Salmonella paratyphi A
atgttaaacagtatattcattatattctgcctgatcgctgtaagtgcgttcttctccatctccgagatctcgcttgccgcatcacgtaagattaaacttaagttattagctgatgaaggcagtatcaacgcacaacgcgtattgaaaatgcaggaaaatcccggcatgtttttcaccgttgtgcaaattggcctgaacgccgtcgctattcttggcggtatcgtcggcgatgcggcattttcgcccgccttttccgcccttttctcgcactatatgtcgccagaactctccgagcagttgagctttattctctctttctcgctggtgacggggctgtttatcctgttcgcggatttaaccccgaaacgcatcggtatgattgcgccagaagctgtggctttgcgtatcatcaacccgatgcgcttctgcctgttcgtttttcgcccgctggtgtggctgtttaacggcatggcaaacaacatcttccgcctgttcaaaattccaatggtgcggaaagacgacattacttctgatgatatttacgcggtggtggaagccggcgcgctggcgggcgtcttgcgcaagcaagagcacgaactgattgaaaatgtgtttgaacttgaatcccgcaccgtaccgtcttctatgacgtcgcgcgaaagtatcatctggtttgatctacacgaagacgaacaaagcctgaagaaaaaggtagccgaacatccgcactcaaaatttttggtgtgtaatgaagatatcgaccacatcatcggctatgtagattccaaagatctgctgaaccgcgtgctggcgaaccaaagtatggcgctgaatagcggcgtgcaaattcgcaataccttgattgtgccggatacgctgaccctttctgaggcgctggaaagtttcaaaacggcgggcgaagatttcgcggtcattatgaatgaatacgcgctggtcgtcggtatcattacgctgaacgatgtgatgaccacgctaatgggtgacctggtcggccagggactggaagagcaaattgtggcgcgcgatgaaaattcctggctggttgacggcggcacgccgattgacgacgtcatgcgcgtgctggatatcgatgagtttccgcaatccggcaactatgaaaccattggcggctttatgatgtttatgctgcgcaagatcccaaaacgtactgattcggtgaagttttccggctacaaatttgaagtggtggatatcgacaactaccgtatcgatcagttgctggtgacgcgtctcgacaataaaagcaacgtaccggcgccgaaactgcccgatgcgcaaggtaaagaagacagcgcggcc

SEQ ID NO: 36744 - DNA, 1645 bp, Salmonella paratyphi A
cagcagactatccgcgcgcccagaggcacggtattaacggcgaaaagctggctgacagaagccccgctgcggatgttaatgaataatctcgatcctgacgtggcggaaaatccgcatgagctggtggtctacggcgggattggtcgcgccgcgcaactgggaatgctatgacgctattgttgatgcgctcacccggctggaggcggacgaaacgttgcttattcagtctggcaaaccggtcggcgtatttaaaacgcacgacaacgcgccgcgggtattaatcgccaactccaacctggttccccactgggcgacatgagaacactttaacgaactggatgcgaaagggctggcgatgtacggtcaaatgacggccggaagctggatctatatcggcagtcagggaatcgtgcagggaacatacgaaacctttgtcgaggcggggcgtcagcactataacggcacgctggcgggacgctgggtgctgaccgccgggctgggcggcatgggcggcgcgcaaccgctagccgcgacgctggccggagcgtgttcgctgacgattgaatgccagcaaagccgtatcgattttcgtctgcgtactcgctacgtggatgagcaggccgccacgctggatgacgcgctggcccgcattacgcgctacacccgcgaggggaaagccgtgtccgtcgccctgtgcgcgaacgcggcggatatcctgccggaactggttaatcgcggcgtgcgcccggacctggtgaccgatcagaccagcgcccacgatccgctacatggctatttgccctccggctggtgctgggaggagtatcagaaaaacgcgcaatccgatcccacgggacgatgcaggcagcgaaacgttccatggcggtgcatgttcgggcgatgctggcgttcagtcaaatgcgcgtgccgacctatgactatggcaacaaataactcagatggcgaaagagatggggatggaaaacgcctttgattttccgggattagtgccagcctatattcgtccgctgttctgtcgtgacatcgggccgtttcgctgagtggcgctgtccggcgatcagcaggatatctataaaaccgatgccaaagtcaaagagatagtggctgaggataaacatctgcatcactggctggataatgcgcgtgagcgcattcattttcaggggctaccggcgcgtatctgctgggtaggcctggagtggcggcaaaaactggggctggcgttcaacgaaatggtgcgttgcggcgaggtatcgccgcccattgtgattggccgcgatcacctggattccggttctgtcgccagccctaaccgtgaaaccgaagcgatgcgcgacggttccgacgcggtttccgactggccgctgttaaatgcgttgctgaataccaccagcggggcgacatgggtatcgctccatcatggcggcggggtggggatgggtttttcgcaacacgccggtatggtgattgtctgtgatggcactgacgaggccgccgcgcgtattcgccgcgtgttacacaacgatccggcgacggcgtcatgcgtcatgccgatgccggatatgatctcgcggtggaatgcgctgttgagcaaggtctgaatttaccgatggttgcggcgacg

SEQ ID NO: 36745 - DNA, 1544 bp, Salmonella paratyphi A
  misc_feature (208)..(208): n=g, a, t or c
  misc_feature (451)..(452): n=g, a, t or c
  misc_feature (609)..(609): n=g, a, t or c
atgaacaccatgacactcactccggggcagttaagcctctctcaactgtacgatgtctggcgtcatccggtacagcttcggctggacgccagcgccattgacggcattaacgccagtgtcgcgtgcgtcaatgatattgttgccgaagggcgtaccgcctacggcatcaacaccggtttcggcctgctggcgcagacgccgatcgctngatgaagacttgcaaaatctacagcgatcgttggtgctgtctcacgccgcgggctaggcgacccactggatgacgcgatggtgcgtctgatcatggtattgaaaatcaatagcctggcgcgcgggttttccgggattcggttgagcgtgatagaggcgctcatcgctctggtgaatgccggcgtgtatccgctgattccggcaaaagggtcggttggcgcgtcagcgacttagcgctctcgtnnctgtcgctgacgctacttggcggagaaaagcgcgctggcaggcgaatggctccggcgcagcgccgtaaaaaaggccggactgaacctgtcgcgtggcggccaaagaggggctgcgctgcttaacggcacccagcgtcgacggccttccgctggcgtntttgtatgaggcacagaattatttgcctccgccgtcgtctgcgcgcgctgactaccgaagccgtactgggatcgcgccgtccttttgatgcgacgcattcatgccgcgcgcggacaacaggggcaaattgacgccgcgcggttgttccggcatctgttgaccgataccagtgctattgctgaatcacatcaccactgtcataaagttcaggacccgtattcccttcgctgccagccgcaggtaatgggcgcttgtctgacccagttacgtcagacgaaagaggtactgctggctgaggccaacgcggtatccgataatccgctggtctttgccgatgcgggggaggtgatctccggcggtaacttccatgctgaaccggttgccatggcggcggataatctggcgctggcgatagcggaaatcggcgcgctatcggagcggcgcatcgcgctgatgatggataaacatatgtcgcagttaccgccgttcctggtaaaaaatggcggcgttaattccggttttatgattgcccaggtcaccgccgcggcgctcgccagcgagaataaagcgctggcgcacccgcacagcgtggatagcctgccgacctcggcgaatcaggaagatcatgtctcaatggccccggcggcagggcggcgactctgggaaatggcggcgaatacccgcggcatcattgccgtggagtggctggctgcctgtcagggatagatttacgggaagggttaacctccagcccgttactggaacaggcgcggcagacactgcgcgagcgggtggcgcactatacgcaggatcgttttttcgcgcccgatattgagtgtgcgacgacgctgctggcgcaaggcgcgttacagcgtctgctgccggactttatgtgaatgctgccggatggccggcgcgtattcggcttacccaac

SEQ ID NO: 36746 - DNA, 550 bp, Salmonella paratyphi A
atgattcggcaacgtcgccgtgcgctaacgtcagagcagcaacgccgttttggtcaacaggccgccgcccgaatactcagctttcttcccgtcgtgatggcgcacactgtcgccgtgtttctctcctttgatggcgaactcgacccccagccgctgattgaacagctatggcgagcgggcaagcgcgtctaccttccggttcttcatcctttcagccctggcaacctcctgttcctgcactatcatccgcagagtgcgctggtgaccaaccgcttaaagatccaggagccacggcttgatgtccgcgacgtattaccgctggcaaagctggatgtgctggtaacgccgttagtcgcgtttgacgaagacgggcagcgcctggggatgggcggcggattttatgaccgtacgttgcaaactggcagcagcataagatcctacccgtgggctacgcgcatgattgccagttagtagaaaactgccagttgaagagtgggatatccggctgcctgccgtgggtgacgccgtcaaaatttgggagtggtagccg

SEQ ID NO: 36747 - DNA, 1344 bp, Salmonella paratyphi A
atgaaaaacgttatccgtactcccgaaacccatccgctgacctggcgtctgcgcgatgacaaacagccggtctggctggatgaatatcgtagcaaaaacggctacgaaggcgcgcgtaaggcgctgaccggcctgtctccggatgaaatcgtcagccaggtaaaagacgctggtctgaaagggcgcggcggcgcgggcttttccaccggtctgaagtggagcctgatgccgaaagatgaatccatgaacatccgttacctgctgtgtaacgccgatgaaatggagccgggcacctataaagaccgtctgctgatggaacaactgccgcacctgctggtggaaggcatgctgatctccgcgttcgcgctgaaagcgtatcgtggttacatcttcctgcgcggcgaatatatcgaagcggctgtacatctgcgccgtgcgattgctgaagcaaccgaggccgggctgcttggcaaaaatatcatgggcaccgggttcgactttgaactgtttgtccacaccggggcagggcgttacatctgtggtgaagaaacggcgctgattaactccctcgaaggccgccgcgcaacccgcgctccaagccgcccttcccggcgacctccggcgtatggggcaagccgacctgtgtgaataacgtcgaaacgttgtgcaacgtcccggcaatcctcgccaacggtagagtggtaccagaacatctcgaaaagcaaagatgcgggtaccaagctgatgggcttctcgggccgcgtgaagaatccgggcctgtgggaattaccgttcggcaccaccgcgcgcgagatcctcgaagactacgcgggcggtatgcgcgatggcctgaaattcaaagcctggcagccgggcgggcgggaaccgacttcctgaccgaggcgcatcttgacctgccgatggagttcgaaagcatcggtaaagcaggcagccgtctgggcaccgcgctggcgatggcggtagaccacgaaatcggcatggtgtcgctggtgcgtaacctggaagagttctttgcccgcgaatcctgcggctggtgtacgccatgccgcgacgggttgccgtggagcgtgaaaattctgcgcgcgctggagctggcgaaggccacccgggggatatcgagacacttgagcaactgtgtcgtttcctcggaccgggtaaaaccttctgcgcgcatcaccgggcgcggttgagccactgcaaagcgcaattaagtatttccgcgaagaattcgaagctggcatcaagcagccgttcagtaatacccatttaatcaatggtattcagccgaacctgctcaaagagcgctggtgagttaacgatttt

SEQ ID NO: 36748 - DNA, 498 bp, Salmonella paratyphi A
atgcacgagaatcaacaaccacaaaccgaggcttttgagctgagtgcggcagagcgtgaagcgatagagcacgagaagcaccactacgaagacccgcgtgcggcgtccattgaagcgctgaaaatcgttcagaagcagcgtggctgggtgccggacggcgcgatctacgctattgccgatgtgctgggtattccggcgagcgacgtcgaaggcgtcgccacattctacagccagatcttccgtcagccggtcggtcgccacgtgattcgctactgcgacagcgtggtgtgccatatcaccggctatcaggggattcaggccgcgctggaaaaaaatctcaacatcaaaccggggcagacgacctttgatggccgctttacgctgctgccgacctgctgcctggggaattgcgataaagggccgaacatgatgattgatgaggatactcacagccatctgaccccggaagccattcctgaactactggagcggtataaa

SEQ ID NO: 36749 - DNA, 778 bp, Salmonella paratyphi A
atgtcagagacatttgatccacgctgtgtatggttcgtcggcgccgggccgggcgattgcgagctgatcacgcttaaaggctaccgcctgctgcaacaggcgcaggtagttatctatgccggttcgctgatcaataccgaactgctggattactgccccgcgcaggcagaacgctacgacagcgccgaactgcatcttgagcagattatcgagctgatggccgcgggcgtgaaagcgggaaaaacggtggtgcggttgcaaacgggcgatgtctcgctgtacggctccgtgcgtgagcaaggcgaagagttaacccgccgtggtatcgactggcaggtagtgcctggcgtcagcgcgtttctcggcgctgcggcggagctgggtgtggaatataccgtaccggaggtatcgcagagtctcattattacccgtctggaagggcgtacccagtaccggcgcgcgaacaactggaggttcgccagtcaccagacgtcgatggcgatttatctctccgttcagcgtattcatcgggtggcggaacgtctcatttgcgggcggctatccggcaactacgcctgtcgcagtcatctataaggctacctggccggaaagccagaccgttcgcggcacgttagcggatattagcgacaaagtacgtgatgctggcatccgtaagacggcgctaatcctggtcgggaattttctgggtaaggagtatcattactcaagactttatgcagcggactttagccatgaataccgtaaagcctgaatccat

SEQ ID NO: 36750 - DNA, 1227 bp, Salmonella paratyphi A
gtgaagatttatctggtcggtggtgcggttcgggatgcgttgttagggctaccggttaaagataaagattgggtcgttgtcggcgccacgccacggagatgcttgatgcgggctaccagcaggtaggccgtgattttcctgtgtttctccatccacaaactcacgaagaatacgcgctggcacgctgagcgtaaatccggctccggctacacgggtttcacctgctataccgcgccggacgttaccctggaagccgatctccagcgtcgcgatctgaccattaatgctctggcgcgcgacgatgacggccagattatcgacccttaccacgggcgccgggatctggaggcgcgtctactgcgccatgtctctcccgcgtttggcgaagatcccttgcgcgtattgcgtggcgcgttttgccgcccgttacgctcatcttagtttccgtatcgccgatgaaacactggcgctaatgcgcgaaatgaccgcggcaggcgagctggaacatctgacgccggaacgggtatggaaagagacggaaaatgcgcttaccacccgcaatccgcaggtttacttccaggtattgcgcgactgcgcgccctgcgcgtcctgtttccggaaatcgacgccctgtttgggtacccgcgccggcaaagtggcatccggaaattgataccggagttcatacgttgatgacgctgtcgatggccgccatgctcagtccgcagcttgatgtccgtttcgccacgctttgtcatgatctgggcaaaggcttaacgccgaaaaacctctggccgcgccatcatggccacggccggcgggcgtgaaactggtcgaacagttatgccagcgtttgcgcgtccccaatgacctgcgtgatttagctaaactggtcgccgagtaccacgatctgatccacacctttccgatactccagccgaaaacgatcgttaagctgtttgacgccattgatgcatggcgtaaaccgcagcgcgtcgagcagattgcgctgaccagcgaagccgatgtccgtggacgtaccggctttgaagcgtcggattacccgcagggcgctggctgcgcgaagcctggcaggtggcgcaggcggtaccgacgaaagaggtggtggaggccggatttaagggcattgagattcgcgaggagctgacgaagcgacgaattgcagcggtcgccaactggaaagagaagcgctgcccgaaccccgcc

SEQ ID NO: 36751 - DNA, 634 bp, Salmonella paratyphi A
atgagtgcaatcgcgcctggaatgatcctcttcgcgtacctctgcggctcaatttccagtgccattctggtttgccgcatcgccgggctgcccgatccgcgtgaaagcggctccggcaacccgggcgcgacgaacgtattacgaatcggtggcaagggagcggctgtcgcggtacttatttttgacatcttaaaggcatgttgcccgtctggggcgcgtatgcgttaggcgttacccctttctggctggggcttatcgctatcgccgcctgtctggggcatatctggccggtcttttttggctttaaaggtgggaaaggcgtagcaaccgcgtttggcgccattgcgcccatcggctgggatttaaccggcgtcatggcaggcacctggctgctgacggtcctgttaagcggttattcatcgttaggggcgattgtcagcgccttgattgcgccgttttacgtctggtggtttaaaccgcagttgcaccttcccggtgtcgatgctgtcatgtctcatttctgcgccatcatgacaacatccagcgtctgtggcgtcgccaggagacgaaaatctggacgaagctgaaaaagaaacgccagaaagattgagctggaactgcgtctggaagaggg

SEQ ID NO: 36752 - DNA, 722 bp, Salmonella paratyphi A
cctgaccttccgatctctagaggatccccccatatggaagggcatctgctggcgccgatgctggaagataatcccccggatttcccgtttgtggcgctgctggtctccggcgacatacgcagctcattagcgtgaccggaattggtcagtacgaactgctgggcgagtcgattgacgatgcgccggaggtttgataaaactgccaaattgttggggctggattatcctggtggcccgatgctgtcgaaaatggcgtcgcaggggacggcgggagttttgtctttccgcgcccgatgaccgatcgtccggggctggattttagtttttccggtctgaaaacctttgccgctaacaccattcgtagtaatggcgacgacgaacaaactcgcgctgatatcgcgcgcgcttttgaagatgcggtcgtggatacgctgatgatcaagtgcaagcgcgcgctggaaagcaccggttttaagcgtctggtcatggcgggcggcgtcacgctaaccgcacgctgcgccgaacttgccgaaatgatgcaaaaacgccgcgggaagtgttctatgcgcgcccggaattttgtaccgacaacggggcgatgatcgctatgccggaatggtgcggtttaaggcgggcgttacggcggatcttggcgtaacggtacgtccgcgctggccgctggcgagctgccggcggcgtaaaagcggaaaaagggggcgaca

SEQ ID NO: 36753 - DNA, 1245 bp, Salmonella paratyphi A
atgaaatggttatgttcagtaggtgttgctgtgagtctggcgatgcagccagcattggccgaaaacctgtttggcaatcacccgctgacgcccgaagcgcgcgacgcgttcgtcaccgatttactcaagaaaatgactgtcgatgaaaaaattggtcagttacgtctgattagcgtcggccctgataacccgaaagaagcgagccgcgagatgatcaaagacgggcaggtaggggcgattttcaataccgtcacccgccaggatatccgtcaaatgcaggatcaggtgatggcgttgagccgcctgaaaattcctctcttttttgcttatgacgtggtacacggccagcgaaccgtcttcccgataagcctcggtctggcttcttcttttaatctggatgcggtaagaaccgtaggacgcgtatcggcgtatgaagcggcggacgacggcctgaatatgacctgggcgccgatggtggatgtctcccgcgatccgcttggggacgcgcctccgaaggctttggcgaagatacatatttaacctccatcatgggcgaaaccatggtgaaagcgatgcagggcaaaagcccgcggaccgctattcggtgatgaccagcgtgaaacattttgccgcctatggcccgttgaaggcggtaaagaatacaacaccgtggatatgagttcccagcgtctgtttaatgactatatgccgccgtacaaagcggggctggatgcggggagcggcgcggtgatggtggcgctgaactcgctgaactcgctgaacggcacgcctgcgacgtcagattcctggctattgaaagatgtcctgcgcgatgagtggggctttaagggaattaccgtttccgaccacggcgctattaaggaactgattaaacacggtaccgcggccgacccggaagatgcggtgcgcgtggcgctaaaggcaggggtggatatgagcatggcggatgagtattacagcaaatatctgccgggtctgattaagtcgggcaaagtgacgatggcggaactggacgacgcgacgcgccatgtgctcaacgtaaaatatgacatgggattgtttaacgacccctatagccatctggggccgaaagagagcgacccggtggacaccaatgccgaaagccgcctgcatcgtaaagaggcgcgggaagtggcgcgggaaagtgtggtactgctgaaaaaccggctggaaacgttgccgctggaaaaatcgggcacattt

SEQ ID NO: 36754 - DNA, 1284 bp, Salmonella paratyphi A
atggaaaccactcagaccagcacgattgcttcgattgactctcgaagcgcatggcgcaaaacggataccatgtggatgctgggcctttacggcacggctatcggcgcgggcgttctgttcctgccgatcaacgcaggcgtcggcggcatgattccgctcatcatcatggcgattctcgctttcccgatgacctttttcgcacaccgtggcttaacccgcttcgtgctgtccggtaaaaatccgggtgaagacatcactgaagtcgttgaggaacacttcggtatcggcgcaggtaaactgattaccctgctttacttcttcgcgatttaccccatcctgctggtttacagcgtggcgattactaataccgtggaaagcttcctgacccaccagttagcgattaatccgcccgcgggcgattctttccctgatcctgattgttggcatgatgaccatcgtgcgcttcggcgagcaaatgatcgttaaggcgatgagtatcctggtattcccgttcgtcgctgcgctgatgctgctggccttgtacctgatcccgcagtggaacggcgcggcgctggaaacgctgtcctttgattccgccgcgtccaccgcaacggcctgtggatgacgctgtggctggcgattccggtgatggttttctctttcaaccactccccgatcatctcctccttcgcggttgcgaagcgtgaagagtacggtgaaggcgcagagaagaaatgttctaaaattctggccttcgcccacatcatgatggtgctgaccgtgatgttcttcgtcttcagctgcgtgctgagtctgacgccggcagatctggcggcggcaaaagagcagaacatctctattctgtcttacctggcgaaccattttaacgcgccgatcatcgcctggatggcaccgatcattgcgatgattgctatcaccaaatccttcctcggccactacctgggcgcgcgtgaaggctttaacggaatggtgattaaatcgctgcgtggtaaaggtaaatctatcgaaatcaacaaactgaataaaattaccgcgctgttcatgctggtcaccacctggattgtggcgacgctgaaccccagcatcctgggcatgattgaaaccctgggcggcccgatcatcgcgatgattctgttcctgatgccgatgtatgccatccagaaagtaccggcaatgcgtaagtacagcggtcatatcagcaacgtattcgttgtgattatgggcctgattgccatctccgctattttctactcactgttcagc

SEQ ID NO: 36755 - DNA, 1356 bp, Salmonella paratyphi A
ttgattacacatattagcccgcttggctcaatggatatgttgtcgcaactggaagtggacatgctgaaacgcacggccagtagcgacctgtatcaactgtttcgtaactgttcacttgccgttcttaactccggcagcctgaccgacaacagcaaagagctgctgtcccgctttgaaaatttcgatattaacgtactgcgagcgcggcgtgaagctggaattgattaatccgcctgaagacgcctttgttgacgggaggattattcgtgcgctacaggctaacctgttcgcggtgctgcgcgacattctctttgtgaatgggcagatccacaatgccggccgtttccagcatctggatcttgaaagctcaacacatatcaccaatctggtgttctccattttgcgcaagcccgggcgctgcacgtcggcgaagcgccaaacatggtggtatgctggggcggccactcaattaacgaaaagagtaccttatgccgatcgtcggcacgcagtgggattaccgagctaacatctgcaccgctgcggcctgtgcgatgaaagccccatgaagagcgcggcggtcggtcaagccagcagcggtataaagaacaccgctatatcggcatgactgagccttccattaacttcgctgaaccgcctaacccgctggtgaacgaactgatcatcatgccggatatcgaaaaacgcctagaagcgttcgtccgtatcgcacacggtatcattatcttccctggcggcgtgggtacggcggaagagctgctttatttgctgggtattctgatgaatccagccaataaaaatcaggtgctgccgctgatcctgaccggaccaaaagagagcgccgattacttccgcgtgctggatgagtttattacccatacgctgggcgaagcggcccgccgtcattaccgcatcatcattgacgatgcggcggaggtagcgcggctgatgaagaaagcgatgccgcaagtgaaagagaatcgccgcgataccggcgacgcctatagttttaactggtcgatgcgtattgcaccggatctgcaggtgccgtttgagccgtcgcatgagaatatggccaacctgaaactgtacccggatcagccggttgagattctggcggcggatctgcgacgcgccttctccggtattgtcgcggggaacgtgaaggaggtcgggatacgcaccattgaagctaatggtccgtataagatccacggcgatcgagagatgatgcgtcgcatggacgatctgctgcagggtttcgtcgcgcagcatcgtatgaaattgccaggttccgcctacatcccctgttacgagatctgcgcttaacgcttatgc

SEQ ID NO: 36756 - DNA, 1233 bp, Salmonella paratyphi A
  misc_feature (847)..(848): n=g, a, t or c
atgaagatcctggtctatggcattaactattcgccggaactgaccggtatcggcaaatataccggcgaaatggtggcgtggatggcgcaggaaggccatgaggtgcgggtcattaccgcgccgccgtactacccgcagtggaaggtcggcgagcgctattccgcctggcgctatcgctgggaagagggcgaggctaccgtctggcgctgcccgctgtatgtgccgaaacagccctccaccttaaaacggttgcttcatttggggagctttgcattgagcagttttttcccactgatggcgcagcgtcgctggaagccggatcggattatcggcgttgtaccgacgctcttttgtacgccgggaatgcgtctgctggcgacactctccggcgcgcgtaccgtactgcatattcaggattacgaagtggatgccatgcttggcttaggaatggcgggaaaggtaaagcgcggcagcgtagcgcggttagcaacggcctttgaacgtagcgcgctgcgtaacgttgataatgtttcgaccatttctcgctccatgatgaataaagcgcgggaaaagggcgtcgcggcggaaaaaatcctcttttttccgaactggtcggaggtggcgcgctttcaggacgttaatgacgctgacgtgacggctttgcgtcagcagcttggcttgcagagggcaaaaaaattgtgctttattccggcaatatcggcgaaaaacaagggctggaaaaggtaattgacgccgcggaacgattacgcgatcgaccgttgattttcgcgattgtcggccaggggggcggcaaggcgcggatggagaacatggcccgcgaacgccnntggcaaatattaaattcctcccgctgcagccttacgacgccttacccgcgctgctgaaaatgggcgactgccatctggtggtgcaaaagcgcggcgcagcggatgcgggtactgccctccaagctgactaacattctggcggtcggcggtaatgcggtgattaccgctgagccgcacaccgaattaggacaactttgcgcgcgctatccgggcatcgccgtttgcgtggaaccggaatcgaccgacgcgctggtcgacgggattagccaggcgctcgccatggccgaaaaacaacatgacggcacgtgaatacgccgaacgcacgctcaataaagagaacgtgctacgccaatttattgcagatattcggggatgataatgcgtc

SEQ ID NO: 36757 - DNA, 1596 bp, Salmonella paratyphi A
aaaatgacgttgccctttaaaccccatctcattgcccttgtgtgcagtgccgggttatttgccgcttcgggcgtactgtatgttaaaagccgcgctcccgaagcgcccgcgcagggcgaactccccgcccctgagcaaacgcagaccgctgtgcccgcgcctgtcgcgaaaacgacctttaccactgcgcaaattgatcaatgggtctcgcctgtcgcgctttatcccgatgccctgctttctcaggtgctcatggcctccacctacccggcgaacgtggttcaggccgtccagtggtcgcgggataaccccacgctgcaaggcgatgccgctattcaggcggtggcagccaaccgtgggaccccagcgtcaaatcgctggtcgcctttccccagttgatggcgcttatgggcgagaatccgcaatgggtgcaaaacctgggcgatgcgttcttagcccagccacaggatgtgatggatgcggtgcaaaggttgcgtctgctcgctcaacaaaccggttcgctaaaatcaacgccgcagcaaaccgtcaccagcgtgccgaagtccagcgcttctaccgccgtcacgacgacaacaaccaccaccacatccgccagtacgccagcgacaccgtcgaccgtcatcaaaattgaacccgcgaatccgcaggtggtgtacgtgccgaactataaccccgcgacggtgtatggcgcctggcccaataccgcttatccgccggtgtatttaccgctccggggcagcagtttgccgatagttttgttaaaggttttggttatagtctgggcgtcgccaccacctatgcgttgttcagcagcatagactgggatgacgacgatcatcaccaccatgacgacgaccatcatgatgatgattaccatcatggtggtaacggttatcaacataatggcgataatatcaacatcaatgtcaataatttcaaccggatatccgggcaaaacctgccgggccaaacgatgggctggcagcataatcccgcctggcgcaatggcgtcccctatccgaataataccgttgcgcaacggttccatcccaccaatgttagcggcgggttaagcacaacgcagcaagcgccagtgtctcgcgacagtcagcgccaggcgccatgacgcaattccaacagcgcacgcatacggcgaacgcttctttgccagcgccaggcacccgcgatgcccagcgcaaagggccatcgagcagttaaatcaaattgcccagcgtaataattaccgtggctatgacggaacacaaaacagcagtcgtcgcgaggggcgcagcagacactgaataaatccaccacgcagcagcatcgttccgagctgaaggctaaagcccagcagcaccctgtttcacagcagcagagagacaccgcccgccagcgtattgaatcctctacgccgcagcagcgtcaggcatttcgccagaatatgcacgccaatgtgtttagcgggaacgacagtcgatcgccgtcatggcaatcgcaacagctacgcggcctggaaagccgtcgcggcagtcacttaaacaccgagcaacgcgccgccgcgggaacatttttctg

SEQ ID NO: 36758 - DNA, 713 bp, Salmonella paratyphi A
atgcaaaaggtattttttaccatgctgaatagtataaaagtaggctttattgttcttctcacgttatttacttcgctgaacgtacaggcggcgggggggattgcattaggcgccacgcgagttatttatccctcggcggcgaagcagacttctctggcaatcagtaatagcgatactcaagaacgttacctcgtcaattcatggatcgaaaatagcgccgggcagaaagaaaaaacgtttattgttacgccgcctttattcgtcagcgaacccaaaagcgaaaacacgctgcgtattatctacgccgggcaaccgctacccgcggatcgggagtcgttattctggatgaacgtgaaagccatcccgtcggtcgataaaagtcatattgaaggaaaaaacgttctgcaactggcgattctgtcgcgcatcaaactgttcgtgcgtccggcgaatttgccgcagacgccggaagacgcgccgaccttgctgaaattttcccgtgtcggcaaccatctcaagataaccaacccatctgcttattacctcacgctggtcaatatcagcgtgggcgcgaaaaagattgataacgtgatgatcgcgccaaaaagcgacatgcaaattcccttaccgactggcgcgcagggagcgtgacatttcagaccgtcaatgattacggcgcattgacgtcgtcgacaacgggcagtctcggttaa

SEQ ID NO: 36759 - DNA, 1174 bp, Salmonella paratyphi A
  misc_feature (630)..(630): n=g, a, t or c
caacagtcccgccgccgctggcccaaatcgtttgacctgacgtctaccgcctttttgatcgtcgcttttctcaccggtattgccggtgcgctacagacgccgacgctcagtatttttctgacggatgaggttcacgcccgccccggcatggtgggattcttttttaccggcagcgcggttatcggcattatcgtgagccagtttctggcgggtcgctcagataaaaaagacgatcgcaagaaactgatcgttttctgttgcgtgctgggcatgttggcctgcgtgttgtttgcctggaaccgcaactactttattttgctgtttatcggcgtctttctcagtagcttcggctctaccgccaacccgcagatgtttgcgcttgcccgtgaacatgccgatcgtacaggtcgtgaagcggtgatgttcagctcaatcctccgcgcccaggtctcattggcctgggtcattgggccgccgctggcctatgcgctggcgatgggttttagctttacggtgatgtatttgagcgcggcgctactttttatcgtctgcggcgtcatggtgtggttctttttaccgtcaatgcgcaaagacgcgccgctggcgaccggcacgctggaagcaccgctncgtaatcgccgcgatacgctgttgctgtttgtcatctgtacgttaatgtggggaactaacagcctgtatatcattaatatgccgctgtttatcatcaatgagctacatcttccggaaaaacttgcaggcgtgatgatgggcacgcgccgggctggagattcccacaatgctgattgcaggttacttcgccaaacggttgggaaaacgcctgttaatgtgcatcgccgttgtcgccggactgtgcttttatgcggggatgttgctggcgcacacgccggcaacgttgctcggcttgcagttgctgaacgcgatttacatcggcattcttggcgggattggcatgctctattttcaggatctcatgccaggccaggcgggttcagccaccacgctgtataccaataccattcgcgtcggctggatcattgccggttcgttggcgggaatcgccgcagaaatctggaattatcatgcggtcttctggtttgcgttagttatgattgtcgccaccatgttctgcctggcgcgtattaaagatgtttaa

SEQ ID NO: 36760 - DNA, 1029 bp, Salmonella paratyphi A
atggaagtaaaaactcaatcctgcgttgttgcgggtaagcgtgctgttgccgttacggaacaaaatattgaatggaataataaaggaacactcgtacaaattacccgtggcggcatttgtgggtctgacttacattattatcaggaaggcaaagtcggcaattttacagtaaaagcgccaatgattttaggtcatgaagtgattggcaaaatcgttcatagcgactcagatttattacgtgaaggacaaccggtagcgattaatccatcgaagccttgcggtcattgcaaatactgtctgcagcatgaagaaaaccactgtactgaaatgcgtttctttggcagcgccatgtattttccgcatgtcgatggcggttttacccgatttaaagctgtcgataccgctcagtgcattccctggccggaacaggcggacgaaaaagccatggcctttgccgaaccgctggcggttgccattcatgcggctcatgaggcgggcgatctgcagggcaaacgcgtctttatctccggcgttggccctatcggctgcctgattgttagcgcggtaaaaacgctgggcgcggcggaagtggtatgtgccgatatcagtacccgttctctctcgctggctcggcagatgggcgcggatacgctggtgaacccacagcatgattctcttgatggctggaaagcagaaaaagggtatttcgatatcagttttgaagtctctgggcatccttcctctatctcaacgtgtctggaagtcacacgggccaaaggcgtgatggtgcaggttggcatgggcggcgcagtccccaacttcccgatgatgatgctaataagcaaagagatctcgctgaaaggctctttccgctttactaccgaatttaatactgcggtttcctggtttgccaaccgcgttatcaatccgctgccgttactgagcgcggaatatccatttaccgacctggaagcggcgctgatctttgccggagacaaaacacaggcggcaaaagttcagctcgttttc

SEQ ID NO: 36761 - DNA, 961 bp, Salmonella paratyphi A
  misc_feature (335)..(335): n=g, a, t or c
atgacggtaacaagcatgttagacaatgttttaagaattgccacacgccaaagtccccttgcgctttggcaggcacattatgtcaaagacgtcattgatgggcaacccatccgggactgacggtagaactggtgccgatggtcacacgcggcgacgtgattctcgatactcccctggcgaaagtgggcggtaagggactgtttgttaaagagcttgaaatcgcgctgctggaaaaacgcgctgatatcgccgtgcactcaatgaaagacgttccggtggccttcccggacggtctcggtctggtgaccatttgcgagcgcgaagatccgcgcganccgtttgtctcgaataaatatcacagtctggacgatctgcccgcgggtagtatcgtcgggacgtccagtttgcgtcgacagtgtcaactggcggaacgccgtccggatctcattatccgttcgttgcgcggcaacgtcggcacacgtctcggcaagctggataacggcgactatgacgccattatcctggccgtggccggtctgaaacgcttaggtctggagtcgcgcattcgcacagccttgccgcccgacgtttcgcttcctgccgtaggccagggcgccgtcgggattgagtgtcgtcttgacgacgcgcgaacacaggcgctgctcgcaccgttgaatcactcgcaaaccgcgctacgtgtaacggcggaacgcgctatgaacacccgcctggaaggcggatgtcaggtgccgattggcagctatgcagaaatcatcaacggtgaaatttggttacgcgcgctggttggcgcaccggacggttcggtgatggtgcgcggcgaacgtcgtggttctcccgagcaggcggagcaaatgggcatctcgcttgcagaggaactgctggaaaacgcgcacgcgcgattctgacagaagtttataacgcgagacgcccgcatgagtat

SEQ ID NO: 36762 - DNA, 651 bp, Salmonella paratyphi A
atgttccattatggaaaatgtgtcgttcgcacgttgtttttattactggtttgctgttcgctgtcgggctgtctttcatttgggctgatacttgccaccgataaagatggcaatcgtcatcagtctacctggaaatcggataccgttaccgcgctttccttaggtaaagatagcaacgggaaaacgggctgggtgtttgttggcgaacattttgactacctgttgacccagggcggcgataatgtggtggcgctgttaaaagatgcgactattcgccgggataaaatgcgagtaaaggatggtgttaaattcctgattgatacagataagaaggagtttacgggtgaagtcaatgtgacttacgcctgggtggacgagaaagataaactggcggcggtaggctacgggtttatttgtgcagacggcgcggtaaattgcacgctatccgtcatggacctgaaagggactatccatcagaaaaataaagagcagagcgttacgcagcagctatcgttctatcatcctttcaccgttgagttctatcagtatcagcgcagtatgtccggggcaaaatttggcagagtgttgctgccggtaactttggcgctggatattgtcactatgccgctacagctactgatcttcagtcgt

SEQ ID NO: 36763 - DNA, 844 bp, Salmonella paratyphi A
atgctcagttatcgtcacagctttcacgctggcaaccacgccgacgtccttaaacataccgttcagagcctgatcatcgagtcgctaaaagagaaagaaaaaccgtttctctatctggacacgcacgcgggcgcgggcgttatcagttgggcagcgaacatgctgaacgtaccggagagtatctggaaggcatcgcccgtatctggcagcaggacgatctgcccgccgaactggaaccgtatattagcgtcgtaaaacatttcaaccgcagcgggcagttacgctactatccgggctccccgttaatcgcccgccagttgctgcgtgagcaggacagtctgcaactcacggaattgcatcccagcgacttcccactgttgcgcgcggagtttcaaaaagacaaccgcgcccgctggaacgcgctgacggctatcagcaactgaaagccaaattgccgccggtttcccgccgcggtctgattctcattgacccgccttatgaaatgaaaaccgattaccaggcggtagtcagcggcatcagcgagggttataaacgtttcgccaccggtacatacgcgctatggtatccggtggtactccgccagcaaattaagcgcatgattcatgagctggaggccaccggcatccgtaaaatcctgcaaattgagctggcgatccgcccggacagcgatcagcgcgggatgacggcgtccagtatgatcgtggttaacccgccgtggaaactggagcagcagatgaacaacgtgctaccgtggctgcacagtaggttggcgccaaacggtcacggacacacttcggtaagctggatcgtgccggagtaatca

SEQ ID NO: 36764 - DNA, 668 bp, Salmonella paratyphi A
  misc_feature (515)..(516): n=g, a, t or c
  misc_feature (612)..(613): n=g, a, t or c
  misc_feature (665)..(665): n=g, a, t or c
atgaccaaacactatgattacatcgctatcggcggcggcagcagcggtatcgcctcgattaaccgcgccgctatgtacggccagaaatgcgcgctcatcgaagccaaagagctgggcggcacctgtgttaacgtgggctgcgtgccgaagaaagtgatgtggcatgccgcgcagattcgtgaagcgattcatctgtatggcccggactacggttttgacaccacgattaatcagttcgactggagcaagctgattgccagccgtaccgcgtatattgaccgcatccatacttcatacgacaacgtgctgggcaaaaataacgtggatgtgattaaaggctttgcccgctttgtcgatgccaaaaccattgaagtgaacggcgaaaccatcaccgccgaccatattttgatcgctaccggcggccgtccgagccatccgagcattccaggcgtggaatacggcattgattccgacggtttctttgcgctatctgccttgccggagcgacgtcgatnnggtaggcgcaggttatatcgccgttgaactggctggcgttatcaacggctggggggcaaaacgcatctgtttgtccgtaaacatgcgccgtgcgtnntttgacccgatgattagcgaaacgctggttgaggtgatgaacgccgagccgncaa

SEQ ID NO: 36765 - DNA, 2258 bp, Salmonella paratyphi A
  misc_feature (39)..(40): n=g, a, t or c
aacggtaaaccggctccggtctcggtattaaactggcgnnaccgctaacgcgctggataccgcaaccgcaatcaaagcgaaactggcggaactgcagcctttcttcctcagggaatgaaggtggtttatccttatgacactacgcccttcgtaaaaatatctatccacgaagtggtaaaaacgctatttgaagcgattattctggtgttcctggtaatgtatctgttcttacagaatatccgggcaaccctgattcctaccatcgctgttcctgtcgtgttgctaggcacttttgcggtactcgccgcctttggctattccatcaataccctgacgatgttcggcatggtactggcgatagggctgctggttgacgatgcgatagtggtcgtagaaaacgttgaacgtgtaatgatggaggataacctttctccccgagaggcgacggaaaaatccatgtcgcagattcagggagcgctggtaggtatcgcgatggtactgtctgcagtatttatcccgatggccttttttggcggctcgaccggggcaatttatcgccagttctctattactattgtttcagcaatggcgctatccgttctggttgcgttgattctgacgccagcgctatgcgtacgctgcttaaacccgtatctgctgaacatcacgagaaaaaaagcggcttctttggctggttcaataccaggtttgaccacagcgttaaccactatactaacagcgtaagcggcatcgtgcgtaatacgggtcgctatctcattatctatctacttattgtagtcggaatggcggttctgtttttacgcctcccgacctccttccctgccggaagaagatcagggggtattcctgaccatgattcagctcccctctggcgctacgcaagaacgtacgcagaaagtgctggatcaagtcactcattactacctgaataatgaaaaagcgaacgtcgaaagcgtgtttaccgtaaacggctttagctttagcggtcagggacaaaactcagggatggcatttgtcagccttaaaccctgggaagagcgtaacggtgaagaaaatagcgtcgaagccgttatcgccagagcgacacgcgccttcagccagattcgcgacgggttggtgttccccttcaacatgccggcaattgtcgagttaggtaccgcgacaggtttcgactttgaactgattgatcagggaggactcggtcacgatgcgttaacaaaagcgcgtaatcaactcctgggtatggtcgcgaagcatcctgatctattagtgcgcgtaccccgaacgggctggaagacacgccacagttcaagctggatgtcgatcaagaaaaagcgcaggcgctcggtgtttcgctgtctgatatcaacgaaaccatctccgcggcgttgggcggctattacgttaacgactttatcgatcgcggacgagtgaaaaaagtatacgttcaggctgacgctcagttccgtatgctgccgggagatatcaacaatctttatgtacgcagcgccaatggcgagatggtgcccttctctacctttagctcagcacggtggatttatggttcgccacgcctggaacgctataacgggatgccgtcaatggaactgctcggcgaagcagcgcccggacgaagtaccggtgaagcaatgtcgttaatggaaaacctggcttcacagctgccaaacggtattggctatgactggacaggtatgtcgtatcaggaacggttgtcaggtaaccaggcgccggcgctatacgcaatctcactcattgtcgttttcctctgccttgccgctctgtatgaaagctggtcaattccgttctcggtaatgctggtcgtaccgctcggcgtggttggcgctctgcttgcagcgtcattgcgcggtctgaacaatgacgtttacttccaggttggcttgttaaccactattggcctttctgctaaaaacgccatcctgattgtcgagttcgccaaagatctcatggaaaaagaaggacgtggattgattgaagcgacgctggaagcatcccgtatgcgtttacgtcctattctaatgacctcgctggcctttattctcggggtaatgccgttagttatcagtcgtggcgcaggtagtggtgcacagaacgcagtaggcacaggggttatggggggaatgttaaccgcaaccttattagctatcttcttcgtgccagtattcttcgttgttgtaaaacgccgatttaatcgccat

SEQ ID NO: 36766 - DNA, 3157 bp, Salmonella paratyphi A
tccatttcttctgacgtcaacgacccggcgtttcgtaatatcaccttcgatcagctggtggcggcctaccgtgaatccactaaagcgctggtggaaggtggcgtagatctgattctgattgagaccgtctttgacaccctgaatgcgaaagcggcggtgtttgcggtgaaagaagagtttgaagcgctgggcgttgatctgccgatcatgatttccggcaccatcaccgacgcctctgggccatacgctttccggccagacgaccgaagccttttataactcgctgcgccacgccgaagcgctcacttttggccttaactgcgcgctggggccagatgaactgcgccagtacgtccaggaactgtcgcggattgccgaatgctacgtcaccgcgcacccgaacgccggcctgccgaacgctttcggcgagtacgacctcgacgccgacaccatggcgaaacagattcgcgaatgggcggaagcgggcttcctgaatatcgttggcggctgctgtggcactacgccggagcatatcgccgccatgagccgcgccgttgccggtttgccgccgcgccagctgccggatatcccggtcgcctgccgcctttccggcctggagccgctgaacattggcgacgatagcctgtttgtcaacgtcggcgaacgtactaacgtcaccggctcggccaaatttaagcgcctgatcaaagaagagaaatacagcgaagcgctggatgtcgcccgtcagcaggtagaaagcggcgcgcagattattgatatcaatatggatgaggggatgctcgacgccgaagcggcgatggtgcgtttcctcagcctgattgccggtgagccggacattgcccgtgtaccaatcatgattgactcctccaaatgggaggttatcgaaaaagggctgaagtgcattcagggtaaaggcatcgtcaactctatttcgatgaaagagggcgtggaagcctttattcatcatgcgaagttgctacgtcgctatggcgccgcagtggtggtcatggcttttgatgagcaggggcaggccgatacccgcgagcgtaaaatcaaaatttgccgccgagcctacaaaattttgaccgaagaggtgggtttcccgccggaagatatcatcttcgacccgaatatcttcgccgtggcgaccggtattgaagagcacaacaactacgcgcaggactttatcggcgcttgcgaagatattaaacgcgagttgccgcacgcgctgatctccggcggtgtgtctaacgtgtccttctcgttccgcggcaacgacccggtacgtgaggctatccacgcggtattcctctactacgccatccgcaacggcatggacatgggcatcgtcaacgccggacagctggctatctacgacgacctgcctgccgaactgcgcgatgcagttgaagatgtcattcttaaccgtcgcgatgacggcaccgagcgtttgctggaactggccgagaaataccgcggcagcaaaaccgacgaagctgccaacgcccagcaggcggaatggcgtagctgggacgtgaaaaagcgtctcgaatactcgctggtgaaaggcattaccgagtttatcgaacaggataccgaagaagcccgccagcaggccgcccgcccgattgaggtgattgaagggccgctgatggacggcatgaacgtggtcggcgacctgttcggcgaagggaaaatgttcctgccgcaggtggtgaaatccgcccgcgtgatgaaacaagcggtggcctacctggagccgtttattgaagccagcaaagaaaaaggctccagcaacggcaagatggtcatcgccaccgtgaagggcgatgtgcacgacattggcaagaacatcgttggcgtggtgctgcaatgcaacaactacgaaatcgtcgatcttggcgtgatggtgcctgcggagaaaatcctcaaaacggcgaaagaggtgaacgcggacctgatcggcctctccggcctgattacgccgtcgctggatgaaatggtcaacgtggcaaaagagatggagcgtcagggccttaccatcccactgcttattggcggcgcgacaacgtcgaaagcgcacacggcggtgaaaatcgagcagaactacagcggtccgacggtctacgtgcagaatgcttcgcgtaccgtgggcgtggtggcggcgctactctccgacaaccagcgcgatgactttgtcgcccgtacccgcatagagtacgatatcgtgcgtattcagcacgcccgcataaaaccggtacgcgccgagtcacgctggaagagcgcgcgataatgatctggcgttcgattggaacgctacaccccgccggtagcccaccgtctggcagtgcaggaggtggaagccagcatcgaaactctgcgcaactacatcgactggacgccgttctttatgacctggtcgctggccggcaaatacccgcgcattctggaagatgaggtggtgggcgttgaggcgcagcgtctgtataaagacgccaatgatatgctggataaactgagcgccgagaaactgttgaatacgcgtggcgtggtgggcctgttcccggcgaaccgtgtgggtgacgacatcgaaatttatcgcgacgaaacccgtactcatgttctgacggtcagccaccacctgcgccagcagaccgagaaagtcggttttgccaactactgtctggcggattttgtcgcgccgaaactgagcggcaaagcggattacatcggtgctttcgcggtgaccggcggtctggaggaggatgcgctggcggacgccttcgaagcgcaacacgacgactataacaagatcatggtgaaagcgattgccgaccgtctggcggaagcgtttgccgagtatctgcatgagcgtgtacgtaaggtttactggggatatgcgccgaacgagagcctgagtaacgacgaattaatccgcgaaaactaccaggggattcgcccggcgccgggttatcctgcctgcccggaacataccgaaaaaggcactatctggcagctactggatgtcgaaaaacacaccgggatgaagctcaccgaatctttcgccatgtggcctggcgcgtcggtctccggctggtacttcagccatcctgagagcaaatacttcgcggtagcg

SEQ ID NO: 36767 - DNA, 1613 bp, Salmonella paratyphi A
gtgttaactttgctccatctactttctgccgttgcgctgttggtatggggaacacatatcgttcgtactggcgtaatgcgcgtgtttggcgcgcgtctacgcactgtcctcagccgcagcgtggaaaagaaaccgctcgccttttgtgcgggtatcggtgttaccgcgctggtacaaagcagtaacgccaccactttattggtaacgtcgtttgtcgcccaggatcttgtcgccctgacgccagctctggtgattgtgctgggcgctgatgtgggtactgcgctaatggccggtattctcacctttgatttgtcgtggctgtcgccgctgctgatttttatcggcgtgattttctttttaggacgtaagcagtcccgcgccgggcagcttggtcgcgtcggtatcgggcttggctgattctactggcgctggagctgattgtgcaggcagtgacgccgatcactcaggctaatggcgtgcaggtcattttcgcgtcgctgacgggcgacattatgctggatgcgctgattggcgcgatgttcgctattatcagttattccagcctggcggcggtgttgctgacggcgacccctgacggcggcggggattatatcgttcccggtggcgttgtgcctggtcatcggcgccaatctgggatcggggctgctggcgatgctcaataacagcgccgccaatgctgccgcgcgtcgcgtagcctcggcagcctattgttcaaattgatcggcagcctggtcatcctgccgtttgtccatccgctggcgaatctgatggatgagctatcgctaccgaagtcagagctggtgatctatttccacgttttctataacctggtgcgctgcctggcgatggtgccatttgccgagctgatggcgcgtttttgtaaacggattattcgtgatgagcctgaactggatacccatctgaagccgaaacatctggatgtcagcgcgctggatacgccaacgctggcgctggctaatgctgcccgcgaggtgttgcgcattggcgatgcgatggaacagatgatggaagggctaaaaaaggtcatgcacggcgagccgcgtgaagagaaagcgctgcgcaagctggcggatgacgttaacgtgctctacaccgcgattaagctttatctggcgcgaatgccaaaagacgagctggcagcggaggagtcccgccggtgggcggagattattgagatggccctgaacctcgaacaggcgtcggatattatcgagcgaatgggcagcgagattgccgacaagtcgctggcggcgcgtcgggcattttcagaagaaggattgaaagagctggatgcgctttacgatcaactgctcagtaatctgcaactggcgatgtcggtctttttctccggcgatgtcaccagcgcccgtcggttgcgccgcagtaaacatcgcttccgtatacttaatcgccgatactcacatgcgcatgtcgaccgcctgcaccagcagaacgtgcaaagcattgaaaccagctcgctccatttagggctgctgggcgatatgaagcgtcttaactcactgttctgttcggtcgcctatagcgtactggaacagccggatcaggacgag

SEQ ID NO: 36768 - DNA, 755 bp, Salmonella paratyphi A
atgaccaaagtcgcaattgtaacggcatcagattcgggaattggcaaagcgtgtgcgttgttattagcacaaaacggttttgatattggtatcacctggcattccgatgaacgcggcgcgcaggaaacggcgaaaaaagcggcgcaatttggtgtgcgggctgagaccattcatcttgacctgagccagttgcccgagggcgcgcaggccattgaacatcttattcagcgcctggggcgcgttgacgtgctggtcaataatgccggggcgatgaccaaatccgcgtttattgatatgccgtttacgcagtggcggcaaatttttaccgtggacgtcgatggcgcgtttctctgcgcgcagatcgccgcccggcatatgattaaacaaggagagggagggcgcattatcaacatcacctccgtccatgagcatacgccgcttccgcaagccagcgcctataccgcggcgaaacatgcgctgggcggattgactaaatccatggcgctggaactgattgaatatcatattttggtcaacgccgtctcgccaggcgtatcgccacgccgatgaatgatatggatgacagcgacattgagccgggatcggaaccctcgatccctattgcccgaccgggttctacgcatgaaatagccagcctcgtcgcctggctgtgttcggaaggagcaagctataccaccgatcagtcgctgattgtcgacggcggatttatgctggtgaatccgcaattcaacgca

SEQ ID NO: 36769 - DNA, 869 bp, Salmonella paratyphi A
atgaataatcatttcaagtgtatcggcattgtggggcatccgcgtcatcccaccgcactcacgacacatgaaatgctctaccgttggctatgcgatcagggttatgaggtcattgtggagcaacaaatcgcccacgaattacagctaaaaaatgtgccaaccggcacgctggcggaaattggtcaacaggcggatctggcggtagtcgtgggcggcgacggcaatatgcttggcgcacgcgtacgctggcgcgttatgacatcaatgtgattggcattaaccgcggtaatcttggtttcctgaccgatctcgatccggacaacgccctgcaacaattatctgatgtgctggaaggacgctatatctccgaaaaacgttttctgctggaagcgcaggtctgccaacaggaccgccagaagcgtatcagcacagccattaatgaagtggtgctgcatccgggaaaagtggcgcatatgatcgaattcgaggtttatattgatgaaaccttcgctttttcacagcgatctgatggtctgatcatttctacgccgaccggatccaccgcctattcgctctccgcaggcggccctattctgaccccttcactggatgccatcaccctggtgccgatgttcccgcataccttgtctgcgcgcccgttagtcattaacagcagtagcacgattcgtctgcgtttttcgctatcgccgtagcgatctggaaattagctgcgacagccagatagcgctgcctattcaggaaggagaagatgtgctgattcgccgctgcgactaccatctcaacctgatacatcccaaagactatagctatttcaatacattaagcacaaaactcggttggtcaaaaaa

SEQ ID NO: 36770 - DNA, 868 bp, Salmonella paratyphi A
atgcaacggttggagctgcggtcacgtaacgctatactgcttctctttctcactggtcaactgtcgacacaactatgcccgtttttgctttacttgcccttgtcgcctactccttcagcctcgcgctgatcgttcccggactgttgcaaaaaaacagcggctggcggcgtatggctattctttctgcggtcatcgcgctggtgtgccatgctgtcgcgctggaatcgcgtattctgcccggcggcgacagtggacaaaacctgagcctgctgaatgtcggttcgctggtcagcctgatgatctgcacggtgatgaccattgtcgcgtcggtaatcgcggctggctacttctgcccattgtctatgcttttgcgctgattaacctggccttcgccacgttcatgcctaatgaatatattacgcatctggaagcgaccccaggcatgatggtgcacatcggtctgtcgcttttctcttacgcgacgctgataatcgccgcgctgtatgcgctacaactggcgtggatcgactatcagttgaagaacaaaaagctggcgtttagtaatgaaatgccgccattgatgagcattgagcgcaaaatgtttcatatcacgcagattggcgtcgtactgctgacccttactctgtgtaccggcctgttttacatgcataacctgttcagtactgaaaatattgataaagccgtgctctctatcgtggcatggtttgtctatatcgttctgctgtgggggcattaccatgaaggctggcggggtcgtcgggtcgtgtggtttaacgtcgcaggcgcgggtattctgacgctggcctattttggtagccgcatattacagcaatttgtaagctaagct

SEQ ID NO: 36771 - DNA, 1382 bp, Salmonella paratyphi A
agtcgccttcccgtaaaaagtatatcaatttagcctgacgccggcataaccgacacacaagttggcccataccttcataccagaacgttccgcctatcttgtttaagatcggcgatcggatggaccaaaccttcggactgctggcgacagcgtaaacctggataaccgtacaccgattcgtgaaaaccagcgcagccgacgtaccgctggcgatcgatcatttccgctatctcgcatcctgtatacgtgcgcagaagggtggcatccgcgaagttgatagcgaaaccgtgactaccattttcacgaaccgcttggtgtcgtgggccagataatcccgtggaactttccgttgttgatggcaagctggaaaatgcgcccagcgctggcggcgggtaactgcgtggtgcttaaacccggcacgcctgacgccgctttccgttctgctgttaatggaagtcattggcgatctgttaccgccgggcgtcgtcaacgtcgtgaacggcgcgggcggcgagatcggcgaatatctggcgacctcgaaacgtatcgcgaaggtggcgtttaccggttcgacggaagtgggtcaacagatcatgcagtacgccacgcagaatattattccggtgacgctggagttaggcggtaaatcgccaaatatcttctttgctgacgtgatggatgaggaagatgcgttctttgataaagcgctggagggatttgccctgtttgcctttaaccagggcgaggtgtgtacctgtccaagccgtgcgctggtccaggagtccatctatgagcgctttatggagcgcgctattcgccgggtagagagcattcgcagcgggaacccgctagatagcggtacacagatgggggcgcaggtctcccacggccagcttgagactatcctcaattatatcgatatcggtaaaaaagagggggccgatattctgaccggtgggcgacgcaaggagctggatggcgaacttaaagagggctattaccttgagcctactatcctgtttggtaagaacaatatgcgcgtctttcaggaggagatctttggcccggtgctggcggtaaccacctttaaaaccatggaggaggcgctggaaatcgctaacgatacgcagtatggcctcggcgccggcgtctggagccgtaatggatcgctggcgtataagatggggcgcggcattcaggccgggcgcgtatggaccaactgctatcacgcctatccggcacatgcggcgttcggcggctataagcagtcgggcatcgggcgcgaaacgcataagatgatgctggaacactaccagcaaaccaagtgcctgctggtgagctattccgataagccgctggggctgttctgacgcaagaggtaa

SEQ ID NO: 36772 - DNA, 863 bp, Salmonella paratyphi A
ttcgattccacaaacatcaggcagaccatgacagaccttatccatcgccctcgccgcctgcgcaaatccgctgcgctgcgcgctatgtttgaagagacaacacttagcctgaacgacctggtgttgccgatctttgttgaagaagaactcgacgattacaaagctattgatgccatgcccggcgtaatgcgtatcccggaaaagcagctggcgcgagagattgaacgtatcgcaaatgctggcattcgttccgttatgaccttcggcatttctcaccatactgatgacaccggcagcgatacctggaaagaagacggcctggtggcaagaatgtcccgcatctgtaagcaaaccgtgccggagatgatcgttatgtccgacacctgcttctgcgaatacacctcgcacggccactgcggcgtattgtgcgaacacggtgtggataacgatgcgacgctggccaacctcggcaagcaggccgttatcgcggcggcggctggagcagattttattgcgcctccgcggccatggatggacaagtcaggctatccgcagcgctggatgccgccggttttaccgatacggcaataatgtcctactccaccaagttcgcctcttctttctacggccccttccgtgaagcacgggtaccgcgttaaaaggcgaccgcaagacgtatcaaatgaatccgatgaaccgccgtgaagcgattcgcgaatcactgctcgacgaagcccagggtgcggattgcttaatggtgaaaccggccggcgcgtatctggacgtgctgcgtgaaatccgcgaacgcacagagttgccttggcgcttaccaggtgagcggtgaatacgccatgaggggatcc

SEQ ID NO: 36773 - DNA, 994 bp, Salmonella paratyphi A
aacaccgacgcaaccttctctgcagcaaacaaagctgacctgggtgcttacacctatcaggctaagcaggaaggcaacactgtcgtgctggaacagatggaactgaccgactacgctaacatggcgctgagtattccttctgcgaacaccaatatctggaacctggaacaagacaccgttggtactcgtctgaccaatgctcgtcatggcctggcggataacggcggcgcatgggtaagctacttcggcggtaacttcaacggcgacaacggcaccattaactacgatcaggatgttaatggcatcatggtcggtgttgataccaaagttgacggtaacaacgctaagtggatcgttggtgcggcacaggcttcgcgaaaggcgatctgagcgatcgtaccggtcaggtggatcaggacagccagtctgcctacatctactcttccgctcgtttcgcaaacaacatctttgttgacggtaacttaagctactctcacttcaacaacgatttgtctgctaacatgagcgacggtacttacgttgacggcaacacctcttctgacgcctggggcttcggcttgaaactgggttatgatctgaagctgggtgatgcaggctacgtaacgccttacggcagcgtatccggtctgttccagtccggcgacgactaccagctgagcaacgacatgaaagttgacggtcagtcttacgacagcatgcgttatgaactcggtgtagatgcaggttataccttcacttacagcgaagatcaggcgctgaccccgtacttcaaactggcttacgtttacgacgactccaacaacgatgctgacgtaaacggcgactctatcgacaacggcgtagaaaggtctgcggtacgtgttggtctgggtactcagttcagcttcacgaagacttcagcgcctacaccgatgctaactacctcggcggcggtgatggtgatcaagactggtctgcaaacgtaggtgtttaa

SEQ ID NO: 36774 - DNA, 662 bp, Salmonella paratyphi A
caggacttgacgggcattattgcaaggaatgcatatgttatctttaaacaagccactacaagaattcaacagactcgataaatgcctttctaagcatggtacgcgtttcgagtttgttaacgataaagagattatctgttcacctgatgaaagtaatacccatacctttgttattttagagggggttgtttcgttagttcggggtgataaagttcttattggtattgtgcaggccccctttattttcgcttagccgatggtgtggcgaaaaaagaggcacaatataaattaattgcggagagcggttgcatcggttatcgcctctcatcatcacaaactctcgccatcattgagcagaaccaactgtgcgtgaagccttctgttggatagtatggaaaagtcaggtactggagcttcgtgacaagcagctcattggtaataattcttacgaccagattcgtgcgacgttaatgacaatgattgagtgggatgaagaacttcgctcacgtattggtgttatgaattatatccatcaacgaacgcgcgtatcgcgatcggtggtggcggaagtcctcgcggccctgcgtaagggtaattacattgaaatgaataaaggcaaactgatcagtattaaccgtttgccctccgaatattaacaaaaa

SEQ ID NO: 36775 - DNA, 828 bp, Salmonella paratyphi A
atgggattgcgtcagagtttacgcattgcggccagcacgctattactggcctgcggattacagtttgcccatgccgatagttccccgcaaacgatcgtatttggcgtcgcgccagggccgtatggcgacatggtgaagcaggcgattgcgccgacattaaaagaaaaagggtataaggtcgtggtgcgcgagtttagcgactatgtccagcccaatatggcgttagctaacggcagcattgacgccaacctctttcaacataccctctattttgacaaattcaccgctgacaaagggctgaagctcagcaaacttattgtggtaccgaccgccgggatgggcttctattcacgtaaaatcaacagtctggatgcgcttaaaaaaggggacattattaccctctccaacgatccgaccaacctggcgcgcggccttcgcttcctgcaatcgttggggcttatcacgattaaggacaatatcgatccgaccaaagcctctgaacgagatatcgccagcaatccaaaaggactggttttcaaaccgctggaagccgcacagctaccgcgcacgctggatggcgtgaccggcgcgctggttaacgggaactttgcggtggcggcaggactcgatctctccagcgcgattaagcaggaacacctggatgagaacctgaaaaatatcattgcggtacgcagtgaagatgccgataagccgtttgccaaagatattgtcgaggcggtgaaatcgccggcttatcgcgcagtcatcgacgatccaaagaatatttatagcgccttccagaaaccggaatggatgaccgcgacaccc

SEQ ID NO: 36776 - DNA, 741 bp, Salmonella paratyphi A
atgcacacccaggtcctatttgaacaccctctcaatgagaagatgcgtacgtggctgcgcatagagtttttgatccaacagctctccatcaacctgccaattgcagaccatgctggcgcactgcattttttccgtaacatcagcgatctactggatgtgttcgaacggggcgaagtccgtaccgaactgctgaaagaactggagcgccagcagcgtaaattacaggcctgggttgaggttcccggcgtcgatcaagaccgtattgaagccctgcgccagcagttaaaatcggcgggcagcgtgctgatctccgccccgaggattggccagcagctacgcgaagatcgcttgattgcccttgtgcgtcaacgcttaagtattcctggcggctgttgcagtttcgatttacccactctgcatatctggttgcacctacaacaggcgcagcgcgacgcccagattgaaagctggcttgccagcctgaatcccctcacccaggcgctgacgctggtgcttgatctgatccgtaattcagcgcctttccgtaagcaaaccagcctgaacggtttttatcaggataacggggacgacgccgatttgctgcgtcttatgctgacgctcgattcacaactttatccgcaaatttccggccataagagccgttttgccattcgctttatgccgctggatagtgaaaatggtctggtgccggagcgtcttgattttgaactggcctgttgc

SEQ ID NO: 36777 - DNA, 882 bp, Salmonella paratyphi A
atgattgctgaaaaccatagcttcacgcgggcagcggcgcagttacatatttccacgtcggcgttaagtcagaatatgcgccaactggaggatgaacttggcgtgaaattgttgaaccgaaccacccggcgtgtcggtttgacagaagcaggacatgcctttcttgccagtatcagacccgcattggcccatattgatgaggcgatggaacatgcccgccagagccgcgatatacccggagggacattacgcctgaccgtaccgcgcacggcggccacgcttctgttacaacctaatctcgccggtttcatgcgcgattatcccgatattcggctggatatcgatgtgaatgacggttttgtggatttaattaacgaacgctttgatgccggtattcgctttggcgatgcggtacaacttgatatgaatgtcgttccgctcggtgatgttttacgcccggcgatcgtagcatcccctgcataccttgcgcgttttggcacgccgctgcaccctcaggaactcatcaatcaccgctgcctttgccatcgttttacgcgtgagagcgggctatatcggtgggagtttgttcatggagcgcaacggctggaaattacgccggaagccgcgttaatggtgaatgataaagcgttgcgtctctccgccgcgcgtgatggggcagggctaacctatgtttttgaacaggatgtccacgaagacttacaggatgggcggttgtgttccgtgcttgaggagtggctgcctgcggcggaccggttttatttgtattatcccggccgcgcgcatatggcgccaaaactacgcgtatttattgattatttttgtcataaggcgatattgccgtctcaacagagccatcaccgt

SEQ ID NO: 36778 - DNA, 953 bp, Salmonella paratyphi A
gtgtcagccatcggactgggatgtatgggcatgagcgcattttacggcgctcatgacgacagcacctcaattaagacgctacattatgcgttagatcagggggtaacactgctcgataccgcagatatgtatggcccttataccaatgaaaggttagtcggaaaagccatcgccgatcgtcgcgatcgggtatttttagcgacgaaatttggtatcgttctcgaccctgctaaccctatggcgcgtggcgtcaatggcagaccggagtacgttcgccgtagttgtgagcaaagcctgcaacgcctgggggtcgatcatatcgatctgtactatcaacatcgcgttgatccatcagttcccatagaagagactgtcggtgcaatggcggacctggtgcgcgagggaaaagtgcgttatctcgggctatccgaagcatcaacgcaaacgctggaacgcgcccataacgttcaccctattaccgcgctgcaaagtgagtattcgctttggtcccgcgaagcggaaatttcagcactttccacctgtgaacggttgggtataggattcgtcgcttacagcccgctgggacgcggatttctgaccggtacgattaaaacgccagaagattttgctgcgaatgacttccgtcgcacaaatcccaggttcatgggtgagagcttctcgcgcaatttacgtctggctgaagcaataaaacaaatggcacgcgaaaaagagtgtacccccgcacaattagcgctggcctggctgctggcccgcaacaggcacatcgttcccattcccggcacccgccactgcgccagggtggatgaaaacctcggcgcgttatcactgaccctaagcccgcagagctgacggcaattgaggcggtttttcctcacgacaccgcggccggcccccgctactggccggaaattatgtcgacattaaatcgctaa

SEQ ID NO: 36779 - DNA, 1474 bp, Salmonella paratyphi A
gccatcgcctggtggtaaaccgcctgattgtgcactcctgcgcaaaatcgcccgcgagctgaacgacattccgcagcaggagctgatcggacatcagctggcgttgccgcgtctgcatcaggatgatgaaattgggatgctggtgcgcagctataacctcaaccagcagcttatgcagcgtcaacgcgaggagcaaacggacaacgcgatgcgttttccggtttccgagctgcccaataaagcctttttaatggcgctgctggaacaggttatcacccgccaacagaccactgcgcttatcatcgtgacgtgcgaaacgttgcgtgacacggcaggcgtgctgcaagaaacgcagcgggagattctattactgacgctggttgagaagctgaagtcggtgctggcgccgcgcatggtgcttacgcaggtcagcggctatgactttgccattatcgcccacggctcaaagagccgtgcacgccatcacattaggtcagcaaatactcactatcattaatgaacgactgcccatccagggtattcaactgcgcccaagctgcagtattggcattgcaatgtattatggcgatctgaccgccgaagcgctctatggtcgcgccgtctccgccgcgtttaccggcgccgaaaaggtaaaaatcagatccagttctttgacccggcgcagatggaggccgctcaacagcgccttaccgaagagagcgatatccttaccgcgctggataaccatcagtttgccatttgctgcagcgcaggtcgagatgcgcaggcaacgtattaagcgccgaagccttgttacgtatgcagcagccggacgtagctgggaattgccggagggctgattgagcgcattgaatcctgcggcctgatggtcacggtgggccattgggtgctggaagagtcctgccgccagcttgccgcctggcaggagcgcggcgtgacattgccgctctccgtcaatctttccgcgttacagctcatgcaccctggcatggtgtcggatctgctggaattgttaaatcgctatcgtattcaaccgggtacgctgattcttgaggtcactgaaagccgccgtatcgacgatccgcacgctgccgtcgctatcttacgtccgttacgtaatgctggcgtgcgtatcgcactggatgattttggcatgggttacgcggggctgcgccagttacagcatatgaagtcgctaccggtcgatatccttaaaattgataaaatgtttgtcgatgggttaccagatgatcacagtatggtgacggcgattatcctgatggcccgcagtcttaatttacaattgattgccgagggcgtggagaacgaggcgcaacgcgcgtggctggaacaggctggagtcaacgtcgcgcaaggcttcctgtttgctcggcccgttcccgcggatatctttgaagaacggtatctgtcgcacgaaaatcctgattacaaa

SEQ ID NO: 36780 - DNA, 1289 bp, Salmonella paratyphi A
atgaaaacctctctgttcaaaagtctttattttcaggtcctgacagcaatcgccattggtattctccttggccattactatcctgaactgggcgcacaaatgaaaccgcttggcgacgcgttcgttaagctcattaagatgatcatcgctcctgtcattttctgtactgtcgtgacgggcatcgcaggcatggaaagcatgaaagcggtggggcgtaccggcgcggtcgcgtgctttactttgaaattgtcagtacgattgcgctgattatcggtcttatcatcgtcaacgttgtgcaacctggcgccgggatgaacgtcgatccggcaacgctggatgcgcaggcggtggccgtttatgccgcacaagccaaggagcagggcattattgccttcctgatggatgtcataccgggcagcgtgatcggcgcgtttgccagcggcaacattctgcaggtcttactgtttgcggtgttgtttggttttgcgctgcaccgtttgggcagcaaaggccagctcattttcaatgtgattgagagtttttcgcaggtcattttcggcatcatcaatatgatcatgcgcctggcgcgattggcgcattcggcgcgatggccttcaccatcggtaaatacggcgtcggttctctggtgcaactggggcagctcattatctgcttctatatcacctgtattctcttcgtggtggtggtgctggggacgattgcacgggtaacgggctttagcatttttaaatttattcgctatatccgggaagaattactcattgtgctcggtacctcctcttccgagtcagcgttgccgcgtatgctcgataagatggaaaaactggggtgccgtaaatcggtggtggggctggtgatcccgacggggtattcgttcaaccttgatggcacctctatctacctgacgatggcggcggtgtttatcgcccaggcgaccaacagccatatggatatcttccaccagataacgctgctggtcgtgttgctgctctcgtcaaaaggtgtcgcgggcgtgaccggaagcggctttatcgtgctggcggccactatctccgccgtgggacatttaccggttgcgggactggcgttaatcctcggtatcgaccgctttatgtccgaagcgcgcgctgactaacctggtgggtaacggcgtggcgacggtggtggttgccaaatgggtgaaagagttagatcaccaaaagctggacgatgtgcttaataatcgtgcgccggatggcaaaacgcacgaaatttcctcctactctcgc

SEQ ID NO: 36781 - DNA, 1858 bp, Salmonella paratyphi A
  misc_feature (1321)..(1321): n=g, a, t or c
atgtgtggaattgttggcgctatcgcagcgtgatgtagctgaaatccttctcgaaggtttacgtcgtctggaataccgcggatatgactctgccggtctggccgtggttgatgcagaaggtcatatgacccgcctgcgtcgcctcggtaaagtccagatgctggctcaggcagcggaagaacatcctctgcatggcggcaccggtattgctcacactcgttgggcgacgcacggtgaaccttcagaagctaacgcgcatccgcatgtttctgaacacattgtggtggtgcataacggcatcatcgaaaaccatgaaccgctgcgtgaagcgttaaaagcgcgtggctataccttcgtttctgaaaccgacaccgaagtgattgcacacctggtaaactgggaactgaaacagggcggtactctgcgtgaggctgttctgcgtgctatcccgcaactggtgggtgcgtacggtacagtgatcatggatacccgtcacccggataccctactggctgcacgttctggtagcccgctggtgattggcctgggtatgggcgaaaactttatcgcttctgaccagcctggcgctgttgccagtgactcgtcgctttatcttccttgaagagggcgatatcgctgaaatcactcgccgttcggtaaatatcttcgataacaccggcgcggaagtaaaacgtcaggatatcgaatccaatctgcaatatgacgcgggcgataaaggtatttaccgccactacatgcagaaagagatctacgaacagccgaacgcgatcaaaaacaccttaccgggcgcatcagccacggtcaggtggatttaagcgagctgggaccgaacgccgacgaactgctgtcgaaggttgagcatattcagatcctcgctgcggtacgtcttacaactccggtatggtttcccgttactggtttgaatcgctggcaggtattccgtgcgacgttgaaatcgcctctgaattccgtatcgcaaatctgccgtgcgccgtaacagcctgatgatcacgctctcccagtctggcgaaacggcagataccctggctggcctgcgtctgtcgaaagagctgggatatttgggctctctggccatttgtaacgtgccgggctcttcgctggtgcgtgaatccgatctggcgctgatgaccaacgcgggtaggaaattggcgtacatctaccaaagccttcaccacccagttaaccgtgctgttgatgctggtggcgaaactgtctcgcctgaaaggtctggatgcgtccattgagcatgatatcgtgcatggcctacaggcgctgcgangctcgtattgagcagatgctgtcgcaggacaagacgcattgagctgcttgcagaagatttctctgacaagcatcacgcgttattcctcggtcgtggcgatcaatatccgattgcgctcgaaggcccgtggaagctgaaagagatctcttacattcacgcggaagcctatgctgcaggcgagctgaaacacgggccgttggcgcctgattgacgccgatatgccggtgattgtggtggcgccgaacaacgaactgctggagaaactgaaatccaacatcgaagaagttcgcgcgcgtggcggctcagttgtacgtcttcgccgatcaggatgcgggttttgtgagcagcgacaacatgcacatcattgagatgccgcatgtggaagaggtcattgcgcctatcttctacaccgttccgctgcaactgctggcgtatcacgtggcgctgattaaaggcaccgacgttgaccagccgcgtaacctggcgaaatcagtgacggtagagtaagtcaaatgtagtaccaggcagaaggcgtcg

SEQ ID NO: 36782 - DNA, 1827 bp, Salmonella paratyphi A
tatgactcctccagtatcaaagtcctgaaagggctggatgcggtgcgtaagcgcccgggtatgtatatcggcgacacggatgacggcaccggtctgcaccacatggtattcgaggtggtagataacgctatcgacgaagcgctcgcgggtcactgtaaagatatcgtcgtgactattcacgccgataactccgtgtccgtaacggatgatggccgtggcattccgaccggtattcacccggaagaaggcgtctcggcggcggaagtgatcatgaccgttctgcacgcgggcggtaaatttgacgataactcctataaagtctccggtggtctgcacggcgtgggcgtctcggtagttaacgctctgtcgcaaaaactggaactggttatccagcgagatggcaaaattcaccgtcagatctacgagcacggcgtccgcaggcacccctggccgtcactggcgataccgataaaaccggcacgatggtacgttctctggccgagccacgaaaccttcaccaacgtcactgaatttgaatatgagatctctgcgaaacgcctgcgtgaactgtcattcctgaactctgcgtttccatccgcctgcgcgacaagcgcgacggcaaagaagatcatttccactacgaaggcggcatcaaggcatttgttgaatatctcaacaagaataaaacgccgatccatccgaatatcttctacttctccactgaaaaagacggtatcggcatcgaagtagcgctgcagtggaacgactggtttccaggaaaacatctactgctttaccaacaacattccgcagcgcgacggcggtactcatctggcaggcttccgtgcggcgatgacccgtacgctgaacgcctacatggacaaagaaggctacagcaaaaaagccaaagtcagcgccaccggcgacgatgcccgtgaaggtctgattgcggtggtttccgtaaaagtaccggatccgaaattctcctcacagaccaaagataagctggtctcttccgaggtgaaatcggcggtggaacagcagatgaacgaactgctgagcgaatacctgctggaaaacccatctgacgcgaaaattgtcgtcggcaaaattatcgacgccgcggtgcgctgaagcggcgtcgcgcgtgaaatgacccgtcgtaaaggcgcgctggatttagccggtctgccggcaaactggcggactgcaggaacgcgacccggcgctgtccgaactgtacctggtggaaggggactccgcgggcggctctgcgaagcagggcgtaaccgcaagaaccaggcgattctgccgctgaaaggtaaaatcctcaacgtcgagaaagcgcgcttcgacaagatgctctcctctcaggaagtggcgacgctgattaccgcgctgggctgcggtatcggtcgcgacgagtacaacccggacaagctgcgctatcacagcatcatcatcatgaccgatgcggacgtcgacggctcgcacatccgtacgctgctgttgaccttcttctatcgtcagatgccggaaattgtcgagcgtggccacgtctacattgcgcagccgccgctgtacaaagtgaagaaaggcaagcaggaacagtacattaaagacgacgaagcgatggatcagtaccagatttccatcgcgcttgacggtgcgactctgcacgcgaacgcccatgcgccggcgctatccggcgaagcgttagaaaaactggtctctgaatataacgccacgcagaaaatgattggtcgtatggagcgtcgcttcccgaaagcgctgctcaaagagctggtgtatcagccaactctgacc

SEQ ID NO: 36783 - DNA, 1103 bp, Salmonella paratyphi A
gaaattaccgttgaacgtgaacatttattaaaaccgcttcagcaggtctagtcggcctgggcggtcgtcctacgctgccgattctcggtaacctgctcctccaggtagcggacggtacgctttctctgaccggcaccgatcttgaaatggagatggtcgcgcgcttacgctttctcagccgcatgagccgggcgccactaccgtgccggcgcggaaattctttgatatctgccgcggcctgccggagggcgcggagattgccgttcagttggaaggcgatcggatgctggtgcgttctggccgtagccgcttctcgctgtctacgctgcctgccgccgatttcccgaatcttgacgactggcaaagcgaagttgaatttacgctgccgcaggccacgatgaagcgcctgattgaagcgacccagttttcgatggctcatcaggatgtgcgctactacttaaacggtatgctgtttgaaacggaaggtagcgaactgcgcactgtcgcgaccgacggcacccgctggcggtgtgctcaatgccgctggaagcgtctttacccagccactcggtgattgtgccgcgtaaaggcgtgattgaactgatgcgtatgctcgacggcggcgaaaaccgctgcgcgtgcagatcggcagtaataatatccgcgcgcacgtcggcgactttatctttacctcgaagctggtggatgggcgcttcccggattaccgtcgcgttctgccgaagaatccggataaacatctggaagcgggctgcgatatcctcaagcaggcgtttgcccgcgcggcaatcctctcgaatgagaaattccgcggcgtgcgtctgtacgtcagtgagaatcagctcaaaatcaccgccaataacccggagcaggaagaagcggaagagattctggacgtgagctacggcgggacggagatggaaatcggctttaacgttagctatgtgctggacgtgctcaatgcgctgaagtgcgaaaccgtgcgcattatgctgacggattccgtatccagcgtacagattgaggatgcggcgtcacagagtgctgcctacgttgttatgccaatgaggctgtagaatctgaaa

SEQ ID NO: 36784 - DNA, 724 bp, Salmonella paratyphi A
cgctccgttgacgcattgctgatcgacgatattcaattcttcgccaataaagaacgatcccaggaagagtttttccacacctttaacgctctgctggaaggcaatcagcagatcattttgacgtcggatcgctatccgaaagagatcaacggcgttgaggatcgtctcaagtcccgctttggttgggggctgacagtggcgatcgaaccgccagaactggaaacccgcgtggcgatcctgatgaaaaaagcggacgaaaatgatattcgtctgccaggcgaagtagcgttctttatcgccaagcgtctacgctctaacgtacgtgaactggaaggcgcgctgaaccgggtgatcgccaatgccaactttaccggccgggcgattactatcgactttgtgcgcgaagctgcgcgatttactggcgttgcaggaaaaactggtcaccatcgacaatattcagaagacggtggccgagtattacaaaatcaaaattgcggatctgctttctaagcgtcgatctcgctcggtagcacgtccgcgccagatggctatggcgctggcaaaagagctcaccaaccacagtctgccggaaatcggcgatgcgtttggcgggcgcgaccacactaccgtacttcatgcctgtcgtaaaattgagcaactgcgtgaagaaagccacgatatcaaagaagatttttcgaatttaatcagaacattgtcgtcgtga

SEQ ID NO: 36785 - DNA, 1515 bp, Salmonella paratyphi A
atgacgcaggcagttatgttgcaggggacggcatccgacgtcggcaaaagtgtgctggtggccggtttatgccgcattttttatcaggatggtctgcgtaccgcgccgtttaaatcgcaaaatatggcgcttaattctggtattacgccggatggtaaagagatggggcgggcgcagatttttcaggcggaagccgcggggatcacgccagatgtgcgtatgaatccggtgctgctcaaaccgaccagcgatcgccaggcgcaggtcgtgctgatggggaaagtggcgaccaatatggatgcggtgagttaccatgactataaaccgcgtttgcgtgagcaaatccttgcggtctataacagcctggcgcaggaatatgacgttattgtgctggaaggcgccggaagcccggcggaaatcaatctgcgcgatcgcgatatcgtcaatatgggaatggcggaaatggcccagtgtccggttattctggtggcggatatcgaccggggcggcgtattcgccgctatttatggcacgctggcgctactgcataaacaggagcgtgacagagtaaagggcgtcattatcaacaaattccgcggcgacgtggcgctactctattccggtatcgaacaaatcgaatcgcttaccggcgtcccggttctgggagtgatgccatggctggatgtggatctggaagatgaagatggcgtcgcgctgcaaaacgataaatatcgcggtaacgccccccgtgatatcactattgccattgtgcaactgccacatatttctaactttacggattttaacgctctggcggcgcacgatgtgcgcatacgctatattcgccgcccggaagcgttgactgacgctgatctggtgatcctgccgggcagtaagaatacgctgagcgacctcgcctggctgcgcgaaagcgggatggcggatgcggtattgcagacacatcggcagggcgtgccggtgatgggaatttgcggtggctaccagatgctgggcgacactattgtggatgaggtggagtcggggctgggtacgcagccgggcctgggactgcttaatacgatcactcgctttgcacaggataaaaccacgacgcaggttaacgcgacaatgtcaggcgagctgcccggctggctggctgccgcggcggggctaccggtacgcggttatgaaatccacatgggggaaacggtgctgcaggaaggatgctgtacggccatgacgttacagaaaaatggatgctctgtggcggatggcgcggtcaccgccgacggactggcgtttggcacttaccttcacggtctgtttgacagcgatgcctttacccgtgcggtggtcaatgggttacgggcgcgaaaagggcttgcgccgtgggaaacgactttttgttatgcggagcataaagcgcggcaatttgatctgctggcggaagcgatgcggcaacatattgatattgataaaatttacaccatcatgcaacagcatcaggagccggta

SEQ ID NO: 36786 - DNA, 815 bp, Salmonella paratyphi A
atgcttgccacttcagacctgtggtttcgttatcaggatgagccggtacttaaagggttaaatctggatttttcgctctcgcctgttaccggtttggtgggcgcgaacggttgtgggaagtctacgctttttatgaacctgagcggcctgttgcgtccgcaaaaaggggccgtattgtggcagggaaaaccgttggattacagcaagcgcggactactggcgctgcgccagcaagttgcgacggtttttcaggaccctgaacagcagattttttatactgatatcgatagcgacattgcgtttagtttacgtaatttgggtgtgccggaggcggaaatcacgcgccgcgtcgacgaggcgtaacgctggttgacgcccaacattttcgccatcagcccattcagtgtttgagtcatggacaaaaaaaacgtgtggctatcgccggagcgctggtgctacaggcgcgctatctattgctggatgaacccactgctggtcttgatcccgcagggcgcactcagatgattgctatcatcaggcggattgtggcgcagggaaatcatgtcattatctccagccatgatatcgatcttatttatgaaattagcgatgccgtatacgtgttacgccagggccagatcctgatgcatggcgcgcctggcgaggttttcgcgtgtacggaagcgatggaacacgcggggctaacccagccctggctggtcaaacttcatactcaactgggactgccgctgtgtaaaacagaaacggagttttttcatcgaatgcaaaagtgcgcattcaaggaggcgtcatga

SEQ ID NO: 36787 - DNA, 1441 bp, Salmonella paratyphi A
atgcagcttgaggtcattctaccgctggtagcctatctggtcgtggtcttcggggtctcgatttacgctatgcgcaaggtaccgccggcacctttttaaacgagtattttcttggcagtcgttcgatgggcgggatcgtgctcgcgatgacgctgaccgccacctatattagcgccagttcatttatcggcggtcccggcgcggcttataaatatggtctgggctgggtcttgctggcgatgatccagcttcccgccgtctggctttcactgggtattctgggtaaaaaattcgctatcctggcgcgtcgctataatgccgtcacgcttaacgatatgctattcgctcgttaccaaagccgcctgctggtgtggttagcaagcctgagtttattggtcgcgtttattggcgcaatgaccgtacaatttatcggcggcgcgcgactactggaaaccgcggcgggaagtccctacgaaaccggcctgctaatatttggcgtcagtatcgcactctatacggcgtgttgcgcgtttcgcgccagcgtacttaacgatacgctacagggcctggtgatgctggtcggcacgatagtgctgctggtgggcgtggtgcatgcggcgggcggtttacatcaggccgttgacacgctgcacgctctcgaccccaaactggtaacgccgcagggcgccgatgacatactttctcccgcttttatgacctctttttgggtactggtctgttttggcgtgattggcctgccgcatacggcagtgcgctgcatttcttataaagacagtaaagcggtacaccggggcattattatcggtacgattgtcgtggcgattttaatgttcgggatgcaccttgccggcgcgctgggtcgccggtgcttccggatctgacggtgccggatctggtgatcccaacgctaatggtgaaagttttgccgccgtttgccgccgggatcttccttgctgcgccaatggcggcgatcatgtcaacaattaacgcccaactgctgcaaagttccgcgacgatcattaaagatctctatctcaacctgcgtcccgatcagatgcaaaatgagatccggctgaagcgtatgtcggcagcgattacattactgctaggcgcgctgttgctgctggccgcgtggaaaccgccagagatgatcatttggctcaacctactggcgtttggcggcctggaagcggtgttcttatggccgctggtactgggcctttactgggagcgggcaaacgcggcacgcgcgttaagcgccatgatcgtgggcggcgtgctatatgccctgcttgccacatttaatattcagtacctgggctttcatccgattgtgcccgcgttactgttaagtttattggcttttctgatcggaaaccgattcggctcttccgcttcgcaagccaccgtattgtctact

SEQ ID NO: 36788 - DNA, 1338 bp, Salmonella paratyphi A
atgttggataaaattgtcatcgccaaccgcggcgagatcgcactacgtattcttcgagcctgtaaagaactcggcatcaagaccgtcgctgtgcactcaagcgcggatcgcgatttaaaacacgtattgctggcggatgagacggtctgtattggcccggcaccgtccgtaaaaagttatctgaacatcccggctatcattagcgccgctgaaatcaccggcgcggtggcaatccacccgggttacggcttcctttctgagaacgccaattttgccgagcaggttgaacgctccggctttatctttatcggcccgaaagcagacaccatccgcctgatgggcgataaagtgtccgcgattaccgcgatgaaaaaagcgggcgtgccgaccgtaccaggatctgacggcccactgggcgacgatatgaatgcgaaccgcgctcatgccaaacgtattggctatccggtgatcatcaaagcgtccggcggcggcggcggccgcggtatgcgcgtggttcgtagcgatgctgaactggcgcagtccatctccatgactaaagcggaagcgaaagcagctttcagcaacgacatggtatacatggaaaaatacctggaaaatccacgccacatcgaaattcaggtgctggcggacggccagggcaacgctatctatctggcggaacgcgactgctccatgcagcgtcgccatcagaaagtggttgaagaagccccggcgccaggcattacgccggaactgcgtcgctatatcggcgaagctgcgcgaaagcgtgcgtagacatcggctatcgcggcgcaggaacgttcgaattcctgttcgaaaacggcgagttctatttcatcgaaatgaacacccgtattcaggttgaacacccggtaactgaaatgattaccggcgtcgatttgatcaaagagcagttgcgcatcgcggcgggtcagccactgtcgatcacacaggacgaagttgtcgttcgaggccatgcggtagaatgccgtatcaatgccgaagatccgaacaccttcctgccaagccctggcaaaatcacgcgcttccatgcgcctggcggctttggcgttcgctgggaatctcatatctacgcgggctacacggtgccgccgtactatgattccatgatcggcaaactcatctgctacggtgaaaacgcgacgtggcgattgccgtatgaaaaatgccctgcaggaactgattatcgatggtatcaaaaccaatatcgatctgcagacccgcatcatgaatgacgagcacttccagcacggtggaaccaacatccactatctggagaaaaaactcggtcttcag

SEQ ID NO: 36789 - DNA, 468 bp, Salmonella paratyphi A
atggatattcgtaagattaaaaaactgatcgagctggttgaagaatcaggtatctccgaactggaaatttctgaaggcgaagaatctgttcgcatcagccgcacaacggcaaaccacggtttcccggtgatgcagcaggcttatgcggcgccgatgatgcagcaacccgctctgtctaacgctgtcgcgccagcggctactccagcaatggaagcgcctgccgcagcggaaatcagtggtcacatcgtacgctccccaatggttggtactttctaccgcaccccaagcccggacgcgaaagcgttcatcgaagtgggccagaaagtgaacgtgggcgataccctgtgcatcgttgaagccatgaaaatgatgaaccagatcgaagcagacaaagcaggcactgtgaaagcgattctggtcgaaagtggtcaaccggtagaatttgacgagccactggtcgtcatcgag

SEQ ID NO: 36790 - DNA, 563 bp, Salmonella paratyphi A
acctggctaaaagtttgtctgcatcttgccggttttttgccgcttctgtggctcttttgggcgataaatcacggtggactcagcgcagacccggtaaaggatatccaacactttaccggtagaaccgcgctcaaatttttgctcgccaccttgctggtttcaccgctggcgcgctacgctaaacagccattattgatacgcacacgccgcctgttaggattatggtgtttcgtttgggcgacactgcatttaaccagctatgccttgctggaactggggatacataacctggcgctgttaggaagcgagttgatttcacgcccttatttgacgcttgggatcattagctggctggtgttattggcgctgacgttgacctcaacgcaatttgcgacgtaacattgggcaaacgctggcaaacactgcataacgtcgtctatcttgtcgcgatcctggctcccatacattacctgtggtcggtaaagattttatcaccgcaaccggtcatctacgcggcattagcgttacgccttttagcgttgcgttaccggaagtttcgccag

SEQ ID NO: 36791 - DNA, 833 bp, Salmonella paratyphi A
atggataatgttgttgatcgccatgttttctatatttctgatggtaccgccatcaccgccgaggtcctgggtcacgcggttatgtcgcagtttccggtgacgatcagcagcattacgctgccattcgtggaaaacgaaagtcgcgcccgcgccgtcaaagaccaaattgacgccatttatcagcaaaccggcgttcgccgctggtgttttactcgattgttttacctgaaattcgcgccatcatcttgcagagcgaaggcttctgccaggatatcgtccaggcgctggtggcgccgcttcagcaggagatgaaactggatccgacgccgatcgctcatcgtactcatgggcttaatccgggtaacctgaacaagtatgacgcccgtattgccgctatcgattataccctggcgcatgatgatggcatttcattgcgcaacctcgatcaggcccaggtcattttacttggcgtttcgcgctgtggaaaaacgcccaccagtctctatctggcaatgcaattcggtattcgtgcggctaactaccctttcatcgccgatgatatggataatttgacgctgcccacatcgttaaaaccgctacaacataaactgttcggcctgacaattgaccctgaacgcctggcggcaattcgcgaagaacgccgtgaaaacagtcgctatgcctcgttgcgtcagtgccgcatggaagtggcggaggtcgaagcgctgtatcgtaagaatcagatcccctgcctgaacagcaccaattattccgttgaagagatagccaccaagattctcgatattatggggcttaaccgcagaatgtactag

SEQ ID NO: 36792 - DNA, 442 bp, Salmonella paratyphi A
atcgttaacggccccggcacccgctgcaccctgtttgtgtcagggtgcgtgcacgaaatgccctggctgctataacaaaagcacctggcggctcaattccggccagccgtttaccaaagagatggaagataagatcattgccgatctgaacgacacgcgcattcaccgtcagggattctcgctgtcgggcggcgatccgtgcatccgcaaaacgtaccggatatcctggcactggtacaacgcatccacgcggagtgcccggggaaagatatctgggtgtggaccggctacaagctcgatgaactcaacgccgcacagatgcaggtagtcgatctcatcaacgtgctggtcgatggcaaatttgtgcaggctctgaaagacccggcgcttatctggcgcggtagcagcaaaccaggtagtgcatcatttgcgttgatcgcta

SEQ ID NO: 36793 - DNA, 1809 bp, Salmonella paratyphi A
cgtttagcgcagctatttgcgatgctgcaaaacgagacgctgccgcaggacgaactggcgcagcggttgtcggtctccacgcgtaccgttcgggcggatatcgccgcgctgaacatgttgctgacgccgcatgcgcaatttactctcagccgcggcaacgggtatcagctcaaaattgatgatccggcacgttatcaatccctgcaaacgcagcaatctcccacgctgggcgcggtccgcgcaccagccaggagcggatccactatttgctggcgcgttttttaacctccgccttctcgctgaagctggaggatttagcagatgaatggtttgtcagccgtgcgacgttgcagaacgatatggcggacgtgcgcgagcatttgctgcgttatcatctgacgctggaaacgcgtccgcgtcatggcatgaaattgtttggcggagagatggcgattcgcgcctgtctgaccgaccttttatggacgctggcgcagcaggagccctcccatccgttaattgttagtaccacgctgaacaccgaggtgtctcaacggctgcagtctcttttgccggatattttctctcattgtcaaatccgcctgaccgatgagggcgagctgtttctgcgtttatactgcgcggtggcggtacggcgtattcgcgaggggtatccgttatcggaatgcgtggcagaggaggtcgatgaaaaggcgcatgcggcgcatgagattgcggagctactacaacagctggctgacaagccgctgtcggagccggaagtaagctggctgaaggtgcatattgccgcccgccaggtacaggagattgcccccagcgccattaatgccgatgatgaagaggcgctggtgcactatatcctcaattttattaatacccagtacaactataacctgttgaatgataaacagcttcacgcggacttgctgacccacatcaaaacgatgatcacccgcgtgcgctaccagatcatgatccccaacccactactggaaaatattaagcagcactatccgatggcgtgggatatgacgttggcggcgatatcgagttggggaaaatacacgccgtataccattagcgaaaacgaaatcggttttctggtgctgcatattggcgttgggctggaacgtagttacaacattggctaccagcggcagccgcaggtactgctggtgtgcgatgctggtaatgtgatggtgcggatgattgaagcggtactggcgcggaaatacccgcagattgagattgcccgcactctgacgctacgcgactatgaggcgcgggacagtattgtggaggattttgtgatttccacagcgcggatcggcgaaaaagataagccggtcatcatgatcgcaccctttcctaccgactatcaattggagcagatcggtaagctggtgctggtggacagaacccgtccgtggatgctggataaatatttcgatgcctcgcattttcgcatcgtggagggggaaatagatcaacaggcgctgtttaaaacgctgtgcgatcagttgcacgaggaaggctttgttgatgcggcgtttctcgattcggttattgaacgtgaagctatcgtcagtacgttattaggcgacgggattgccttgccacacgcgctggggctgctggcgaagaaaacggtggtttatacggctgctcgcgccgcaggggattgtctggggtgacgaaacggcgcatgttatttttttactcgccatcagcaaaagtgaatatgaagaggcgatggccatctacgatattttcgtcactttcctgcgcgaa

SEQ ID NO: 36794 - DNA, 1337 bp, Salmonella paratyphi A
actgttatcaccttaccctggcgtccggacgccgctgaacactattttgcgcccgtaaaccatttaccctgggcgatgctgctgcattcaggtgatgctattcatccctataaccgttttgatattctggtcgccgatcctgtcaccacactgaccacgcgcgcgcaggaaaccacggtatgtactgcgcgcacgactaccgtcactctcgacgatccgttacacgttttgcagactcaactggaggcgctgcctttccatcctcagcctgaccctgacttaccctttcagggcggcgcgctgggtctgtttggttacgatttagggcggcgtttcgaaattctgcccgatactgccgcgcgcgatatcgttttacccgatatggcgattggcctttacgactgggcgctgattgtcgatcaccaaaaacaggtggtgtcgctgataagccatcacgatgcagacgcccgatatcgctggctcaccagccagcgcgcgccaacccgcacgcccttcaggcttacctcagcctggcaatccaatatgacgcgttgcgagtatggcgagaagtttcgtcaggtgcaggcctggctgcacagcggggactgctatcaggtcaatctttcccagcgttttcaggcgagctacgagggtgatgaatggcaggctttcgaacgccttaaccgcgcaaatcgcgccccgttcagcgcctttcttcgtttacatgacggcgccatattgagcctttctcccgagcgttttatccaactggagaatggtcatattcagacgcgcccgatcaaaggtacgcttccacggcttaacgatccgcaggcggatcgtcagcaggcgcagaaactggccaactcaatgaaagatcgcgctgaaaatttgatgatcgtcgatttgatgcgtaacgacattggccgggtcgccgtgccgggttcagtgaaagtgccggaactgttcgtcgtcgaaccatttcctgccgttcaccatctggttagcaccattaccgcccgtttaccggactcgcttcatgctaccgacctgctgcgcgcggctttccccggcggctccattaccggcgcgcctaaagtgcgggcgatggaaattatcgacgaactggagccgcagcgacgcaacgcctggtgcggtagcatcggttatctgagtttctgcggcaagatggataccagtattactatccgcaccgtcacggcaacgcagggccaactctattgctcagccggcggactatcgtggccgatagcaaggaagaagcggaatatcaggaaacttttgataaagttaatcgtatcctgcacccactggag

SEQ ID NO: 36795 - DNA, 497 bp, Salmonella paratyphi A
  misc_feature (261)..(261): n=g, a, t or c
ctgacgctcgatcatttcttatcgcgctttcagcttttgcgcccgcagataactcatgaaacgttaaatcaacgtcaggccgccgtactgatccctgtggttcgccgcccccagccggggctgctgttgacccagcgggctattcatttgcgcaaacacgccggacaggtcgcctttcccggcgggctcgtggatagtaccgatgcttcgcttatcgccgcagcgcttcgcgaagcaggaggaagtcgccatcccgccgcngccgtggaagtgattggcgttttaccgcggtagacagcgtgaccggttttcaggtcaccccggtggtcggcattattccgccagatctcccctggcgcgcagtgaagacgaatgtctgcggtgtttgaatgcgctgcgcaacgttgcaactgggtcatatcatcgcttgatgtttacgtcgcgcaattcgcacggtatggctctctggtatgagcatattcgtctgggcatgacgc

SEQ ID NO: 36796 - DNA, 1163 bp, Salmonella paratyphi A
gagttatgtatgcctctcgctttatttgcactgacaataagtgctttcgttatcggtacgactgagtttgtgattgtcggcctggtgccgaccattgctcaacaactggctatctcgttaccttccgccggaatgctggtttcaatctatgcgctgggtgtggctattggcgcgccggtgctaaccgcgctgaccggacgcctgccgcgtaaacagttactggtcgcgctgatggtcttgtttacggcggggaatttgctggcatggcaggcaccgggctatatgacattaatcgtcgcccgtctgctgacgggcctggcgcacggcgtgttcttctcgattggatctaccatcgcgacaagtctggtgccaaaagagaaagcggcttctgcgatcgctattatgtttggtggtttaacggtagctctggtcacgggcgtgcgctgggaacatttatcggtcagcattttggctggcgtgagaccttccttgcggtatcactgttaggtgtgattgcgctgatgagcagtcaactgctgatcccggccaacattcccggtcgggcggccgccagcattcgtgaccaggtgaaagtactggctcatcctcgtctgttgctgatttacgccgttacggcgcttggctacggcggggtattcacggcattcaccttcctggcgccgatgatgcaggatctggcgggattctccccggcagcagtaagctggatcctactgggttatggcgtatctgtggctatcggcaatatctggggcggtaaactggcggataagcatggtgccgtgccggcgctgaaattcattttcgccgcgctgtttgttctgcttatggtcttccaggtgacggcctccacgcagtatgccgcgctggctaccatcctagtgatgggggtctttgccttcggtaacgtaccggggttgcaggtctacgtggtacagaaagcggaacaattcacgcctaatgcggtagatgtggcgtcaggtctgaacattgcggcgtttaacattggtattgcgctgggctccgtgattggcgggcaaacggtggagcattacggtttggcgcagacgccgtggattggcgccctcattgttctggtggctttcctgctgatgggtgtcagcggacgtcttgataaacct

SEQ ID NO: 36797 - DNA, 803 bp, Salmonella paratyphi A
atgactatccctgcattcggtttaggtacttttcgcctgaaagacgacgtggttatcgcttctgttaaaacggcgcttgaactaggctactgtgctgtcgacactgcgcaaatctatgataatgaagcggctgttggacaggcgattgctgagagcggcgtaccgcgtaatgagctgtacatcaccaccaagatctggattgaaaatcttagcaaagacaagctaatcccaagcctgaaagagagcctgaaaaaactgcgtaccgattatgtcgatctgacgctgatccactggccatctccgggtgatgccgtgcctgtcgaagaatttatgcaggcattgctggaagctaaaaaacaagggctgactcgcgaaattggcatttcaaacttcaccattccgttgatggaaaaggctattgccgcggtgggcgcagaccatatcgccaccaaccagattgagctatctccgtatctgcagagtcgtaaggtggttgactgggcgaaagcgcacggtatccatatcacctcttacatgacgctggcatacggtaaggcgctgaaagatgaagtgattgcaccattgcggctaaacataatgcgaccccggcgcaggttattctggcatgggctatgggtgaaggttactcggtgatcccttcatccaccaggcgtgaaaacctggcaagcaacctgctggcactggaactgcatctggatgccgaagatagagcagcgatcgcggcactggactgcaacgaccgcctggttagtccggaaggtttggcccctgagtgggattaa

SEQ ID NO: 36798 - DNA, 264 bp, Salmonella paratyphi A
atgctttcagcacttatctcttccgcatttagctaccgggcagtgccattggcatgacaacccgaacaccagtgatgcgtccactccggtcctctcgtactaggagcagcccccctcagttctccagcgcccacggcagatagggaccgaactgtctcacgacgttctaaacccagctcgcgtaccactttaaatggcgaacagccatacccttgggacctacttcagccccaggatgtgatgagccgacatcgaggtgccaaa

SEQ ID NO: 36799 - DNA, 796 bp, Salmonella paratyphi A
atgaaaaagacgaaaattgtttgtactatcggtccgaaaaccgaatccgaagagatgttaagcaaaatgctggacgcgggcatgaacgtgatgcgtctgaacttctctcatggcgattatgcagaacacggtcagcgtatccagaacttgcgcaacgtgatgagcaaaactggtaaaaaagccgctattctgcttgatactaaaggaccagaaatccgcaccattaaactggaaggcggtaacgacgtttcgctgaaagcgggccaaacctttacttttaccaccgacaaatccgtggtcggtaataatgaaatcgttgccgtcacctatgaaggcttcaccagcgacctgagcgttggcaacaccgtcctggttgacgatggtctgatcggtatggaagtgaccgccatcgaaggcaataaagtcatttgtaaggtgctgaacaacggcgatctgggcgagaacaaaggcgttaacctgccgggcgtttctattgctctgccggcgctggctgaaaaagacaaacaggacctgatcttcggttgcgaacagggcgttgactttgttgctgcgttcctttatccgtaaacgttctgacgttgtcgaaattcgcgagcatctgaaagcccacggcggcgaaaacatccagattatctctaagatcgaaaaccaggaaggcctgaacaacttcgatgaaattctcgaagcttccgacggcatcatggttgcgcgtggcgacctgggcgtagaaatcccggttgaagaagtgatctttgcgcagaaaatgatgatcgaa

SEQ ID NO: 36800 - DNA, 1351 bp, Salmonella paratyphi A
atgaaaaaagtcaaaaaattgtctcttaccgatttagtgctttatggtctggtgtttatggtgcctatcgcgccagtctctctttatggcgtcgtttataatctttcgcacggtatggttgcgctggtttatattattggcgcgatcggatgttttttaccgcgtacagctactctaccttatcgcaacatatctcctcgtcgggttcggcctatgcgtatgctggcgtatgcattaatcccgccgtagggtttctgaccggatggatattactgctggattatcttttgttccctacgctcgtggcagtgctgggcggcgtcgcggtccacgctattttaccgcaaatcccggtctgggtctggccgttgatttatgtggctattggcaccggagtcaactatctcgggatacagcaaacggcgaaattcgataagttactggtctttattcaactcggtattctggcgattttcgtgctactcattgtccgtctgatgatgcaggacagtagtcagataacgctttctttccggccttttttcgattcacagtggttcaccccagggctcatcgcgacggcgatttcggtggctgcgctgaattttctcggctttgacgctatcagtacattaagtgaagaaagcgaaggcggggggacgcgcgtcagtaaagcaacgctgttggcgttagttttggcgacggtactgtttattatcgttgtggcgtttgcggcgttcgcaccggtaacgtcgaccgcttcgcgaaaggtaatgcgacgaatgaagcatttttcaccattgccggcaacgttggcggtatctggctcaaagtggcgttttccatcattgtggcgtttgtgtgcgccgtcggaacattattaccgcgcaaacggcggtgtccagagtgttattttcaatggggcgcgaccgaatgctgcccgccttcctcgctcacgtccataccacgcgtaaaacgccgaattatgccattctgtttaccggcggcgtcaccctgctgctcagctacctgttttccggcaagattgagtctatctccacgctggtgaactttggcgcgcttttcgctttttttgtcgtgaacctgtgtgtgtttatcctgttcaatttccggatgaaagcccagcggcgcatgtttcgcccatgttatttcgccgatcatggggatgatcgtcatcggctacgtctgtttaaacatgaacattcacgctctgatactcggaattagctgggcggccatcgggatagcgattctgtgctatcgaaaagcacacaaccaaaacatcgccatcgacctggaaggcaaaaagttgctcgattgacattatgcg

SEQ ID NO: 36801 - DNA, 895 bp, Salmonella paratyphi A
gaaaaaattgatgaaggcttgtgggatacgctgagcgccgtctggatttttgtaatcttgacgttaacgatacgcctgcgtttagtcgcctgggcgatatgctggatcaaaaaaaccgtaccaccattaactattttgcgatgccgcccagcacgtttggcgctatttgcaaagggttaggggaggctaaactcaacgccaaaccggcgcgtgtcgtgatggagaaaccgttagtacttcgctggcgacctcgcgtgagattaacgatcgggtcggcgaatactttgaagagtgccaggtatatcgtatcgaccactatctgggtaaagaaacggttctcaacttgctggcgctgcgttttgccaactcgttattcgttaataactgggataaccgcactatcgatcacgttgagattaccgtagcggaagaggtggggattgaagggcgctggggatactttgaccaggccggtcagatgcgcgatatgatccagaaccacttgctgcaaattctctgcatgattgccatgtcaccgccgtctgacctgagcgccgacagtattcgtgatgaaaaagtaaaagtgttgaaatcgctgcgccgtattgatcgctccaacgtgcgtgaaaaaacggttcgtggtcaatacaccgcgggctttgcgcgggggcaaaaggtgccgggctatctggaagaagagggcgcgaataaaagcagcaacaccgaaacgttcgtcgcgatccgttcgactatcgataactggcgttgggcgggcgtgccattctatctgcgcaccggcaagcgtctgccaaccaagtgctctgaagtcgtggtttatttcaagacgcctgaactgaacctctttaaagagtcctggcaagacctgccgcagaac

SEQ ID NO: 36802 - DNA, 849 bp, Salmonella paratyphi A
  misc_feature (305)..(305): n=g, a, t or c
atgagtcaaacatcaaccttaaaaggccagtgcattgctgaattcctcggtaccgggttgttgatttttttcggtgtgggttgtgtcgctgcgcttaaagttgccggagctacttttggacagtgggagatcagcgtcatctggggtctgggagtagcgatggctatctacctgacggcaggtgtttctggcgcacacctgaacccggcagtgaccatcgcactctggctatttgcctgtttcgacaaacgtaaagttgttccttttattatttctcaagttgccggcgccttttgcgacggcgnttagtttacgggctttattacaatctgtttgtggacttcgaacaaacccaccatatcgtccgtggcagcgttgaaagtctcgatctcgcaggcattttctcaacttacccgaatcctcatatcaattttgtgcaggccttcgcggttgaaatggtgattaccgctattctgatggggctgattctggcgctgaccgacgacggcaacggcgtacctcgcggtccgcttgcccactgctcattggtttactgatcgccgttatcggtgcctctatggggccgttgaccgggtttgcgatgaatccggcgcgtgactttggccccaaaatgttcgccgggcttgcgcgtggggtgaaattgcgtttaccggcggtagagacattccttacttcctggtgccgctgtttggccccatcgtcggcgccattctgggccggtttgcttatcgcaaatttattggccgtcatttgccgtgcgatacctgcgtcgtggaagagaaggactccaccgcgaccacacaacaaaatgcttcgctgtaatctgat

SEQ ID NO: 36803 - DNA, 1511 bp, Salmonella paratyphi A
atgactgaaaaaaaatatatcgttgcgctcgaccagggtaccaccagctcccgcgcggtcgttatggatcatgacgcgaatatcgtcagcgtatcacagcgtgaatttgagcaaatttatcctaagccaggctgggtagaacacgacccgatggaaatttgggcgtcccaaagctcaacgctggtagaagtgctggctaaggccgatatcagttccgatcagattgccgctatcggtatcaccaaccaacgtgaaaccgcgatcgtctgggaacgtgaaaccggcaaaccgatatacaacgctattgtctggcagtgcgtcgtaccgccgatatttgcgaacagcttaaacgcgacggcctggaagattacatccgcgacaataccggtctggtcgtcgaccgtacttctctggcactaaagtgaaatggatccttgaccatgtggaaggttcgcgcgaacggcgaagcgtggcgagctgctgttcggtacggtggatacctggcttatctggaagatgacgcagggccgcgtccacgttacggattacaccaacgcctcacgaaccatgctgttcaacatccatgatttggactgggacgataagatgctggacgtgctggatatcccacgcgcgatgctgccccaggtacgtaagtcctccgaagtctacggccagaccaatattggcggtaaaggcggtacacgtattcctatcgccgggattgcaggggatcagcaggccgcgctattcggccaactgtgcgtaaaggaaggaatggcaaagaatacctacggcaccggctgctttatgctgatgaacaccggcgaaaaagcggtaaaatcggaaaacggcctgctgaccaccatcgcctgcggcccaagcggcgaagtcaactatgcgctggaaggcgcggtgtttatggcgggagcgtccattcaatggctgcgtgatgaaatgaagctcatcagcgacgcgttcgactccgaatatttcgccacgaaagtgaaagataccaacggtgtctacgtggttccggccttcaccggtctgggcgcgccgtactgggacccgtatgcccgcggcgccatttttggcctgacccgcggcgtgaactctaatcacattatccgcgcaacgctcgaatccatcgcttaccagacccgcgacgtactggaagcgatgcaggccgactccggtatccgcctgcacgctctgcgtgtggacggcggcgcagtggccaacaacttcctgatgcagttccagtcagatattctcggcacgcgggtggaacgcccggaagtgcgcgaagtgaccgcgctggcgccgcctatctggctggcctggccgtcggttactggcagaacctggacgagctgcaggaaaaagccgtcattgagcgagaattccgccccggcattgaaactaccgagcgtaactaccgttacagcggctggaagaaagcggttaaacgcgcaatggcgtgggaagagcacgacaagtaaggtcgc

SEQ ID NO: 36804 - DNA, 960 bp, Salmonella paratyphi A
atgattaagaaaatcggtgtgttgacaagcggcggtgatgcgccgggcatgaacgcggcaatccgcggtgttgtgcgcgcagcgttgacggaagggctggaagtcatgggcatttatgacggctatctgggcctgtatgaagatcgtatggtgcagcttgaccgttacagcgtatctgacatgatcaaccgtggcggtactttcctcggttccgcccgtttcccggaattccgtgacgaaaatattcgcgctgtcgcgatcgaaaacctgaaaaaacgcggcatcgatgcgctggtagttattggcggcgacggttcttatatgggtgcaaaacgtctgactgaaatgggcttcccgtgcatcggtctgccaggcactatcgataacgacatcaaaggcactgactacactatcggctacttcactgctctcggcactgtagtggaagcgattgaccgtctgcgtgacacctcctcttctcaccagcgtatctctatcgttgaggtgatgggccgttattgcggcgacctgacgttggcggcggctattgctggcggctgtgagtttatcgtggtgccggaagttgaatttaatcgcgaggatctggtggcggaaatcaaagccgggatcgcgaaagggaaaaaacacgctatcgtcgctatcaccgaacatatgtgtgatgttgacgaactggcgcactttattgaaaaagaaacgggccgtgaaacgcgtgcgacggtgctcggccacattcagcgcggtggttccccggtaccttacgatcgcattctggcttctcgtatgggcgcgtatgctattgacctgctgctggaaggccatggcggtcgttgtgtcggtatccagaacgagcagcttgttcatcatgacatcatcgatgcgattgaaaacatgaagcgtccgttcaaaagcgactggatggagtgcgcgaaaaaactgtac

SEQ ID NO: 36805 - DNA, 498 bp, Salmonella paratyphi A
atgcgcaaagttaccgctgctgttatggcctcaacgctggcattcagttttttaagccacgcagctgaagttgttacaagcgataactggcaccccggtgacggggccacgcagcgtagcgcgcaaaatcatatgtttgacggcataagtttaaccgaacatcagcgtcagcagatgcgagatcttatgcaacaggcaaggcacgaacagcctcctgttaatgttagcgaaatggagacaatgcatcggcttgtcaccgcagaaaaatttgatgaaagcgctgtgcgcgctcaggcagaaaaaatggcgcaagagcaggttgcccgccaggtcgaaatggcccgcgtgcgtaaccagatgtatcgcctgttaacgccggagcagcaagcggttttgaatgaaaagcatcagcaacgaatggagcaactgcgcgacgtggcgcaatggcaaaaaagttcatcgttgaaattattgagtagtagcaactcacgttcccag

SEQ ID NO: 36806 - DNA, 882 bp, Salmonella paratyphi A
atgttacgtaaaaaacaatacaattcaaaagctaatgtgtcatatctgatatatcagcaagcaaacttaatgaaatatacaataacaacaataaagtatgtaaattttcttatatctgatatattagatccgttaattttgaataaattaattacaatggagccgggtttaaccatggaggagaagaaaatgaaaaatagattaaagcgtggctttagtcacatatcaattgaaatacccaaatccatcacccaggtgattaaagagaaaataagggagatgattatccatggcgatttcgatcttgggcaagcgatcagtgaaaatgaactatcaaatattctgatggtaagtaaaacaccaattcgtgaagcttttatttggctgagctataatgaaaacttggtcaacatcattccccgcagtgggacatttgttttttctgtcaccgacgaggatatcaatgatctcatcaaaatgagggttatccttgaacagggcgcaattcgtgaagcgatggagaaaaatgctaacaatgtcatagtcgaattaagcaatattttatcgaagtcagcaaaaattaatgcagagcgagatacgcaagcttacctcaaactggatcatgattttcattatgtttttgtgaaatatgccgataataaatacatttcacaagcacacctgttgatctctgcacgtttattggcaattcgctacagactggattttaccgctgaatatatcaccagctctaaccgtggacatgccactattttggatatgttaaaaaacaacaacgtcgagggcgtctgtaattttatcacgcaccacatcggtagcggttttacagaacgcgcaagaaaacttcttgcgctgaaagcg

SEQ ID NO: 36807 - DNA, 1671 bp, Salmonella paratyphi A
  misc_feature (1178)..(1178): n=g, a, t or c
atgtgttctattttcggcgtattcgatatcaaaacagatgcagcggaactgcgtaaaaaagcccttgaactgtcacgcctgatgcgccatcgcggcccggactggtccggcatctatgcttgcgataacgcgattctcgcacatgaacgcttgtcgattgttgatgttaacgccggcgcccagcccctgtataacgccaggaaaacccacgtgctggcggtgaacggtgaaatttataaccatcagacgttacgcgcggagtatggcgatcgttacgcgttccagacaggctccgactgcgaagttatcctcgcgctgtatcaggaaaaagggccgaatttccttgacgatttacaggggatgttcgccttcgccctgtatgacagcgaaaaagacgcttatctgattggtcgtgaccatatcggtattattccgctctatatgggctatgacgaattcggcaacttctacgtagcgtcagaaatgaaagcgctgaccccggtctgccgcaccattaaagagtttccggcgggcagctacctgtggagcaaagacggcaaaattcgtcagtactatcagcgcgactggttcgattacgatgcggtaaaagataacgtcaccgacaaaaacgcgctgcgtcaggcgctggaagaatccgtgaaaagccacctgatgtccgacgtgcctacggcgtactgctctccggcggcctggactcgtcggttatctcggcaatcaccaaaaaattcgccgcccgtcgcgtcgaagatcaggagcgctccgaagcctggtggccacagttgcactcttttgcggtaggtctggaaggttcgcctgacctgaaggcggcccaggaagtggctaaccacctcggcaccgtgcatcatgaaattcacttcaccgtccaggagggtctggatgcgattcgcgacgtgatttaccacattgaaacctatgacgtaaccactatccgcgcctcaacgccaatgtatctgatgtcacgtaagatcaaagcgatgggcatcaaaatggtgctctccggcgaaggttccgatgaggtgtttggcggctatctgtacttccataaagcgccgaacgccaaagagttacatgaagagacggtacgtaaactacaggcgctgcatatgtatgactcgcccgcgccaacaaagcgatgntccctggggcgtggaagcgcgcgtaccgttcctggataaaaattcctcgacgtggcgatgcgtatcaacccacaggataaaatgtgcggcaacggcaagatggaaaaacacgtcgtgcgcgagtgcttcgagtcttatctgccggcaagcgtgcgtggcgtcagaaagagcagttctctgacggcgtaggctacagctggatcgatacgctgaaagaggtggcggcgaaacagatttccgatcaacaactggaaaccgtctcttccgctttccatacaacacgccgtcgtctaaagaggcgtatctgtaccgggaaatttttgaagagctgttcccggtgccaagcgcggcggagtgcgtacccggcggcccgtccgtcgcctgttcttccgccaaagccattgagtgggatgaagcattcaaaacgatggatgacccgtcaggccgcgcggtcggcgtgcatcagtcggcgtaccagtaaatttacgatgac

SEQ ID NO: 36808 - DNA, 1222 bp, Salmonella paratyphi A
atgacaccaggcggacaagctcagataggtaacgttgatctcgtaaaacagcttaacagcgcggccgtttaccgcctgattgaccagcatggtcctatctcgcgcatacaaattgccgagcaaagccagcttgctcccgccagcgtaacgaaaattacgcgtcaactcattgaacgcgggctgatcaaagaagtcgatcagcaggcctctaccggagccgccgcgctatctctatcgtcacggaaacccgtaacttccacgccattggcttcgcctggggcgtcatgacaccactttaacgctctacgatctgagcagtaaagtggtcgctgaggagcattatccgctgccggagcgcacccaagagacgctggaacatgcgctgctcaacactatcgccgtctttattgatagctgtcagcgtaaaattcgtgaattgatcgctatctcggtgatcctgccagggcttgtcgatccggaaagtggcgtgattcgttacatgccacacattcaggttgaaaactggggactggtcgaagcgctggaaaaacggtttcacgttacctgtttcgtgggacacgatattcgtagcctggcgctggcggaacactacttcggcgccagtcaggattgcgaggactcgattctggtgcgcgtccatcgtggtacaggcgccgggattatctccaacgggcgcatcttcattggccgtaacggcaacgtcggcgaaattgggcatattcaggtggagccgttgggcgagcgctgccactgcggtaatttcggctgtctggaaaccattgccgccaatgcggcgattgaacaacgggtgctgaatttgcttaaacaagggtatcaaagccgtgttccgcttgacgactgcacgattaaaaccatctgtaaggcggcaaaccggggcgacagcctggcctcggaagtcattgagcatgttggccgccatttgggcaaaacgatcgccattgctatcaacctgtttaatccgcaaaaaatcgtcattgccggcgagatcattgaagccgataaagtcctgttgcccgctattgaaagctgtatcaatacgcaggcgttaaaggcatttcgcaaaaatttgccggtggtacgctccacgctggatcaccgttctgctatcggcgcatttgccttagttaaacgcgccatgctcaacggaacattactgcaacgtttgctggaaagttgatgc

SEQ ID NO: 36809 - DNA, 1152 bp, Salmonella paratyphi A
atgtatgctttaacccagggccggatctttaccggtcacgaaattcttgatgaccatgcgcttgttgtcgctaatggcctgattgaccgcgtttgtccgatggccgaactgccaccgggaatagaacaacgctcattgaatggggccattctctcccccggttttattgatgtgcagttaaacggctgcggcggcgtgcagtttaacgataccgcagaagaccgatccgatgaaacgctggaaattatcaggaagccaatgaaaaatcgggctgtactaactttctgccaacgcttatcactaccagcgatgaattgatgaaacagtggcatgcgtcatgcgcgaatacctggaaaaacagtacgcaccaggcgctgggtctccacctggaagcgccctggcttaatctggtaaaaaagggcacccataatcctgatttcgtgcgtaaaccgaggctgcgctggtcgatttcttatgcgataatgccgacgtcatcaccaaagtcactctcgcgccggaaatggtgcctgctgacgtaatcgctaaactggcgaatgcgggcattgtggtttccgcaggtcactccaacgcgacgttaaaagaggcggaaagcgggcttccgcgccgggattacttttgcgactcacctgtttaacgcgatgccgtacattacagggcgtgagccgggccttgtggcgctgttctggacgaagcggatatttacttggcgttatcgccgatggtctgcatgtcgactacgccaacattcgcaatgccacaaagctgaaaggcgacaaactttgtctggtgacagacgccacgcaccgcgggggccaatattgagcagttcattttcgcaggtaaaacaatatactaccgcaatgggctgtgtgtggatgaaaacggtacgttgagcggttcgtccttaaccatgattgaagggtacgcaacctggtcgcgcattgcggcatcgcgctggatgaagtgtgcgcatggcaacgctctatccggcacgcgctatcggcgttgataaacatctcggtagcattgcgccgggtaaagtcgccaacctgaccgcgttcacccacgattttaaaattatcaagaccatcgttaatggtgacgaggtcgttgacttgagtaagtgagaat

SEQ ID NO: 36810 - DNA, 542 bp, Salmonella paratyphi A
agctttatgcatcgtaactttttcgatcacgttgatattccagcagaaaacatcaatcttctcaacggtaacgcaccggatatcgatgcagaatgccgtcaatatgaagaaaaaattcgttcttacggtaaaatccatctgtttatgggcggcgtcggcaacgaggtcacatcgcctttaacgaaccggcttcttccctggcttcccgtacccgtatcaaaacgttaacccatgatactcgcgtagcgacttcccgcttctttgacggcgacgtaaaccaggtgccgaaatacgcgctgacggtaggcgtaggcacgctgctggatgcggaagaagtgatgattctggtgctgggccatcagaaagcccaggcgctgcaggcggcggttgaaggcaacgtcaaccacatgtggaccattagctgcctgcaactccatccgaaagcggttgtggtatgcgatgagccgtccacaatggaacttaaagttaaaacattgaaatatttcaatgaattagaagcagaaaatattaaaggtctgtaa

SEQ ID NO: 36811 - DNA, 2473 bp, Salmonella paratyphi A
atgaacgaacaatattccgcgttgcgtagtaatgtcagtatgctcggcaaggtgctgggagaaaccatcaaggatgcgctgggagagcacattcttgatcgcgtagaaacaatccgtaagctatccaaatcttcacgcgccggcaatgaagctaatcgccgggagctgctcaccacgctacaaaatttgtctaatgacgagctgctgccagttgcgcgcgcgtttagtcagttcctgaacctggccaatactgccgagcaataccacagcatttcgccaaaagcgaagccgccagcaacccggaagtgattgcccgcactctgcgtaaactgaaaaaccaaccggacctcaacgacgcaaccatcaaaaaagcggtagagtcgctgtctctggagttggtgctaaccgcccacccgacagaaattacccgccgtacgcttattcacaagatgggtgaaatcaataactgtctgaaacagcttgataataccgatatcgccgactacgaacgccaccaggtgatgcgtcgcctgcgccagttgattgcccaatcctggcatacggatgagatccgcaagcagcgcccaagcccggtggatgaagccaaatggggcttcgccgtggttgagaacagcctgtggcagggcgtacctaactatctgcgtgaactgaacgaacaactggaagaaaatctcggctacaaattgccggtggattttgtgccggtacgttttacctcctggatgggcggcgaccgagacggcaacccgaacgtgacggcggatatcacccgccacgtactcttgttaagccgctggaaagccaccgatctgttcctgaaagacattcatgttctggtatcagaactgtcgatggtcgacgccacgccggagctgctggcgttagtgggtgaagaaggcgcgtctgagccgtatcgctacctgatgaaaaaattgcgcgcccgtctgatggcgacccagtcctggctggaagcgcgtctgaaaggcgaggagctgcccaaaccggctggcctgctgacgcaaaacgagcagctctgggaacctctgtacgcctgctaccagtcgttacaggcctgcggcatgggcattatcgccaacggcgagttactcgacacgctccgccgcgtgaagtgtttcggcgtacgctggtgcgtattgatatccgccaggagagcacccgccataccgaagcgctgggcgaaattacccgctacctcggtattggcgactacgaaagctggtcggaagccgacaagcaggccttcctgatccgcgagctgaactccaaacgtccgctactgcccgcgtaattgggagccgagcaacgatacccgcgaagtgcttgaaacctgcaaggttattgccgaagcaccaaaagggtcgatcgccgcctacgtaatttcaatgcgaaaacgccgtctgatgtgctggctgtgcatctgctgctgaaagaggcaggtatcgctttgccatgccggtcgcgccgctgtttgaaaccctcgacgacctgaacaacgccgacgacgtgatgacccagttgttgaatatcgactggtatcgcgggctgattcagggtaagcagatggtcatgatcggctactccgactcggcaaaagacgccggcgtcatggccgcgtcatgggcgcagtatgcaggcgcaggacgccctgatcaaaacctgtgaaaaagccggcattgagctcactctcttccacggccgcggcggctctattgggccgtggcgtgcggcccagcccaacgcggcgctgtttgcgcaaccgccaggcagtctggaaggcggtctgcgcgtgaccgagcagggcgagatgatccgcttcaaatacggcctgccggaagtcaccgtcagcagcctttcgctctacaccagcgcaattctggaagcaaacctgctgccgccgccggaaccgaaagacagctggcgtcatattatggatgagctttccgttatctcctgtgaaacctaccgcggctacgtgcgcgaaaataaagactttgtaccgtacttccgtcgcgacgccggagcaagagttgggcaaattgcgctcggctcacgtccggcgaaacgtcgtccaactggcggtgtcgaatcgcgcgcgcgattccgtggatcttcgcctggacgcaaaaccgcctgatgctgccagcctggctggggcgggtactcgctgcaaaaagtggtggaagacggtaaacaaagcgaactggaagccatgtgccgcgactggccgttcttctccacgcgtcttgggatgctggaaatggtattctcgaaagccgacctgtggctggccgagctattacgatcgagcgtctggtggcgaaacacgctactggccgctgggcgaaagaggctacgagcacctgctggaagaagacattaaagtggtgctgcgattgccaacgattcgcacctgatgccgacttaccgtgga

SEQ ID NO: 36812 - DNA, 1062 bp, Salmonella paratyphi A
atgacaacaccatcctggcggtcgcttcgtattaagaagtatcagttttctttacgtcttttcttgtttctcaacgccgtgtcggcgctatttactctcgttttccccctttatcagatcaatgtattttgcacgccaatgatcgggatagttgtcctgagcgtattactgttgatatggcatgggaaatatggacaaaaaagaattaatctcccctttatctccctactctttgggggaatatgggcggcgcatattgcgctaaagtatccggcgttaggccattatgatttctcttttttactgatttccctgcttagcgttctgtttatcggctcgatagcctttgccgcgaatatcgtcgcgtttacgctctattcgctaccgccagtcgcggtctgcctgtggctgaacggtaatgaacaaggtttgcgaattctctatttgctggccctgccaatggtgggaatcgctattcaacatgttatccagaaacgctacgataactttgcccaacagctcatgtttaagctgctggccgagcgggaaaccctcaatggcctgagtatgcttgatccattaaccggcttatataatcgccgtggcctgcaaaatcggctggatacgttacaggcgccgggcagccatgaacactacgtcctgctattggatatcgatcatttcaaagcgtacaacgatcactacggtcatatgatgggcgatcaggcgttaatccgcgtctcagcggcaattcgggacgccgtgcgatcgcgcgatgtcgtctgccgttttggcggggaagaatttctggtgttgctgaccaccgccgaaccacagcaagcccgcgctaccgcagaacgtatccgacaggaagtatacgatcttaaaatcccgcatatgtttaacgaaagcgtcgccaccaatgtcactgtcagtatcggcattgcgcccctgacggatcgcaatatcggagacgctatcgaaaaagcggataaagcgctctacgaagccaagcatcttggacgtaaccacattctggtcagcgacgacatgcgcgcccta

SEQ ID NO: 36813 - DNA, 494 bp, Salmonella paratyphi A
atgaagatgtttgtccctgccgtcgtcttcgccgccctcgccagcgcctctgcctgggctaacaatggcgataccgcgcagccgctggaaaaaatcgccccctatccgcagcggaaaaaggaatgaagcggcaagtgataacccttacccctcagcaggatgaatctaccctcaaagtggaactgttgattggccaaacgctgaatgtggattgtaaccagcatcgcctcggcgccacgctggaaacaaaaacgctggaaggctggggctatgactattatgtctttgataacgtcacctctccggtatcaaccatgatggcctcgcctgacggtaagaaagagcaaaaattcgtcaccgcctggctgggtgaagacgggatggtgcgctacaacagcaagctgccgatcgtggtgtataccccggcgaatgtggacgtgaaataccgcatctggaaagcggacgctaacgtacagaacgccgtcgcgcgatga

SEQ ID NO: 36814 - DNA, 783 bp, Salmonella paratyphi A
atgaatcaagttgccgttgtcattggcggaggccagaccctgggggcattcctttgccgtgggcttgcagaagaaggataccgcgtggcggtcgttgatattcaaagcgataaagccgcgaatgtcgcccaggaaattaacgccgattttggcgaaggtatggcctacggttttggcgccgacgcaccagcgagcagagcgctgtggcgctttcccgcggcgtagacgagattttcgggcgcgtcgatctgctggtttacagcgcgggtatgcccaaagcggcgtttatcagcgatttccagttgggcgattttgaccgctcgctacaggtgaatctggtgggctatttcctctgcgcccgtgagttttcccgcctgatgatccgcgacggcattcaggggcgcattattcagattaactctaaatccggcaaagtgggcagtaaacacaactccggctacagcgcggcgaaattcggcggcgtggggttaacccagtctctggcgctggatctggcggaatacggcattaccgtacactcgttgatgctcggcaacctgttgaaatcgccgatgttccagtcactgtgccgcaatacgccactaaactggcattaagcccgacgaggtggagcagtattacattgataaggtaccgctcaaacgcgggtgtgattatcaggatgtgctgaacatgctgctattttatgccagcccgaaagcgtcttattgcaccgggcagtcgatcaacgtaaccggcggtcaagtgatgttctgaccgtga

SEQ ID NO: 36815 - DNA, 359 bp, Salmonella paratyphi A
atggtttccactctgattaccgtcgccgttatcgcctggtgtcgcaactggcgctgggcggctggcagatttcccgctttaatcgggccttcgataaacttagccaacaggggcgggtcggcgtcgggcgctccggcgggcgttttaagccccgggtggtggttgccgtggcgctggacgaacagcagcgggtgacggacactttattgatgaaaggccttacggtattcgccagaccggttaaaattgccgcaatgcaaggaaaacatttgcatgaattacagcctgatgtgatctttccccatgattcgctcgcgcagaatgcactatcattggcgcttaaactgaaacatgggtaa

SEQ ID NO: 36816 - DNA, 1667 bp, Salmonella paratyphi A
  misc_feature (335)..(335): n=g, a, t or c
  misc_feature (1219)..(1219): n=g, a, t or c
aactggatggcggcggttcatcctggcgaagatgccggtttgtatgacgcggttaaagggtgggagaggaactctgtccgcagcttggcctgacgattccggtgggcaaagattcgatgtcgatgaaaacccgctggcaggaaggcaacgaacagcgcgaaatgacctcgccgctgtcgctggtgatttccgcgtttgctcgcgtggaggacgtgcgtcacacccttacgccgcagctgtcaacggaagataacgccttgctgctgatcgatcttggcaagggcacaacgcgctgggcaatcggcctggacgcaggtctatcgtcagcttggcgncaaacccgcggacgtgcgtgacgtcgcgcaactgaaaggcttctatgacgccatgcagggcctggtcgctgcgcgtaaattactggcctggcacgaccgttccgacgcggtctgctggtgacgctggccgagatggcctttgccggccactgcggcgtgcaggtcgatatcgccgcgctggggcatgaccatctggccgcactgttcaacgaggagctgggcggcgtgattcaggtacgcgctgaagacagagaggcggtcgaagcgctgttggcgcagtacggccttgctgactgcgtccactaccttggtcaggccctggctggcgatcgctttgtgattaccgctaatgaccagacggtattcagcgaaagccgcactacgctgcgtgtctggtgggcggaaaccacctggcagatgcagcgtctgcgcgacaatccgcaatgtgctgatcaggaacatgaggcgaaagcgaatgatgccgatccgggcctcaacgtgaagctgtcgtttgatattaatgaagatatcgccgcgccgtacattgcgacaggcgcacgaccgaaagtcgctgtactgcgcgagcagggggtgaactctcacgtggagatggcggcggcgttccatcgtgcgggctttgacgcgattgacgtccatatgagcgacctgctgggcggtcgtatcggtctgggcaacttccatgcgctggtggcttgcggcggcttttcctacggcgacgtgctgggggcgggcgaaggttgggcgaaatccattctgtttaaccctcgggtgcgcgacgaattcgaaacctttttccatcgtccgcagagctggcgcttggggtgtgcaacggttgccagatgatgtcgaatctgcgcgactgnatcccgggcagcgaactgtggccgcgttttgtacgtaaccattctgaccgcttcgaagcccgcttcagcctggtagaagtgacgcaaagcccatcgctgctgctgcaaggaatggtaggctcacagatgccgattgcggtttcccatgggaaagggcgcgttgaggtgcgggacgatgcgcatcttgccgcgcttgagagcaaaggcctggtcgccctgcgctacgttataacttggtaagtgaccgaaacctatccgctaacccgaacggttcgcgaacggcatcacggcggtgacgaccgaaaatggtcgggtgacgattatgatgccgcatccggaacgcgtattccgcaccgtcgccaactcctggcacccggaaaactggggcgaggatagcccgtggatgcgtatcttccgtaatgcgcgtaagcagcttggttaattagcc

SEQ ID NO: 36817 - DNA, 1519 bp, Salmonella paratyphi A
  misc_feature (677)..(677): n=g, a, t or c
tatctggcgcttccctcggttagcatcttttttattcttcttttatgtgagcgacacgttgaagcgctggtctgttttcccccgttctttacgacaattggtcatgctggcttttttgctgatcctgctgccgttgctggttctggcctggcaggcgtggcaaagccttaacgcattaagcgatcaggctgcggtgactaaccgcagcacgcttattgacgcccggcgcagcgaggcgatgaccaacgtcgcgctggagatggagcgaagctaccgacagtattgcgtgcttgacgatccgacgctggcaaaagtgtatcaaagccagcgtaaggctatagcgatatgctggacgcccatgccggcgtcttgccggatgataagttgtatcaggcgttacgccaggatttaaacgcgctggcgcaattgcagtgtaaagatagcggcccggaagcgcagcggccgcgcgtctggagcctttgcacgaatacggaaatggtgcagggacgcgtactgtggtttattcgcgtgggcagcagttacaacaagaaatgccgagcgcggacaatttttcggctggcagacgctggtactatttctggtgagtctggcgatggtgctactttttacccgcatattatcgggccggttgaaaagaaatgaaacggatgattaantccctggcgaaagcccgttcttttgggaataaccgtcaacctttaccggtccgcgtgaattacgaatcggtgggccagcgcattattctggctgagtgagcgttctgcgctgctgaaatcccagcgccatcaatttctacgtcacctgtccaatgagctgaaaaccccgctgcccagtatgcgcgagggacagagctgctggcgatcaggctggttgggccctgacgccggagcaaaaagaggtggtcgatattctggatgacagcagtcgtaatttacaaaaattgattgagcaattgcttgattacaaccggaaactggtagacagtgccacagagctggaagcggtcgataccccgccgcttgtggatatggtggtttccgcccacagtttgcctgcccgcgctaaaatgatgcataccgatgtcgacctggaggccgaacgctgcatagcagagcccatgttgctgatgagcgtgctggataatctctattccaacgcggtgcactatggcgctgaatccggtaacatttgtatccgtagtcgctctcagggctccacggtttatatcgatgtggttaatagcggcgaaccgattccgcaaaccgaaagagaaatgatttttgagccttttttccagggaagccaccagcgaaaaggggcggtaaaaggcagtgggttagggctgagtatcgccagagattgtattcgtcgaatgcagggagagatccaactggtggatgacaaagcgcaggaagtttgttttcgcatctcgctgccattgcctgcatctgacaaacactaatatgaatttaagcctggtgcgtgtgtcacacgtttt

SEQ ID NO: 36818 - DNA, 348 bp, Salmonella paratyphi A
aataaccgtgttgtgattctgtctgcaggtacgggtaaccgttcttcactaccgactctgcggcctgtctgcgcgggatcgaaattgaagcggatgtcgtactgaaagcgaccaaagtggatggcgtattcactgccgatccggaaaagatccttccgcgaccatgtacgatcagctgacctacagcgaagtgctggataaagagctgaaagtgatggatctggcggcgttcacctggctcgtgaccacaaactgccgattcgtgttttcaacatgaacaaaccgggcgcgctgcgtcgtgtggtgatgggcgaaaaagaagggacgttaatcacggaataattcccg

SEQ ID NO: 36819 - DNA, 556 bp, Salmonella paratyphi A
gtgattagcgatatcagaaaagatgctgaagtacgcatggaaaaatgcgttgaagcgttcaaaacccaaatcagcaaagtgcgcacgggtcgtgcttctcccagcctgctggatggtattgtcgtagaatactatggcactctgaccccgctgcgccagttggcaagcgtaacggtagaagactcccgtaccttaaaaattaacgtgtttgaccgttctatggggccagccgttgaaaaagcgatcatggcgtcagacctcggtttgaatccaagctctgcgggcaccgacatttgcgtttcgctgccgccgctgaccgaagaacgtcgtaaagatctgacgaaaattgtccgtggcgacggagcaggcgcgtgtcgccgttcgtaacgtccgccgtgatgcgaacgataaagtaaaagctctgctgaaagataaagcgatcagtgaagatgacgatcgtcgctctcaggaagaagtacagaaaatgaccgacgcggcaattaagaaagttgatgcggcgttggcagataaagaagcagaactgatgcagttctga

SEQ ID NO: 36820 - DNA, 728 bp, Salmonella paratyphi A
  misc_feature (101)..(101): n=g, a, t or c
ttgccagcacatggctgccgtcatgttgccataattatggatggcaatggtcgctgggcaaaagcagaagatccgggcctttgggcataaaggcgggggtnagtctgtccggcgagcggtctcttttgctgccaataacggtattgatgcgttaaccgtgtatgcctttagtagtgaaaactggaaccgaccggcgcaggcaagtgagcgcgttaatggagctgtttgtgtgggcgctggatagcaagtcaaaagcctgcaccgccataacgttcgcctgcgtattatcggcgatatcagccgatttaactcacgtttacaagaacgtattcgcaaatcagaagcgcttaccgccgcataatacgggtctaacgctgaatatcgctgcgaattacggcggacgttgggatattgtccagggagtccgacaactggcgacaggtgcaggctggagtgctgcgcccgatcagattgatgaagagagactaggccagcaaatctgtatgcatgagctggcgcctgtggatttagtaattaggactgggggagagcatcgcattagtaactttttgctttggcaaattgcctatgccgaactttactttacggatgttctctggcccgatttcgatgaacaagactttgaaggtgcgctgcatgcctttgctaatcgagagcgtcgtttcggcggtaccgagcctggtgatgacaaagcctgatgggggtcg

SEQ ID NO: 36821 - DNA, 748 bp, Salmonella paratyphi A
atgctggccgcgtgggaatgggggcagttaagcggtttcgccgcgcgttcacagcgggtttggctggcggtgctgtgtggtctgttattggcgctgatgttatttttgttgcctgagtatcatcacaacattcgtcaaccgctggttgagatgtcgctttgggcatcgttaggatggtgggttgtcgcgctactgctggtgctattttatcccggttcgcggcaatctggcgcaactcaaaaacattgcgtctcattttcggtttgttaactattgtgccatttttctggggcatgctggcgctgcctggcactatgacgagaatcattacagtggcgcaatatggttactctatgtcatgatcctggtctggggagcggactctggcgcgtatatgtttggtaaattgtttggcaaacataagctggcgccgaaagtttccccgggtaaaacctggcaaggttttatcggcgggcttgttacggctgccgtgatctcatggggttacggtatgtgggcgaatctgaatgttgcgcctgttatcttgctgatttgctctgtggtggcggctctggcttctgtactgggcgacctcaccgagagtatgtttaagcgcgaagcaggaattaaggatagcggccacttgattccaggccatggcggcattctggaccgaattgacagtctgacggctgccgtaccggtctttgcttgcctgttgttactggtgttcaggacgctctaacgg

SEQ ID NO: 36822 - DNA, 807 bp, Salmonella paratyphi A
atgagacctcgtcgcagtatgttgtttattcccggcgcaaatgcggccatgttgagcacctcgtttgtctatggtgcggacgcggtgatattcgacttagaagacgccgtagcattacgtgagaaagataccgcccgtcttttagtccatcacgcgcttcaacatccgttctatcaggatgttgaaaaagtggtgcgcattaatccactgaacacgccgttcggtctggccgatcttgaagccgtcgtgcgtggtggcgcggatattgtgcgtctgccgaaaaccgacagcaaaaacgatgtgctggagctggaagcgcaggtcgaacggatcgaacgtgaatgtggacgtgaagtcggcagtaccaggctgatggcggcgatcgaatcagcgaaaggcgtggtcaatgccgtcgacatcgccacctccagcccgcgcatggtggcgattgcgctggcggcatttgattacgtgatggatatgggcacctgccggggcgatggcaccgagctgttctacgccctgcgcagtgctacatgcggcggcgttgcgggtattgccgcctatgatgtcgtttggtcggatatcaataatgaagaaggcttcctgaaagaagtgcagttggcgaaagggcttggttttaacggtaagtccttagtgaacccacgtcagattgagctgttacatcaggcttattctccgacacgtaaagaagttgagcatgcgtatgaggtgattgccgccgctgaagaggctgagtctcgcggtctgggcgtcttttcactcaacggggggatcctctagagt

SEQ ID NO: 36823 - DNA, 752 bp, Salmonella paratyphi A
atgacagatttaaccctaaaagcgctggccgcagagagacaggtttccgtggatcgcctggtacagcagtttgctgatgcaggtatccggaaatctgctgacgactctgtgtccgcacaagaaaaacagactttactggcgcacctgaacgcgaagcggtttctggccccgataaattgacgctgcagcgtaaaacgcgcagcaccctgaatattcctggtaccggtggaaaaagtaaatcggtacaaatcgaagtccgcaagaagcgcacctttgtgaaacgcgatccgcaagaggctgaacgcctggccgcggaagagcaggcgcagcgtgaagcggaagagcaagcccgtcgtgaggcagaagaacaggccaaacgcgaggcgcaacaaaaagctgaacgcgaggccgcagaacaagctaagcgtgaagccgctgaaaaagcgaaacgtgaagctgcggaaaaagacaaagtgagcaatcaacagactgacgatatgaccaaaaccgcccaggccgaaaaagcccgccgtgagaatgaagctgcagagctgaagcgtaaagcggaagaagaagcacgtcgcaaactcgaagaagaagcgcgtcgtgtagcagaagaagctcgccgcatggcggaagaaaacaaatggaccgcaacgcctgagccagtagaagacaccagtgactatcatgtcaccacttctcagcacgcgcgccaggccgaagacgggggatcctctagagtcgacgct

SEQ ID NO: 36824 - DNA, 1498 bp, Salmonella paratyphi A
atgaacaaagaaattttggctgttgttgaagccgtctccaacgaaaaagcgctgccacgcgaaaaaatttttgaagcgctggaaagtgcgctggcgacagcaacaaagaaaaaatatgagcaggagatcgatgttcgtgtagaaatcgatcgtaaaagcggtgattttgatactttccgccgttggttgatcgttgaagaagtgaccatgccgacgaaggaaattacgctggaagcggcgcgctttgaagacgaaagcctgaatgtcggcgactatgttgaagatcagattgaatctgtcacctttgaccgtatcaccacgcagactgcgaaacaggttatcgtgcagaaagtccgtgaagctgaacgcgcgatggttgtcgatcagttccgcgaccaggaaggcgaaatcgtcactggcgtggtgaagaaagtgaaccgcgacaatatctctttggaaattaaatccgaagggatggccggtaatgctgaagcggtgattctgcgtgaagatatgctgccgcgcgaaaacttccgccctgggacccgtattcgcggcgtgctgtatgctgttcgcccggaagcgcgtggcgcaactgttcgtcacccgttccaagccggaaatgctgatcgagctgttccgcatcgaagtgccggaaatcggcgaagaagtgattgaaattaaagcggcggctcgcgatccgggttctcgtgcgaaaatcgcagtgaaaaccaacgataagcgtatcgatccggtcggcgcttgcgtggggatgcgcgcgcgcgttcaggcggtctctaccgaactgggcggtgagcgtatcgatatcgtgctgtgggatgataacccggcgcagttcgtcattaatgcgatggcgccggcagatgtcgcgtctatcgtggtggacgaagataaacataccatggatatcgccgttgaagccggtaatctggcgcaggcgatcggacgtaatggtcagaacgtccgcctggcttcgcaattgagcggctgggaactcaacgtaatgaccgttgatgacttgcaggctaaacatcaggctgaagcacatgccgctatcgagatctttactaaatatcttgatattgatgaagagttcgcgaccgttctggtagaagaaggtttctccacgctcgaagaactggcctatgtgccaatgaaagaactgctggaaattgacggccttgatgagccgaccgttgaagcactgcgcgagcgtgctaaaaacgcactggccactctggcgcaggaccaggaagcaagcctaggtgataacaaaccggctgacgatctgctgaatctggaaggattagatcgcgatatggctttcaaactggcggctcgtggtgtttgtacgctggaagatctcgccgaccagggcattgatgatctggctgatatcgaagggttgaccgacgaaaaagccggtgagctgattatggctgcccgtaatatttgctggttcggcgacgaagcgtaa

SEQ ID NO: 36825 - DNA, 990 bp, Salmonella paratyphi A
atgaacaataacgatctggtcgccaagctgtggaaactgtgcgacaacctgcgcgacggcggcgtctcctatcaaaactacgtcaatgaactcgcctcgctgctgtttttgaaaatgtgcaaagagaccggtcaggaagcggactacctgccggaagctaccgctgggatgacctgaaatcgcgcattggccaggagcagttgcagttttaccgtaaaatgctgggtgcatctgggggaagataagaaaaaactggtgcaggcggtatttcataatgtgagtacaaccatcactgaacccaaacagataacagaattagtcagcaacatggattcgctagactggtacagcggtacacgcggcaagtcccgcgacgacttcggcgatatgtacgaagggctgctgcagaagaacgctaacgaaaccaaatccggcgcgggccagtacttcaccccgcgtccgctgatcaaaaccattattcatctgctgaagccgcagccgcgtgaggtggtgcaggacccggctgccgggaccgcaggttttttgattgaagccgaccgttacgtgaagtcgcagaccaacgatctggatgaccttgatggcgacacccaggatttccagatccaccgcgcgtttatcggcctcgagctggtgcccggcacccgtcgtctggcgctgatgaactgtctgctgcacgatattgaaggcaacctcgaccacggcggcgccatccgtctgggcaacacgctgggcagcgacggcgagaatttaccgcaggccgatattgtcgccaccaacccgccgtttggcagcgccgcgggcaccaacattacccgcaccttcgtgcacccgaccagcaacaaacagctttgctttatgcagcatattatcgaaaccctgcgccccggcggccgtgcggcagtggtggtgccggataacgtactatttgatcgagttggattggaaattcgtcgagaggtactgggggtc

SEQ ID NO: 36826 - DNA, 1379 bp, Salmonella paratyphi A
cgctattaccaggaggatgccgtccgcgcggtggaaaaggctatcgttaacggccagcaagagatcctgctggcgatggcgaccggtaccggtaaaacccgtaccgccatcgccctgatgttccgcctgatccagtcgcagcgtttcaaacgcgttcttttcctggtcgaccgtcgctcgcttggcgaacaggcgctggggtcgtttgaagacacgcgcattaacggcgacacctttaacagcatttttgatatcaaagggttgaccgacaaattcccggaagacagcaccaaaattcacgtcgccacggtgcagtcactggtcaagcgtacgctgcaatccgatgagccaatgccggttggccgctacgactgtatcgtcgtcgatgaagcacaccgcggctacattctcgataaagagcaaaccgagggcgagctgcagttccgcagccagctggattacgtttccgcctaccgtcgcattctcgaccatttcgatgcggtaaaaatcgccctgaccgccacgccagcgctgcatacagtggagattttcggcgaaccggtttaccgctacacctaccgtacggcggtgatcgacggttacctgatcgatcaggatccccctattcagatcgtcacccgcaacgcgcaggatggggtctatctttccgagggtgaacaggtggagcgcctgaacccacagggcgagctgatcaacgacacgctggccgacgatcaggattttgaggtcgccgactttaaccgtggcctggtgatcccggcgtttaaccgcgcggtatgcggcgagctcaccaaatacctggatcccatcgggcaacaaaaaacgctggtgttctgcgtcaccaacgcccatgccgacatggtggttgacgaactgcgtaccgcgtttaagaaaaagtatccgcagcttgagcacgacgcgatcatcaagatcaccggtgatgccgataaagacgcgaagaaagtgcaaagcatgatcgtccgtttcaacaaagagcggttgcccaatatcgtggtcaccgtcgatctgctgaccaccggtgtggatattccgtctatctgtaatattgtgttcctgcgcaaagtcaaaagccgcattctctacgagcagatgaagggccgtgcacgcgtttgtgcccgtcggtagggaaaaccagctttaagattttcgactgcgtggatatctacagttcgctggaaagcgtcgacaccatgcgcccggtggttgtgcgtccgcaggtggagctgcaaacgctggtcaacgaaattaccgactcagaaacctacaaaaccattgaagcggatggccgcagttttgccgaacacagccatgaacagctggtcgctaagctgcagcgg

SEQ ID NO: 36827 - DNA, 1059 bp, Salmonella paratyphi A
atgcacttacgtcatcttttttcgccgcgcctgcgtggttctttattgttaggttcgctcctcgtcgcatcctcatttagcacgctggcggcggaagacatgctgcgtaaagcagtaggcaaaggcgcttatgagatggcctggagtcagcaagaaaacgcgctctggctggctacatcgcaaagccgtaaactggataaaggcggcgtagtttatcgtctcgacccggtgacgctggaaatcacgcaagcgattcataacgatctcaagccgttcggcgccaccatcaatgccgcgacccaaacgctgtggtttggcaataccattaacagcgctgttaccgcgattgatgccaaaacgggtgatgtaaaaggtcgtctggtacttgatgcgcgcaaacgtactgaagaggttcgtccgttacagccccgtgagctggttgccgatgcgtctaccaacacgatctacattagcggtgttggtaaagagagtgctatttgggtagtggatggcgaaaccatcaaactgaaaacgacgatcgaaaataccggcaaaatgagtacgggtctggcgctcgacagtaaagcgcaacgcctgtacaccaccaatgcggatggcgaatttatcaccatcgatactgccagcaataaaattctcagtcgtaagaagttgctggatgacggtaaagaacacttctttattaatctgagtctcgataccgcaggtcatcgcgcgtttatcaccgactcgaaggcgactgaagttctggttgtcgatacccgtaatggcaatattcttgtcaaaatcgcggcgcctgcctctttggccgtcctgtataatccgacacgtaacgaggcgtatgtgacgcaccgtcaggcagggcaggtcagcgtgatcgatgcgaagacctataacgttgttaaaacgttcgatacgccgacgtacccgaatagtctggcgctatcggcagacggtaaaacgctctacgtcagcgtgaagcagaaatcgacacgtgaacaggaagcgacgcagccggatgatgttattcgcattgctctg

SEQ ID NO: 36828 - DNA, 513 bp, Salmonella paratyphi A
gtgcgtgaggccctgttaaggctggtctcttccagtgctttgcggtagcgccagcacaggcgtttatggtgccggagatctcgctggaaagtttgctggaaattaatacgattcgtactgccctggaggagatggcggtggtcgccgctgcgggtaagattaccccggatcgcgagcagacgctgaatgcgctattagatgaatttcaacaggcgctggaaagtggcgttatggagaaaattcttttggccaacccgcgcattccgctttgagatctaccactacgcggatatgccaacgctgtatgccatgatcgagcaattatgggtacgcctggggccaagtctgcattttttatatgataattttaaacttgatgattatcaaaacggcgttaatctgtacagaaaattgcttaatgcgttagtgactggtgataaagaagccagtcgccactgcctacagaacgttttgcaacaaaacgtagcgacgattaaaaatcagtacttcatg

SEQ ID NO: 36829 - DNA, 1071 bp, Salmonella paratyphi A
atgacccgccctatacaggccagccttgatttacaggtaatgaaacaaaatttggctattgtgcgcgggcggccccggaggcgcgcgtctggtcggtagtgaaagccaacgcctacggccacggtattgaacgcgtctggagcgcggctgggcgccacagatggtttcgctatgctcaaccttgaagaggcgattaccctgcgtgagcgcgggtggaaagggccgatattgatgctggaggggtttttccatgcgcaagacctggaggcgtatgacacttatcggctgaccacctgcatccacagtaactggcagttgaaagcgctgcaaaatgcgcggcttaacgcgccgctggatatctatgtcaaagtcaacagcggtatgaaccgactcggttttcagcctgagcgggcgcagaccgtctggcagcaattgcgggcaatgcgcaatgtcggtgaaatgaccctgatgtcacattttgctcaggccgatcatccggaaggtatcggggaggcgatgaggcgtattgcgctggcgacggaaggtcttcagtgtgcatactcgttatcaaattcggcagcgacgctgtggcatccccaggcgcattatgactgggtcaggccgggcattattttgtacggcgcgtcgccgtcaggacagtggcgggatattgccgataccggactaaaacctgtgatgacgctgagtagcgaaattattggcgtgcagacgctgagtgcgggtgaaagggtaggctatggcggagggtattctgtgactcaggaacaacgcattggcatcgtcgcggcgggttatgccgatggctatccacgccatgcgccgaccgggacgcctgtgctggtggacggtatccgtaccagaacagtaggcaccgtttcaatggatatgctggcggtggatttgacgccgtgtccgcaggcgggaatcggcacgccggttgaattatggggcaaagaaattaaggtcgatgatgtcgcttctgcggcaggcacgctgggctatgagctactgtgcgccgtagcgcgcgcgtgtccgtttgtgacaacgtaa

SEQ ID NO: 36830 - DNA, 1530 bp, Salmonella paratyphi A
atggcaacgattgattccatgaacaaggacaccacacgtttgagcgatggccccgactggacatttgatctgctggatgtctatctggcagagatagaccgcgtggcgaaactctaccaactggatacttacccgcaccaaattgaagtcatcacttccgaacagatgatggacgcctactccagcgtcgggatgccgatcaactatccgcactggtcgtttggcaaaaagttcattgagacggaacgtctgtataagcatggtcaacaaggactggcttatgaaattgtgatcaactctaatccctgcattgcctacctgatggaagagaacaccatcaccatgcaggcgctggtcatggcgcacgcctgttacggccacaactccttttttaaaaataattatctcttccggagctggacggatgccagctctatcgtcgattacctgattttcgcccggaattacattacccgctgtgaagaacgctacggagtggatgaagtagaaaaactgctcgactcctgccacgcgctgatgaattacggcgtcgatcgctataagcgcccgcagaaaatctcgttgcaggaagagaaagcgcgacaaaaaagccgggaagagtatctacaaagccaggtgaatatgctgtggcgcacgctgccaaaacgcgaggaagaaaaaactgtcgccgaagcacgccgctttcctgctgaaccgcaggaaaacctgctctattttatggagaaaaacgccccgttgctcgagccgtggcagcgcgaaattctgcgcatcgtgcgtaaagtcagccagtatttttatccgcagaaacagacgcaggtcatgaacgagggctgggcgaccttctggcactacaccatcctgaaccatctgtatgatgaaggcaaagtgacggaacgctttatgctggagtttttacacagccataccaatgtcgtatttcagccgccctataatagcccctggtatagcggaattaacccctatgcgctcggctttgccatgttccaggatatcaaacgtatttgtcagtcgcccacggatgaagataaatactggtttccggatattgccggttccgactggctggaaacgctgcacttcgccatgcgcgattttaaagatgaaagctttatcagtcagttcctgtcgccaaaagtgatgcgtgatttccgtttcttcacggtacttgatgatgacaggcataattatctggagatctccgccattcataacgaagaaggttatcgggagattcgatcaaaactgtcgtcacagtataacctgagcaacctggagccgaatattcaggtctggaatgtggatttacgcggcgacagatcgctgacgttgcgttatatcccgcataaccgcgcgccgctggataaaggccgcaaagaggtgctgaaacatgtgcatcggttatggggctttgatgtgatgctggagcaacaaaatgaggatggcagcgtagaactgctggagcgttgtccgccgcgcatgaacacgctg

SEQ ID NO: 36831 - DNA, 1296 bp, Salmonella paratyphi A
atgcaggacgacacattaccattaaataacagtaacgctacgaccacaccgctttcaacgagattaccgtttacaaaatatgattttggctgggtgctcttgtgtatcggtatggcgatcggcgccggtaccgtcttaatgccagtgcaaatcggtctcaaggggatctgggtatttattaccgcttttatcatcgcctatcccgctacctatattgtgcaggatatttatctaaaaacgttatctgaaagcgaaacctgtgacgattatacggatattatcagtcactatcttggcaaaaactggggcgtttttctcggtgtaatctattttcttatgattatccacggggtgtttatttactccctgtcggtggtgtttgatagcgcctcctatatcaaaaccttcggccttactgaggccgatctttcgcagtctattatctataaagtcgcgattttcgccgtgttggtggtgattgcctccggcggggaaaagttattatttaaaatttccggcccgatggtggtggtaaaagtcgggatcatcctgatattcggttttgcgatgatcccacactggaatcttgataatatttccgcctttcccgccgcatcggttttctttcgcgacgtactgctcactatcccattttgcttcttttctgcggtcttcattcaggtgctaaacccaatgaatatcgcttatcgtaagcgcgaacctgaccgtgtgctggccacccggatggcgattcgcacgcatcgcattagctatattacgctgattgccattattctctttttctcgttctcgtttaccttttcgattagccatgaagaggcggtatcagcgttcgagcagaatatttccgctcttgcactggcagctcaggtaatccctggccatatcatccacattacctctaccattctcaatatttttgccgtacttaccgcgttctttggtatttatttaggttttcatgaagcgcttaaaggtattgtactgaatgtgttgagtcgcattatggatgtcaaaaacatcaacccactgttactgacatctggaatctgtgtctttatcgtggttactctggttatttgggtttcgtttcgcgtctcagtattggtctttttccagttaggcagtccgctttatggcattgtcgcgtgtattattccctttttcctgatttataaagtagcgcaactggaaaaattacgcggcctgaaaacctggcttattctgttatatggaatattgttgtgcctgtcgccgttattaaaattgattgaa

SEQ ID NO: 36832 - DNA, 245 bp, Salmonella paratyphi A
gcataggttgctggatagagaaaacccccgcacgttgactggtataaacctggcaacctgacgggggctaacttgaacctcaacacatcaaggatagccgcgaacggttgccattgcaacaaggcggctatatgacgcttacgcagttgggcgtggccttctggcacgatctggcagcgccgatcattgctggcattatcgccagtgtgatcgtcaactggctacatgacaggaagtaacgcgtt

SEQ ID NO: 36833 - DNA, 662 bp, Salmonella paratyphi A
caaattaaacgacggacgggattcgaacactttttttcaaaggccggctggaaaagcggatattatcatgaaatggtaattacggatgcccaacccgtcggcagaaaacggttatgcccgaataacgacaagagctggtcaacagcatcccctctatcaaaagggcgatgttcgccgagttgcctcccggggcctatctgggaaaacatcgcgacccctatgccggttcagtacgttaccatcttggattaagcacaccgaatgacgaccgctgttttattgaagttgatcgacagcgccatagctggcggacgcgaagccgtcatcttcgacgaaacctacgttcattgggcggaaaataaaactgagcagacgcgtattatcctcttttgcgatattgagcgtccaatgaaatggcgctggggcagagcgtaaaccactgggtcggcgcatcgttgatgtccgccgccagttcgccaaacgacgagaacgatcgcaccggtgcgattaatcgcatctttaaatacgttcacgcagcacgcgatgccgggcagcgactgaaaaagaaaaaccgcactctctattacgcgctgaaatatctcgttattgccgctatttttgccgcgataatccttttcagcctcctctgaagccgggccgcg

SEQ ID NO: 36834 - DNA, 2061 bp, Salmonella paratyphi A
atgaaaaaagtcgtcacggtttgcccgtattgcgcatcaggttgcaaaatcaatctggtggtcgataacggcaaaatcgtccgggctgaggcggcgcaggggaaaaccaaccagggtaccctgtgtctgaagggctactacggctgggattttattaatgatacccagatcctgaccccgcgcctgaaaaccccaatgatccgtcgccagcgtggcggcaaactggaatctgtttcctgggatgaagcgctcaattacgtcgctgaacgtttgagcgccatcaaagcgaagtacggtccggatgcaatcagacaaccggctcctctcgcggtaccggaaatgaaaccaactatgtaatgcaaaaattcgcacgcgccgttattggtaccaataacgttgactgctgcgctcgcgtctgacacggcccatcggttgcaggtctgcaccaatcggtcggtaacggcgcaatgagtaatgcgattaacgaaattgataacactgatttagtgttcgtcttcgggtataacccggcggattcccaccctatcgtggcgaatcatgtaattaacgctaaacgcaacggggcgaaaattatcgtctgcgatccgcgcaaaattgaaaccgcgcgcatcgctgacatgcatatcgcgttgaaaaacggctcgaatatcgcgctgctcaacgccatggggcatgtcattattgaagaaaacctgtacgacaaagcgtttgtcgccagccgtaccgaaggttttgaagagtacagtaagattgtcgaaggctatacgccagagtccgtcgaagagatcactggcgtgagcgcacaggagattcgtcaggcggcgcggatgtatgccagcgcgaaaagcgcagcgatcttgtgggggatgggcgtcacgcagttctatcagggtgtggaaaccgtgcgttcactgaccagcctcgcgatgctgaccggcaacctcggcaagccaagcgcgggcgttaacccggttcgcggccagaacaacgttcagggcgcgtgcgatatgggcgcgctcccggatacttatccgggctaccagtacgttaagttcccggaaaaccgcgagaagttcgctaaagcctggggcgtagaaagtctgcctgcgcataccggctatcgcatcagcgagctgccgcaccgtgcggcgcatggcgaagtgcgcgcggcgtacattatgggtgaagatccgctgcaaaccgatgcggaactctctgcagtacgtaaagcgtttgaggatctggaactggtcatcgtgcaggatatcttcatgaccaaaaccgcgtcggcggcggatgtgattttaccctctacctcctggggcgagcatgaaggcgtcttctctgcggctgaccgtggcttccagcgcttctttaaagccgttgagccgaagtgggacctgaaaaccgactggcagattatcagtgaaatcgccacccggatgggctatccgatgcactacaacaacacccaggagatctgggatgagttgcgtcatctgtgcccggatttctacggcgccacttacgagaaaatgggcgaactgggctatatccagtggccgtgccgcgacacgtcggatgccgatcagggaacctcgtacctctttaaagagaagttcgatacccccaacggtctggcgcagttcttcacctgcgactgggtagcgcctatcgataaactcaccgaagagtacccgatggtactgtcgacggtgcgcgaagtcggccactactcctgccgctcaatgaccggtaactgtgcggcgctgccgcgcgctggccgatgaaccgggctatgcgcaaatcaataccgccgacgccgcgcgtctgggcattgaagatgaagcgctggtgtgggttcattcgcgcaaaggtaaaatcatcacccgcgcgcaggtcagcgatcgcccgaacaaaggggcgatttacatgacctaccagtggtggattggcgcctgtaacgagctggtgactgaaaacctcagcccgattaccaaaacgccggagtacaaatactgcgccgtacgcgttgagccg

SEQ ID NO: 36835 - DNA, 691 bp, Salmonella paratyphi A
atgaaactacttcttgcattgatgttgtttatgacattctttgcccatgccgcagatcctgagccgggtagccagtatttgcaggcagcagaggcaggtgacagacgcgcacaatattttctggccgacagttggttgagctatggcgatttgaacaaagctgaatactgggcgcaaaaagccgccgacagtggcgacgcgacgcctgcgcgctactggcgcaaatcaaaatcactaatccggtaagcctggattatcccgacgcgaaaaagctggctgaaaaggcggctaacgcgggcagtaaagtgggcgaaattacgctggcgcggatcctggtcaacacccaggccgggcgcccggactacccaaaagccatctcgctgctgcaaaaggcctctgaagatctggataacgactccgcagtggatgcgcaaatgttgcttggcctgatttacgccaacggcgtggcattgccgccgatgatgaaaaagccgcctggtatttcaaacgcagttccgctatttcccgtaccggctattcagaatactgggcgggaatgatgtttttaaacggtgaaccgggctttattgaaaagaacaagcagaaggcgttgcactggttgaatctaagctgtctggaagggtttgataccggttgcgaagagttcgaaacgctaacaaatggctgatgt

SEQ ID NO: 36836 - DNA, 1314 bp, Salmonella paratyphi A
cagaccatggcgatgcagcttggcggtcatgtagaaggttctaatgagcgtgaatttggttatgcgcaggtcgaagtgttgaccgacagcgcgctggttcgcggtattgaagattccctgaccgcagacggcaaaccgctgctggacgtgtggatgagccacggcgataaagtgacggcgattccgtccgacttcgtgaccgtcgccagcaccgagagctgcccgttcgccatcatggctaacgaagaaaaacgcttctacggcgtacagttccacccggaagtgacccacacccgccaggggatgcgcatgctggagcgttttgtgcgtgatatctgccagtgtgaagcgttgtggacgccggcgaagatcatcgacgacgccgtgggccgcattcgcgagcaggtaggcgacgataaagtgatcctcggtctctccggcggcgtggattcttccgtcaccgcaatgctgctgcaccgcgcgatcggtaaaaatctgacctgtgtattcgtcgacaacggcctgctgcgtctcaacgaagccgagcaggtgatggacatgtttggcgaccattttggcctgaatatcgttcacgttccggcggaagagcgcttcctgtccgcgttggctggcgaaaacgatccggaagcgaagcgtaagatcattggccgtgtttttgtggaagtgttcgacgaagaagcgttgaaactggaagacgtgaaatggctggcgcagggcaccatctaccctgacgtcatcgagtctgcggcgtctgcaaccggtaaagcgcacgtcatcaaatctcaccacaatgttggcggcctgccgaaagagatgaagatggggctggttgaaccgctgaaagagctgttcaaagacgaagtgcgtaagattggtctggagctgggcctgccgtacgacatgctgtaccgtcatccggttcccggggccgggcctcggcgtacgtgtactgggtgaagtgaagaaagagtactgcgacctgttgcgccgtgtgacgccatcttcattgaagagctgcgtaaggcggatctgtacgacaaagtcagccaggcgttcaccgtcttcctgccagtacgctccgttggcgtaatgggcgatggtcgtaagtacgattgggtggtctccctgcgtgctgtcgaaaccatcgactttatgactcggcactgggcgcatctgccgtatgacttcctgggtcgtgtttccaaccgcatcatcaatgaagtcaacgggatttcccgtgtggtgtatgacatcagcggtaaaccaccggctaccattgagtgggaataagtc

SEQ ID NO: 36837 - DNA, 861 bp, Salmonella paratyphi A
atgttgttaatcaccgatctggatggaacattactcacctcgcagaaaacaatcagcccgcgcacgcgccgggcactgattgcgttccgccaggacggtgatctgctggcggcatgttccgccagaccggtctcctcaatggtacgcctgctacgccagcaacaggttgatacgttgtttagctggtgcgccggttttaactgcggacacctgctggagatggcggggcagcgcattattcatgctgctccgttgtccgccacagatctgtggaatattgaccagcatatttctctttcccgctatcaccaccatttttttagcgccgaagcaattcaccatcgtgacgatagactgattgcgccctggacaacatatgaagcccgcttatttgggttgccgcttataactgaaactacagaaaatatctttaatcgtcgcgatacatataaaattacccttgttgccgcatcttcggagatagatacactgtgtacagaagtgaataatcacctgccttatggatattatgcggtcgtcacgggagaaaattatattgatattcaaagaaccgatgtaaataaagggtgcataatagaacaattaattcattatttaaatatatcttctgacaaggtggtcgtgattggcgatcagcagaatgatgtcagcatgtttgccgccgccggaatcagcatcgcaatgggcaacgcgccggatgcagtaaagcggcaggccggctatgtgactgccacgaatgatgaggagggtatcgtccatgcgttggagtggttgcgttgccttacgcatccagttaccatgcgccaaaggttgacggcggcgaaagataatgaatccaat

SEQ ID NO: 36838 - DNA, 1023 bp, Salmonella paratyphi A
gtgggcccagtaatgttgaatgtcgaaggatgtgagctggatgcggaggagcgcgagatactggcgcatccgctggttggcgggcttattctgttcacgcgtaattaccatgacccggaacagctgcgcgaattagtgcgccagattcgggcggcatcgcgtaaccatctggtggtggccgtcgatcaggaaggcgggcgcgtacagcgtttccgtgaagggtttacccgcctgcccgcggcgcaatctttttttgcgctgcatgggctggaagagggggggcgactggcgcaggaggcagggtggctgatggccagcgaaatgatcgcgatggatattgatatcagttttgcgccagtgctggatgtcgggcatatcagcgcggcaattggcgagcgttcttatcatgccgatcccgcaaaagcgttggcaatggcaacacgctttattgacggtatgcatgacgccgggatgaaaacgaccggtaagcatttccccggccacggcgcggtcacggcggactcccacaaagagacgccgtgcgatccacgtcctgaaacggacatccgtggcaaagatatgtcggtgttccgcgcgctgattagtgagaataaactggatgcgattatgcctgcccacgtaatctaccgcgctatcgatccacgcccggcaagcggttcgccgtactggctgaaaacggtgctgcgtcaggagttaggctttgacggcgtcattttctccgacgatctgtcgatggagggcgcggcgattatgggcagctatgctgagcgcgctcaggcgtcgctggatgcgggttgcgatatgattctggtctgcaataatcgtaaaggcgcagtcagcgtgttggataatctgtcgccgatcaaagcagaacgtgttacacgtttgtatcataaaggttcattttcacgccgggagctcatggactcagcacgctggaaaacagccagcgcccagctcaaccagttacatgaacgctggcaggaagaaaaagcaggtcat

SEQ ID NO: 36839 - DNA, 1321 bp, Salmonella paratyphi A
ccttcgcgtgaggataccgttattgtcgagggcgcgacgaccgctgacgccgtaaaccgtgaagaacaggattacagcgtgaaaacgaccgctgcggacaccaaaatgccgatgactcagcgcgatatcccgcagtcggtcagtattgtcagccaacagcggatggaagaccagcagttgcaaaccctgggcgaggtgatgaccaatacgctggggatcagcggaagccaggctgactccgatcgcatcagctattactcgcgcgggtttgaaattgacaactatatggttgacggtattccaacgtattttgagtcccgctggaatctgggcgatgcgctaacggataccgcgctgtatgagcgcgtggaggtggttcgcggcgcgaatgggctgatgaccggaaccggcaatccttctgcctcaattaatatgatccgtaaacacgccaccagtcgggagttcaaaggtaacgtctccacagaatacggtagctggaataagcagcgttacgtcatggatctgcaaagtccgctcaccgcagacggtaatgtccgtgggcgcatcgtggcgggttatcagaataatgattcctggctggaccgctataacagtgagaaagcgttcttttccggaattgtcgatgccgatctgggtgcaaccaccagcctttcagccggttatgaatatcaaaaaattgatgtcaacagcccgacctagggggtctgccgcgctggaacaccgatggcagcaaaaatagctatgaccgcgcgcgtagtaccgccccggactgggcttataacaataaagagataaataaattcttcgtcacgcttaagcagcgttttgccgaaagctggcaggcgaccctgaatgcgacccatactgaggtcaaattcgacagtaaaatgatgtatatcgatgcgttagtggataaagagacaggtacgctggtgagtccttatggcgcaactaccccgtggtcggcggtacgggctggaacacggcaagcgcaaagtagatgccatagatctctttgccgatgggcttatgagctgtttggccgccagcacaatatgatgtttggcggcagttatagtaaacagaataaccgctattttagcgcctgggcgaacgtctttccggacgacattggcaacttcagcgcctttaacggtaatttcccccaaacccactgggcgccacaaaatctggcgcaggacgataccacgcatatgaaatcgctgtatgccgctacggcatttcgctggccgacccgctgcatctgattctcggcgctcgttataccaactggcgtgtt

SEQ ID NO: 36840 - DNA, 1496 bp, Salmonella paratyphi A
atgctacatttgtttgctggcctggatttacataccgggcttttattattgcttgatctggcttttgtgctgttctacgaagcgattaacggtttccatgatacagccaatgcagtcgcaaccgtgatttacacccgtgcgatgcgttcgcagctggcggttgtcatggcggcggtgtttaacttttttggcgttttgctggggggtctcagcgtggcgtatgccattgtgcatatgctaccgacggatctcctgctcaacatgggttccgcgcacggcctcgctatggtcttttccatgttgctggcggcgattatctggaacctcggtacctggtatttcgggttgccggcgtccagttcccacacgctgattggcgccattatcggcatcggtttaaccaatgcgatgatgaccggcacgtcagtggtggatgcgcttaacatcccgaaagttatcaatattttcggttcactcattatctcccctattgtcggtctggtattcgccggcggtctgattttcttgctgcgccgctactggagcggtactaagaaacgcgcccgtatccacctgacgccagccgaacgtgaaaagaaagacggcaagaaaaagccgccattctggacgcgtatcgcgctgatcctctcagctatcggcgtggcgttttcgcatggcgcgaacgatggtcagaaaggcattggcctggtcatgctggtgctgattggcgtcgcgctgcgggtttcgtggtcaatatgaatgcctccagctacgaaatcacccgtacgcgcgatgctatcaacaatgtcgaaacgtactttgagcagcgtcctgacctgctgaaacgcgtcaccggcgttgaccaactgattccctctccggaaccgggcgcgactgaaccgactgaattccactgccatccggctaacaccattaacgcgcttaaccgtgcgaaagggatgctggcaaacgtggaaagctacgacaagttaagcgttgaacagcgtagtcagttgcgtcgcattatgctgtgcatttccgacacgaccgacaaagtcgtgaaattgcctggcgtaagcagcgatgaccagcgcctgctgaaaaagctgaagaccgatatgttaagcaccattgagtatgcgccggtgtggatcattatggcagtggcgttggcgctgggtattggtacgatgatcggctggcgtcgcgtggcgaccactatcggcgagaaaattggtaaaaaaggcatgacgtatgcgcagggaatgtcggcgcagatgacggcggcagtctctatcggtcttgccagctacaccggtatgccagtttctaccactcacgtactctcctcttcagtggcgggaaccatggtcgttgatggcggcgggttacagcgtaaaaccgtgaccagcattctgatggcctgggtatttacgttaccggcggcgattattctttccggcgtgctgtactggctttccctgaagattatttaa

SEQ ID NO: 36841 - DNA, 1198 bp, Salmonella paratyphi A
gtggaaaggtttgatgccgttattataggcgctggcgcagcgggcatgttttgcgccgcacaggcaggacaagcgggtagccgcgtgctgctcatcgataatggcaagaagccaggacgtaaaatcctcatgtccggcggtgggcgctgcaactttactaatctttatgttgagcctgctgcgtatttgagccagaacccccatttttgcaaatcagcattagcccgctatacccagtgggactttatcgatctggtcggcaggtatgggatagcctggcatgagaaaacgctgggacagcttttttgcgatgattccgcccaacgcattgtcgatatgctggttgccgagtgcgacaaaggtggcgtaacgatgcgcctgcgtagcgaggtattgagcgtcgagcgtgatgagtcgggtttcgtactggcgttgaacggcgagacggtgactacgcaaaagctggtgattgccagcggcggcctgtcgatgccggggcttggcgcatcgccgtttggctataaaatcgccgaacagtttggtctcaaggtgttgccgacgcgcgccgggctggtgccctttacgctacataagccgctgttagaacagctccagacgctgtctggcgtctctgtgccctgcgtgattaccgcccgcaatggcacggtatttcgggaaaacctactttttacccatcgtgggctgtccggcccgccgttttacagatttccagctactggcaaccgggcgagttagtgagcattaacttattgccggatctctcgctggaagacgttctcaatgaacagcgtaacgcgcacccgaaccagagtctgaagaacacgctggcgatgcatctgccgaaacggctggtggagtgtttacaacagttggggctcatcccggatgtatcgctcaggcagttgaacgttcgtgaccagcagacgttggttgacacgctgacggcctggcaagtacagcctaacggtaccgaagctatcggacagcggaagtgacgctgggcggcgtggatacaaacgaactatcatcgcggactatggaggcgcgccgcgtgccgggtctctattttatcggcgaagtgatggacgtcaccggctggttgggcggctataacttccagtgggcctggtcgagcgcctgggcctgcgcgcaggatttgattgcgttaaaaattaac

SEQ ID NO: 36842 - DNA, 768 bp, Salmonella paratyphi A
atggcgcattcctggttacgcctggtcgcaggggcgacattatctttcgtcatcgctggtcatgcgctggcggatgaaggcaagatcaccgtatttgccgccgcgtcgctaacgaacgcgatgcaagacattgcggcagaatataaaaaagagaaaaatgtggatgtggtctcctcattcgcctcctcttcaacgctggcgcgccagatagaagcgggcgcgcgcggaacctgttcatctctgctgatcagaaatggatggattacgcagccgataaaaaagcggtggataccacgacgcgcgaaacattgcttggcaatagcctggtagtggtagcgccgaaagccagcgagcagaaaccgtttaccatcgacaacaaaacggactggattcatctgctgaacggcgggcgtctggcggtgggcgatcccaacacgtaccggcgggaatttatgccaaagaagcgctgcaaaagctgggcgcatggcaaacgcttgaaccgaaactggcgccgggcgaggatgtgcgcgcgtgtgagcgtggtcgaacgtaacgaagcgccttaggcattgtatacggttctgatgcggtcgccagcaagggggtcaacgtggtggcgacgttcccggaagattcacataaaaaagtggaataccccatcgctatcgtggaggggcataaaaatgcgaccgtcagcgcgttctatgattacctgaaaggaccgcaggcctcggcaatctttaaacgttatggatttacgacgaagta

SEQ ID NO: 36843 - DNA, 1056 bp, Salmonella paratyphi A
atgctggagcttaatttttcccagacgctgggaacgcactgtttaaccctcaacgaaacgctgccagccagtgggatcacggctatctttggtgtctccggcgcgggaaaaacctcgctgattaatgccatcagcggtttgactcgcccgcaaaaaggacgcatcggctcgaatggccgggtgttgcatgacgcggaaaacggtatctgtttaacgccggaaaagcgccgcatcggttatgttttccaggatgcgcgcctgttcccccattacaaagtacgcggcaatttgcgctacggcatggcgaaaagcatgaccggccagtttgataagctggtgtcgctgctgggaattgaagcgttgcttgatcgcctgccggggagcctgtccggaggagaaaaacagcgcgtagcgataggccgggcattgctcaccgccccggagttgctgctgttggacgaaccgttggcctcgctggatatcccgcgaaaacgcgaattactgccgtacctgcaacggctggcgcgggaaatcaatattcccatgctgtatgtcagccattctctcgatgaaattctccacctggcggataaagtcatggtgctggaggatggacaggttaaagcgtttggcccgctggaggaggtctggggaagcagcgttatgcacccgtggctgccgaaagagcaacagagcagtattctgaaagtcagcgtgctggagcatcacccgcattatgccatgaccgccctggcgcttggcgaccagcacctgtgggtaaataaactcaatcagccgctgcaatccacactgcgtattcgtatacaggcgtcggatgtctcgctggtactacagccgccgcagcagaccagtatccgcaacgtattgcgggcaaaagtggcgaattgttatgacgataacgggcaggtggaagttcagcttgagataggcggcagaactctgtgggcgcgaataagcccgtgggccagggatgagctgaatatcaagcctggcctgtggctttacgcgcaggtgaaaagcgtttctatcaccgcc

SEQ ID NO: 36844 - DNA, 1727 bp, Salmonella paratyphi A
atccctggacgaatcccacgcgtatttattaatgacctgctggcgagaaccgatatcgtcgatctgatcgacgtgcgcgtaaaactcatgaaacagggcaagaactatcacgcgtgttgtccattccataatgagaaaaccccttctttcaccgtaaacggtgaaaaacagttttatcactgctttggatgcggcgcgcatggcaatgcgatcgactttttgatgaattacgacaagctcgaatttgtcgaaaccgtcgaagaattagcggccatgcataacctggaaattccctatgaagcaggcaccgggcttagccagatagagcgccatcaacggcaaaacctctatcagttgatgaatggtctgaatgacttttatcagcagtcgcttacccatcctgcggcaaaacctgcgcgtgactatctgcaaaagcgcggtctgagcgctgaaattattcagcgtttcgccattggcttcgcgccgccagggtgggataacgcgttaaagcgcttcggtaataacagcgataacaaggcattgttgctggatgccggaatgctggtcaataacgagcagggcagcacttacgatcgtttccgtaatcgggtcatgttccctattcgggacaaacgcggcagggtgattggttttggcggtcgagttctggggaacgacacgccgaaataccttaactctccggaaacggacattttccataaaggccgccagctatatggtctttatgaggctcagcaatatagtgctgaaccgcaacgcttgcttgtggtcgaaggttatatggatgtcgtcgcactagcgcaatacgacattaactatgtggtcgcctcgctgggtacctcaaccacggcagaccatatgcatatgttattccgggcgacgaacaacgtgatttgctgttacgacggcgaccgggctggccgtgatgccgcctggagagcgctggaaacagcaatgccttatatgaccgacggtcggcaggtacgctttatgtttttacctgacggcgaagacccggatacgctggtgcgtaaagaaggcaaggcggcttttgaagcgcggatggagcaggcgcacgctctctacgtttctgtttaatagcctcctgccgcaagtggatttaagctcgccggatggagcacgcagttagccgcgctgggctgccgctcattaatcaggtgcctggcgacgcgcaccgtattcagctgcgccagacgttggggctgaagttaggcattttcgatgatagtcagcttgatcgtttagtgccaaaacaggcggaaagcggcgtttcccgcccggctccgcagctaaaacgcacgaccatgcgtatactgataggattactggtgcaaaatccggatctcgcgccgttagtgccgcccttagacgcgctggatcagaataagctgcctggacttggcttatttaaagaattggtcaaaacttgtttggctcagccaggtcttactaccggacaacttctggaactctaccgtggcacaaatgatgctgcgacccttgaaaaattatcgatgtgggacgatatagcagataaggcgattgccgaaaagacctttaccgactcactcaaccatatgtttgattcgctgctgcaactgcgacaagaagagctgatcgctcgcgatcgcactcacggtttaagcagcgaagaacgccgagagctctggacgttaaaccaggag

SEQ ID NO: 36845 - DNA, 1817 bp, Salmonella paratyphi A
  misc_feature (640)..(640): n=g, a, t or c
  misc_feature (703)..(703): n=g, a, t or c
cagtcacagctgaaacttcttgtcacccgtggtaaggagcaaggctatctgacctatgctgaggtcaatgaccatctgccggaagatatcgtcgattcagatcaaattgaagatatcatccaaatgatcaacgacatgggtattcaggtaatggaagaagcgcctgatgccgatgatctgctgctggctgaaaataccaccagcaccgatgaagatgcggaagaagctgctgcacaagttctgtccagtgttgagtctgaaatcggtcgtacgactgacccggtacgcatgtatatgcgtgaaatgggcactgttgaactgttgacccgggaaggcgaaatcgacatcgctaaacgtatcgaagacgggatcaaccaggttcaatgctccgttgccgaatacccggaagccattacctatctgctggaacagtacgatcgcgttgaggctgaagaggctcgtttgtccgatcttatcaccggctttgtcgatccgaacgcggaagaggagatggcgccgaccgcaactcacgtcggttctgaactctcccaggaagacctggatgatgacgaagacgaagatgaagaagagcgacgatgacgccgccgatgacgacaacagcattgaccctgaactggcnacgcgaaaaattcgctgagctgggcgcaatacgtcgttacgcgcgacaccatcaaagcgaaanggccagccattcccagggagattctgaagctgtctgaagtgttcaaacagttccgtctggtaccgaagcaattcgactatctggtcaacagtatgcgcgtgatgatggatcgcgtgcgtactcaggaacgtctgatcatgaagctctgcgtcgagcagtgcaaaatgccgaagaagaactttatcacgctgtttaccggtaacgaaaccagcgaaacctggttcaacgccgctatcgcgatgaacaaaccgtggtcggaaaaactgcacgatgtcgcggaagaagtgcaacgctgcctgcaaaaactgcggcagattgaagaagagaccggtctgaccatcgaacaggtgaaagacatcaaccgtcgcatgtccattggtgaagcgaaacccgccgtgcaataaaagagatggttgaagcgaacttgcgtctggttatttctatcgccaagaaatataccaaccgaggtctgcagttcctcgatctgattcaggaaggcaacatcggtctgatgaaagcggtagataagttcgaataccgtcgtggttacaagttctccacctacgcaacctggtggatccgtcaggcgatcacccgctctatcgccgaccaggcgcgcaccatccgtattccggtgcatatgattgagaccatcaacaagctcaaccgtatttctcgccagatgctgcaagagatgggccgcgagccaacgccggaagagctggctgaacggatgctgatgccggaagataaaattcgtaaggtgctgaaaatcgccaaagagcctatctccatggaaacgccgatcggcgacgatgaagattcgcatctgggtgatttcatcgaggataccaccctcgagctgccgctggactctgccaccaccgagagcctgcgcgccgccactcacgacgttttggctggcctgaccgctcgtgaagcgaaagtcctgcgtatgcgtttcggtatcgatatgaacaccgaccacacgctggaagaagtgggtaaacagttcgacgttacccgcgaacgtatccgtcagatcgaagcgaaggcgctgcgtaaactgcgccacccgagccgttctgaagtgctgcgccttcctcgacgatta

SEQ ID NO: 36846 - DNA, 1803 bp, Salmonella paratyphi A
ttgtccgagttgctctctgtcgctctgtttctcgcctctgtgctgatatatgcctggaagccgggccgtaacacctggtggtttgccgccattctcacggtgctgggactttttgtcattctgaatattaccctgtatgccagcgactattttaccggcgacgggatcaacgacgcagtgctttatacgctcacgaatagtctgacgggagcgggagtcggcaaatatattctgccgggaatcggtattgccctggcgttagtggcggtatttggcgcgctgggatgggtactacgccgccgccgtcaccatcctcatcatgtcggttacagcctgctggcgttactgctggcgttgggttcggtcgacgccagcccggcgtttcgccagattaccgaactggtaaaatcacaaatgcgcgatggcgatccggattttgccgtttattataaagaaccagcaaaaaccattcctaatccgaagctcaatctggtctatatctacggcgagagcctggaacggacctattttgataatgacgctttccccaatctcacgccagagttgggcgcgctgaaaaatgaggggctggatttcagccataccatgcaactgcctggaacggattacaccatcgctgggatggtggcttcccagtgtggtattccgctgtttgcgccgtttgagggcaatgcgtccgcgtcggtttccagcttcttcccgcagaatatctgcctcggcgatattctgaaaaactccggttaccagaactatttcgtgcagggcgctaacctgcgttttgccgggaaagacgtgttcctgaaatcacacggatttgatcatctgtatggcgctgaagagctaaaaacggtggtggcggccccgtcttatcgtaacgactggggcttctatgatgatacggtgcttgatgaggcatggaagaaatttgaagcgctttcccgctcaggccagcggttttcgctgtttacgctgaccgtagatactcaccacccggacgggtttatctcacgcacctgcaaccgcaaacgctacgattacgacggcaagcccaaccagtcctttagcgccgtaagttgcagccaggaaaacatcgctgagtttatcaacaaaatcaaagcgtcaccgtggtttaaagataccgttatcgtcgtctcttccgaccatctggcgatgaataatacggcctggaaatacctgaataagcaagatcgcaacaatctgtttttcattctgcgcggcgataaaccacagcaggagacgctggcggtcaaacgcaacacgatggacaacggcgcaacggtgctggatattctcggcggcgataattttatcggtctgggacgtagcagcctttccgggcagtcgctgtcggaagtgttcctgaatgtaaaagagaaagtgctggcgatgaagccggacatcattcgcctgtggaatttcccgaaagagataaaagattttaccgtcgatcgggacaaaaacacgatcgcgttttccggcagccacttccgcctgccattactactgcgcgtatcggataagcgtgttgaaccgttaccggaaagtgaatactccgctccgctgcggttccagttggccgacttcgcccgcgcgataatttcgtttggatcgatcgctgctacaagatggcgcagctatgggcgccggcgctggcgctctctaccgactggtgcgtctcgcaggggcagcttggcgggcagcaaaccgtacagcatgtcgataaagcgcagtggcagggtaagacggcgtttaaagacacga

SEQ ID NO: 36847 - DNA, 350 bp, Salmonella paratyphi A
gtcattgtacataaagtgcctttaggagtagaatttcagtgatacttaacaggaggttttatgaacagaccgattttggtacccatcgatatttcagattcagaattaactcaacgcgtgatttcacatgttgaagccgaagcaaagattgacgacgctaaagtgcactttttgactgtaatcccgtctttgccctattacgcttcactgggactggcttattcagcagagctccccgcaatggacgatttgaaagccgaagccaaatctcaactggaagcgattatcaagaaattcaaccttccgcggaccgctcaggcgcacgtgcagaaggctctcctaaagatggg

SEQ ID NO: 36848 - DNA, 660 bp, Salmonella paratyphi A
atggaactctatctggataccgctaacgtggcggaagttgaacgtctggcgcgcattttcccgattgccggcgtcaccaccaatccaagcattgtggcagccagcaaagaatctatctgggatgtgctgcccaggctgcaaaacgccatcggcgaagaaggcactttatttgcgcagaccatgagccgcgacgcgaaagggatggtggaagaagccaaacgactgaataacgccatccccggcattgtggtgaaaattccggtgaccgccgaaggtcttgcagcgattaaattgctgaaaaaagaaggcatcgtgacgctgggcaccgccgtctacagcgcgtcgcagggcctgctggcggcgctggcgggcgcaaaatatgtcgctccctacgtcaaccgcgttgatgcgcagggcggcgatggcattcgtatggttcaggagctgcaaacgctactggaacatcacgctcccgacagcatggtgctggcggccagctttaaaacaccgcggcaggcgctggattgcttactggcaggttgccaggcgattacccttcctttagatgtagcgcaacaaatgctcaatacgcctgcggtagagtcagcaatagagaagtttgagcaagactggaaaaacgcttttggtaatctgaacctg

SEQ ID NO: 36849 - DNA, 873 bp, Salmonella paratyphi A
atggctgatttagatgatattaaagatggcaaagattttcacaccgataaaccacaaactaacactttgttcgcattaaaaggctgtggcgcgctggattggggaatgcagtccagactggcgaggatttttaatcccaaaaccagaaaaacggtcatgctggcctttgaccatggatatttccaggggccgacaaccggacttgagcgtattgatatcaatattgcgccgctctttgaatatgctgatgtcttaatgtgtactcgcggcatattacgcagtgtggtacctccggcaatcaataaaccagtcgttttacgcgcgtccggggcgaattctattctcactgaattaagcaatgaggcggttgcggtggcgatggatgacgctgtgcggttgaatagctgtgctgctgccgcacaggtttatattggtagtgaacatgaacatcagtcgattaaaaatattattcaactgattgatgccgggttacgcgtcgggatgccaataatggcagtgaccggggtgggtaaagatatggctcgcgaccagcgttatttttcactggcaacgcgtatcgctgcggaaatgggggcgcaaattatcaaaacgtattatgtcgataaaggttttgagcgtattgcggcaggttgtccggtgccgattgtcatcgccggcggtaaaaaactgcctgaacgtgaagcattggaaatgtgctatcaggcgattgaccagggggcttctggcgtagatatggggcgtaatatattccagtcagaagatccggtagccatgattaaagcggtacatgctgtcgttcatcataacgaaacagcagagcgtgcttatgagctgtttttgagtgagaaaggt

SEQ ID NO: 36850 - DNA, 1045 bp, Salmonella paratyphi A
atgttgaaattcatccaaaataaccgggaagcgacggcactgctggcaatagtctgtttattcgtgtttcctggcgcgctggatagccagtatttgagcgtgcaaacgctgacaatggttttcagtagcgcgcaaattttgatgctgttggcgattggcgcgacgatggtaatgctcacccgcaatattgatgtatcggtgggctcgacgacaggaatgtgcgcggtattgctgggagtgatgttaaacgccggctatagctgccggtcgcctgcctggccacactaatattaggaattgtcgccggattttttaatggcgtactggttgcctggttgaagatacccgccattgtcgccacgctgggaacgctgggcttgtatcgtgggatcatgctgctatggacagggggaaaatggattgaaggattacccgcaggcttaaagcaactctctgctccggtgtttctgggaatttccgcaatcggctggtttaccctggtgttagcgctgcttatggcctggctcctggcgaaaacccgctttggccgcaatttttagccaccggcgataacctgcagggcgcccggcaattgggtgtccgtaccgagatggtacgcatcatggcattttcacttaatggcggtatggcggcattggctggaatcgtgtttgcctcgcagattggcttcattcccaatcaaaccggcacggggctggaaatgaaagccatcgcggcctgcgtattggggggaattagcctgttaggcgggtcaggcacggtcatcggcgctattctcggcgcttattttcttacgcaaatcgatagtgtgttagtgctgctgcgtatccccgcctggtggaacgattttattgctggcctggtattgttgggcgtactggtattcgatgggcggctgcgttgcgcattacaacgcaatctgcgccgccagaaatatgcccgttttatatcaccacccactccactacagacggaagcaaaaacgcacgcacaacagaataaaaacaaagaggtggcatgatga

SEQ ID NO: 36851 - DNA, 1581 bp, Salmonella paratyphi A
aatgatgctgagctggcgatcgtgttgggcgaatctctgccgaacgacaatgctctgaacggcaaaaaggtttggctgggggatattggtcgcgccgtcgcgcatccggaactgtttctgagtgaagccaaaagccatgcgaccccttacagcgcccctgctgcggctgctcctgcggcgagcggcggtccgaaacgcgtggtcgcggtaacggcctgcccgaccggcgtcgcccatacttttatggcggctgaagccattgaaacagaagcgaaaaaacgcggctggtgggtaaaagtcgaaacgcgcggctccgtgggggccggcaatgccatcaccccggaagaggtggcggaagcggatttagtgattgtggcggcggatatcgaagtggatctggcgaagtttgccggtctcccgatgtaccgcacgtcgaccggcctggcgctgaaaaagacggcgcaggagctggataaagccgtagcggaagcaacgccgtatcaaccggcgggtaaggcatcgcaagcggcgaccgaagggaagaaagagagcgctggcgcataccggcatctattgacgggcgtttcttacatgctgcctatggtggttgccgggggactgtgtattgcactttccttcgcctttggtattgaagcctttaaggtgccggacacgctggcggcggcgctcgatgcagattggcggcggttcggcgtttgcgctgatggtgccggtactggcgggttatatcgctttctccatcgcggatcgcccaggccttacgccgggtctgattggcggtatgctggcggttacaccggttccgttttatcggcgggatcattgccggcttccttgccggtatatggcgaagcttatcagtaccaaactgaaacttccgcaaagtatggaagcgctgaagccaatcctgatcatcccgttaatttccagtctggtggtggggctggcgatgatttacctgatcggtaaaccggttgccgggattctggaagggctcacccactggctgcaaaccatgggaaccgcaaacgcagtgctgttgggcgcgattctcggcgggatgatgtgtaccgacatgggcggcccggtgaacaaagcggcgtatgcgtttggcgttggtctgctgagtacgcaaacttacgcgccgatggcggcgatcatggccgcaggtatggtaccgccgttagcgctgggtctggcgacgatggtggcgcgccgtaagttcgacaaagcgcagcaggaaggcggtaaagcggcgttggtgctggggctgtgctttatcactgaaggcgctattccgtttgcggcgcgcgacccgatgcgtgtactgccgtgctgtatcgttggcggcgcgttgaccggggccatttctatggcggtaggcgcaaaattgatggcgccgcatggcggtctgtttgttctgcttatcccaggcgcaattacgccggtattgggatacctgctggcaattgtggccggtacgctggtggcagggctgcttatgccgtcctgaaacgtccggagacggaagtcgcggcaaaagcggcgtaagagaaacac

SEQ ID NO: 36852 - DNA, 855 bp, Salmonella paratyphi A
atgaaatacatcggacgcacgtcggctgctgcgggtctgtaacgcccctgctccgcggctgaaattgcgcaacggccttgcgcttttcacaaaaaaccagcgtcgagctgtgccgccccccttactccccaggtcattgatgactttaaaatcgcctgtgaaaagtatcatttttcggcggcgcaaatccttccccacgatagttacctgattaatctgggccatccggtcagtgaagcgctggaaaaatcacgcgatgcctttctcgatgaaatgcagcgctgtgaacaactcggcttaaccttgcttaattttcatcccggtagccatctgatgcagattgcacaggaggattgcctggcgcggatcgcggaatctatcaatatcgccctcgcgcagaccgagggcgttacggcggttatcgaaaatacagccggtcagggcagtaatctggggtttgagtttgaacagttagccgccatcatcgatggcgtggaagataagtcgcgcgttggcgtctgtatcgatacctgccatgcctttgccgccggatacgatctgcgtacgccagaggcgtgcgaaaaaacattcgccgaattcgggaaaattgtcggatttcagtatttgcgcggaatgcaccttaacgacgccaaaagcgcattcggtagccgcgttgaccgccatcacagtctgggtgaaggcaatatcggccacgatgcgtttcgttggattatgcaggatgcgcgttttgacggtattccgctgatactggagaccattaatcctgatatctgggcggaagagattgcgtggttaaaagcccagcaaattgccgaagtgatggcctgacgctca

SEQ ID NO: 36853 - DNA, 1264 bp, Salmonella paratyphi A
atgatcaaggcgacggacagaaaactggtagtaggactggagattggcaccgcgaaggttgccgctttagtaggggaagttctgcccgacggtatggtcaatatcattggcgtgcagttgcccatcgcggggtatggataaaggcggggtgaatgaccttgagtcagtggtgaaatgcgttcagcgcgccattgaccaggcggaattgatggctgattgccagatctcctcggtatatctggcgctttccggcaaacatattagctgtcagaatgaaattggtatggtgcccatttccgaagaggaagtgacgcaggaagatgtggaaaacgtcgtgcatactgcgaagtcagtgcgcgtgcgatgaacatcgcgtgctgcatgtgattcctcaggagtacgccattgactaccaggaaggcattaaaaatccggtcggtctttccggcgtgcgtatgcaggcgaaagtacatttgattacctgccacaacgatatggcaaaaaacattgtcaaagctgttgaacgttgtggtctgaaagttgaccaactgatatttgccggactggcggccagttattccgtgttaacggaagatgaacgtgaactgggcgtctgtgtcgtggatatcggcggcggtacaatggatatcgccgtttatactggcggcgctgcgtcataccaaagtgatcccttacgcggggaacgtggtgaccagcgatatcgcttatgcctttggtacgccgccgagcgatgctgaagccattaaagtccgccacggttgcgcgctgggttccatcgtcggtaaagacgagagcgttgaagtaccaagcgtaggcgggcgtccgccgcgcagcctgcaacgtcagacgctggcggaagtgattgagccgcgttacaccgagctgctcaatctggtcaacgaagagatattgcaattacaggaacagcttcgccaacaaggggtaaaacatcacctggcggcggggattgtgttaaccggcggcgcggcgcaaatcgaagggcttgctgcttgctcagcgcgtgtttcatacgcaggtgcgtatcggcgcgccgctgaatatcaccggtctgacggattatgcccaggagccgtattactcaacggcggtgggattgcttcactacgggaaagagtcccacttaaacggtgaagcagaagtggaaaaacgtgttacggcatcagttggctcgtggatcaagcgacttaatagctggctgcgaaaagagttttaatttttatga

SEQ ID NO: 36854 - DNA, 828 bp, Salmonella paratyphi A
atgtcgcaggctgcgctgaacacgcgaaacagtgatgaagagacgccttcttcacgccgcaataatggaacgcgtcttgcaggaattttattcctgctgacggtactgtgcaccgtgtttgttagcgggtgggtcgtgttagggtggatggaagatgcgcagcgtttaccgttatcaaagctggtattaaccggcgagcgtcactacacgcgtaacgatgatatccgtcaggcgatactggctctgggcgcgccgggaaccttcatgacgcaggatgtgaacattatccagagccagattgagcgtttgccgtggattaaacaggccagcgtcagaaaacagtggcctgatgaattgaagattcatctggttgaatatgtgccgattgcgcgttggaatgatcaacatatggtcgatgctgaagggaataccttcagcgtgccgtcagaccgcatcggcaaacaggttttacccatgttgtatggcccggaaggcagcgcgagtgaagtgttgcagggataccgcgagatggggcaggtgctggctaaggataaattcactctgaaggaagcggcgatgaccgcacgtcgctcctggcaattgacgcttaataacggtattaagctcaatctcggcaggggcgatacgatgaaaaggttggctcgctttgtagaactctatccggttttacagcagcaggcgcaaaccgatggcaaacggattagctacgttgatttgcgttatgactcaggtgcggcagttggctgggcgccgctcccccctgaggaatctaatcagcaacagaatcaggcacaggcagaacaacaa

SEQ ID NO: 36855 - DNA, 1430 bp, Salmonella paratyphi A
caacaactggcaaaactgcgttccatcgtgcccgaaatgcgtcgcgttcggcacattcactttgtcggcatcggtggtgctggtatgggcggtattgccgaagttctggccaatgaagggtatcagatcagtggttccgatttagcgccgaatccggtgacccagcagttgacgagcctgggggcaacgattttctttaaccatcgtccggaaaatgtgcgtgatgccagcgtggtcgtcgtttccagcgcaatttcctcggataacccggaaattgtcgcggcgcatgaagcgcgtattccggttattcgccgtgcggaaatgctggcggaactgatgcgttttcgccacggcatcgccattgccgggacgcacggaaaaaccacaacgaccgcgatggtgtccagtatttatgccgaagcggggctggacccgactttcgtgaatggcggactggtgaaagccgccgttcatgcgcgtctgggccatagtcgttacctgattgccgaggcagatgagagcgacgcatccttcctgcatttgcagccgatggtcgcgatcgtcaccaacatcgaagccgaccatatggatacctatcatggcgactttgaaaacttaaagcagacgtttattaacttcctgcataacctgccgttctacggtcgcgcggtaatgtgcgtcgacgatccggtcatccgcgagttgctgccgcgggtggggcgtcagaccacgacgtatggctttagcgaggatgctgacgtccgcgtagaagattatcagcagatagggccgcaggggcactttacgctgttgcgccagggaatgccggatctgcatgtcacgttgaatgcgccgggtcgccacaatgccctgaatgccgccgcggcagtggcggtagcgaccgaagaaggcattgacgatgacgctatcctgcgcgcgctggaaagcttccaggggaccgggcgtcgttttgacttcctcggcgagttcccgcttgagccggtgaatggtaaagccgggacggcgatgctggtggatgactatggccatcatccgaccgaagtagacgccaccattaaagctgcgcgagcagggtggccggataaaaacctggtgatgctgtttcagccgcaccgttacacgcgcacgcgcgatctgtatgacgatttcgccaatgtgctgacccaggtcgatgcgctgctgatgctggacgtttacccggcggcgaagcgccgattccgggcgcggatagccgttctttatgtcgtacgattcgtaatcggggaaaaattgacccgattctggtttccgatccagctcaggttgcgacaatgttagcgccggtgctgacgggtaacgacttgatattagtgcaaggcgcaggaaatgttggcaaaattgcgcgttacttatctgaaatcaagctgaag

SEQ ID NO: 36856 - DNA, 1052 bp, Salmonella paratyphi A
  misc_feature (773)..(773): n=g, a, t or c
atgagtggtcaaccgaagcggttaatggtgatggcgggcggtaccggcgggcacgtgttccccggactggccgttgcgcatcatttaatggcccagggctggcaggttcgctggctgggtaccgccgatcgtatggaagcggatttagtgccgaagcatggcatcgacattgactttattcggatctccggtctgcgcggtaaaggcgtaaaagcgcttctggcggcgccgctgcggatttttaacgcctggcggcaggcgcgggcgatcatgaagcggtttaagccggatgtcgtgctgggaatgggcggttatgtttccggccccgcggtcttgccgcctggtcattgggtattccggtcgtcttgcatgagcaaaacggtatcgctgggctaaccaatcagtggctggccagaatcgcgaccacggtgatgcaggcgtttcccggtgcgtttccgaacgcggaagtggtgggtaacccggtgcgtaccgacgtactggcgttgccgttgcgcaggtgcgtctggccggtcgtgacggcccgattcgcgtgttggtggtcggcggttctcagggggcgcgagtcctgaaccagacgatgccgcaggttgccgccagactgggcgatacggttacaatctggcatcaaagcggaaaaggcgcgcagctcacggtagagcaggcatatgccgggacgggacaaccgcagcataaggtaacggaatttatcgatgacatggccgccgcctatgcgtgggcggatgtggtggtgntcgttccggcgctttaacggtgagcgagatcgcctgacccgggttaccggcgatattcgtgccgtttcagcataaagacaggcagcagtactggaatgcgctgccgttagaaaacgccggcgcagctaagatttttgagcagccgcagtttactgtagacgtgtcgccgaacactggcggggtggtcgccgaggcgttgttaaccatggcggaggtgcccgcgcggtatccattccggatgctaccgaacgcgtcgccagtgaagtcagccgggttgcc

SEQ ID NO: 36857 - DNA, 842 bp, Salmonella paratyphi A
gtgaggcgattgccggggattttattgctcactggagccgcgctcatcgtcattgcagcgctgctggttagcgggctgcgcctgcgttgcctcatcttgacgcctggcgtccagctatcctgaataaaattgagtccgtgaccggcgtgccggtggccgccagccaactctccgcaagctggcaaaattttggccctacgctggaagcgcataatattcatgccgccctgaaagatggcggcgaactgtcgataaaacgcgttacgctggcgctggacgtctggcaaagcctgttgcacatgcgctggcagtttcgcgacctgaccttctggcaactcaatttccgcaccaacacgcctcttcaaagcagcgacggcgaaggcatcgaaaccagccgtttaagcgatcttttcctgcgtcagttcgatcatttcgatctgcgcgatagccaaatcagttttctgacgctttccggacaacgcgcggagctggcgatcccacagcttacctggctaaacggcaaagagcggcaccgccgaaggcgaagtcagcctctccagcctgaccggccagcacggcgtgatgcaggtgcggatggatttacgcgatgacgacggtttgctgaataacggcagagtctggttacaggccgacgatattgacgtcaagccgtggctgggcaaatggatgcaggataatgtggcgctccagacggcgcgtttcagtctggaaggctggatgacgctcagcaaaggcgaaatcgccggaggagacgtctggctgaaacagggcggcgcaagctggctgggcgataacacgacgcacacgctgtctgtcgataa

SEQ ID NO: 36858 - DNA, 1962 bp, Salmonella paratyphi A
  misc_feature (1511)..(1512): n=g, a, t or c
atgagccaaacacataaacacgccattcccgccaacattgcggatcgttgcctgataaatccagagcagtatgagactaaatataaacagtctattaacgaccccgatacgttttggggcgaacagggaaaaattctcgattggatcacgccgtaccaaaaagtgaaaaacacctcctttgcgccaggcaatgtgtcgattaaatggtacgaggacggcacgctgaatctggcggcgaactgtcttgaccgccatttgcaggaaaatggcgatcgcaccgccattatctgggaaggcgatgacgcgtcgcagagtaaacatatctcttatcgcgaactgcatcgcgatgtctgccgtttcgcgaatacactgctggatctgggcattaaaaaaggcgatgtggtagcgatttatatgccgatggtgccggaagccggttggcaatgttggcctgcgccgcatcggtgcgtgcattcggtgatcttcgggggcttctcgccggaagccgtcgccggagcgcagttatcgactccagctcgcgactggtgatcaccgctgacgagaggtgtacgtgccggacgcagtatcccgctgaaaaagaatgtcgatgacgcgctgaaaaacccgaatgtcactagcgttgacatgtgatcgtcctgaagcgcaccggcagcgacattgactggcaagaaggccgcgacctgtggtggcgcgatttgattgaaaaagccagccctgaacatcagcctgaagcgatgaatgccgaagatccgctgtttatcctttatacctccggctccaccgccaagccgaaagcgtgctgccacaccaccggcggctatctggtctacgctgcgaccacctttaagtatgtctttgattatcaccctagcgatatttactggtgtaccgccgatgtgggttgggtgacggggcacagctatctgttgtatggcccgctggcctgcggcgcgaccaccttaatgtttgaaggcgtgccgaattggccaacgcccgctcgcatgtgccaggtggtcgacaaacaccaggtcaacattctctataccgccccgacggccatccgcgcgctgatggcggaaggcgataaagccattgaaggcaccgaccgttcttcactacgcattctgggttccgtcggcgagccgatcaatcccgaagcgtgggaatggtactggaagaagatcggcaaggaaaaatgtccggtcgtcgacacctggtggcagactgaaacaggcggttttatgatcacgccgctaccgggcgctatcgaactgaaagccggttccgccacccgtcctttctttggcgtacagcctgcgctggtggataacgaaggccatccgcaagaaggcgcgacggaaggcaatctggtcatcaccgattcctggccgggccaggcgcgcactctgttcggcgatcatgaacgttttgagcagacctatttctctacctttaagaatatgtatttcagcggcgacggccgcgtcganntgaagacggttattactggatcaccggtcgcgtggatgacgtgttaaacgtctccggccaccgtctgggtacggcggaaatcgaatcggcgctggtggcgcatccgaagacctccgaagcggcggtggtgggtattccacacgctatcaaaggccaggcgatttacgcttatgtgacgctcaaccacggcgaggaaccgtcgccagaactgtacgcggaggtgcgtaactgggtacgtaaagagattggcccgctgcgacgccggacgtgctgcactggaccgactcactgccaaaaacgcgttccggcaaaattatgcgccgtattttgcgcaaaatcgcggcgggcgataccagcaatctgggcgatacctcgactctcgccgatcctggcgtggtggagaaactgctcgaagagaagcaggccatcgcgatgccatcataaccataa

SEQ ID NO: 36859 - DNA, 1038 bp, Salmonella paratyphi A
tcactattaagaaaaggagaaggttatgaaagctgctgttgtcacacaagatcatcaggttgatgttactgagaaaacgctgcgtccccttcgccacggtgaagctttgctaaaaatggagtgctgcggtgtatgccataccgatctacacgtgaaaaacggagatttcggtgacaaaaccggcgttattctgggacacgaaggcattggcgtcgtggcggaagtcggtcctggtgtcacctcgctgaaacccggcgatcgcgcgagtgtcgcgtggttttatgaaggatgcggacactgtgagtattgcaatacgggcaatgaaaccttatgccgcaacgtgaaaaatgccggttacacggtagatggcggcatggccgaagagtgtattgtcgtcgcggattatgcggtgaaagtaccggaaggcctggactctgcggcggcaagtagtattacctgcgcgggcgttgccacctataaagcggtgaagatttctcatattaaacctggccagtggattgccatctacggtctgggcggtctgggtaatctggccttgcagtacgcgaaaaacgttttcaatgcgaaagtgatcgccattgatgtcaatgatgggcaactgaaactggccgaggaaatgggcgcagatctgaccattaattcacgtacggaagatgcggctaaaattgtgcaggaaaaaaccggtggcgcgcacgcagcggtggttaccgcggtcgctaaggcggcgtttaattccgcagtagatgccgttcgcgcggaggccgcgtggtggcggtcgggctgccgccagaagccatgaaccttgatatccctcgcctggtgctggatggcattcaggttgtcggttcgttggtggggacacgccaggatctgaccgaagccttccagttcgcggcggaaggaaaagtcgtgccaaaagtcgctttacgtccgcttgaagatatcaacgttatttttaaagagatggaacagggacaaattcgtggccgtatggtcatcgatttccgtcgttaaacg

SEQ ID NO: 36860 - DNA, 381 bp, Salmonella paratyphi A
atgcttaaaccacgcataactgcccgacaactcatttggatcagcgcttttctgctgatgctgaccatactcatgatgacgtggtcaacgctgcgtcagcaagagtcgacgctggccattcgcgcggttaaccagggcgccagtatgccagacggcttctcagttctgcatcatctggatgcgaacggcattcattttaaaagcattacgcctaaaaatgacatgttgctcattaccttcgattcccctgcgcaaagcgccgcagcaaaaacagtgcttgatcaaacgttaccacacggttatgtcgtcgctcagcaggacgatgacaacgaaacggtacagtggttgtcccgcttacgggaaagctcacaccgctttggc

SEQ ID NO: 36861 - DNA, 366 bp, Salmonella paratyphi A
atgaaataccgcatcgctttggctatcacgctttttacgcttagcgccggcagctacgctaattcgctttgtcaggaaaaagagcaggatatacaaaaggaaattagctacgctgaaaagcacaacaatcagcgccgtattgagggtctgaacaaggcgctcagcgaagtacgcgccaattgtactgacagcaagctgcgcgccgagcatcagaaaaagatcgctgagcaaaaagaagaggtagccgaacgccaacgtgatttagccgaggcaaaagcaaaaggcgatgcggataaaatagacaaacgtgaacgtaagctggccgaggctcaggatgagctaaaaaaacttgaggccagagactac

SEQ ID NO: 36862 - DNA, 291 bp, Salmonella paratyphi A
atgtcgaaagataacactacggaacatctgcgcgctgagttgaaatccctgaccgatacgctcgaagaagtgctgagctcttcgggcgaaaagtcgaacgaagagttgagtaagattcgtagcaaagccgagcgcgcgctgaaagagagccgttaccgcctgggagaaacgggtgatgtgattgccaaacagactcgcgccgccgccgcccgtgccgatgattatgtgcgcgaaaatccctggacaggcgtaggcattggcgccgctgtcggtctggtgttgggcgtactc

SEQ ID NO: 36863 - DNA, 461 bp, Salmonella paratyphi A
ctggacaggcgtaggcattggcgccgctgtcggtctggtgttgggcgtactctgacgcgtcgttaattatggcggactctcgacaggcacaaggaccaggcaaaagcgtactgggtatcgggcagcggattgtcaccattatcgttgagatggtggaaacccggctgcgactggcagtagtagaactggaagaagagaaagcgaacctctttcagcttttgctgatggtaggtcttaccatgctcttcgcggcgtttggcttaatgagcctgatggttctggtcatctgggctatcgatcctcagtaccgtttgaacgcgatgatcgctaccacagttgtgctgttagtgttgcgctaatcggcggcatctggactttcgcaaagcgcgtcagtccacgctattgcgccatacgcggcacgaactggctaacgatcggcaaattctggaggacgatcagtc

SEQ ID NO: 36864 - DNA, 987 bp, Salmonella paratyphi A
atgggacaactgatcgatggcgtctggcacgatacctggtatgacaccaaatcttccggggggaaatttcagcgttcagcgtcggctttccgcaactggcttaccgctgacggcgcgcccggacttccggcgaaggcggattcgccgcagaaaaagatcgttaccatctgtacgtttcccttgcctgcccctgggcgcatcgcacgctcattttccgtaaactgaaaggtctggagccgtttattccggtttctgtcgtgaatccattgatgctggaaaacggctggacgtttgatgatacttttccggcggccaccggcgataccctctatcagcatgaatttctctaccagttgtatctgcacgccgatccacactacagcggccgcgtcaccgtgccggtcttatgggataaaaaaaatcatactatcgtcagcaacgagtccgccgaaatcattcgtatgtttaactccgctttcgatgggctgggcgctaaagccggggattactatccccacgcgctgcaaagcaaaattgacgagttaaacggctggatttatgacaacgttaataacggcgtttataaagcaggcttcgccactagccagcaagcgtatgatgaagcggtagaaaaggtgtttactgcgctggcgcctggaacagattctcggacagcaccgctatctgacgggcaaccagttgaccgaggcggatatccgcttatggacgaccctggtacgctttgatccggtttacgtgactcatttcaaatgcgacaaataccgaatcagcgactacctgaatctgtacggtttcctgcgcgatatctatcaaataccgggcattgctgaaaccgtcaatatggaccatattcgtcaccactatttccgtagccataaaacgattaaccccacgggtatcatttctgtcggaccgtggcaggatctgctcgaacctcacgggcgcgacgtgcgctttggctaattt

SEQ ID NO: 36865 - DNA, 525 bp, Salmonella paratyphi A
atgacatcacgtcttcaggtcatacagggtgatatcactcaacttagcgtcgatgcgattgtgaatgccgctaacgcatcattaatgggcggcggtggcgtagacggcgcgattcatcgcgcggcggggccggcattgctggacgcctgtaaactcatccgtcagcaacagggcgaatgtcagacgggacatgcggttatcacgcctgctggcaagctttcggcaaaggcggttattcacacagtggggcccgtctggcgaggcggcgaacaccaggaagctgagctactcgaagaggcataccggaattgtttgctgcttgccgaggcgaatcactttcgttccatcgcttttccggcaatcagtaccggcgtttatggctatccacgcgcccaggccgctgaagtcgccgtcaggacggtttcagattttattacccgttacgctctgcctgaacaggtatactttgtctgtcatgatgaagaaacagcccggctttacgcaagattacttactcagcaaggc

SEQ ID NO: 36866 - DNA, 1071 bp, Salmonella paratyphi A
ccagccgtagtattgatggcaggtctgcaggggcgggtaacaccaccagcgtcgtaaggctgggcaattcttgcgcgagaggcacaagaggaaggtgctggtgtctctgccgacgtctatgcccggaatcataacagctcgaaacgctggctgagcaggttggcgtggatttcttcccgtctgatgtcggccagaaaccggttgatatcgtcaacgccgcgctgaaagaagcgaagctcaaattctacgacgtgctgctggtgatacgccggtcgtctgcacgttgacgaagcgatgatggacgaaatcaaacaggtccacgcttctatcaagccggtagaaacgctgtttgtcgtcgatgcgatgaccggtcaggatgcggcgaataccgcaaaagcctttaacgaagcgttgccgctgaccggcgtggtgctgaccaaagttgacggcgacgctcgtggcggcgcggcgctctctattcgtcatattaccggtaagccgattaaattcctcggtgtcggcgagaaaaccgacgcgctggagccattccatccggatcgtatcgcctcgcgtattctcggcatgggcgacgtactgtctcttatcgaagatatcgaaagtaaagttgaccgcgcacaggctgagaagctggcgaccaaactgaagaaaggcgacggtttcgacctgaacgacttcctggaacagctcaaacagatgaaaaacatgggcggtatggccagtctgatgggcaaattaccgggcatggggcagattccggacaacgtcaaatcgcagatggacgacaaggtgctggtgcgtatggaggcgatcatcaattcgatgacgctgaaagaacgcgcgaagccggaaataatcaaaggttcccgcaagcgtcgtatcgcgcagggctgtgggatgcaggtgcaggacgttaaccgccttctgaaacagttcgacgacatgcagcgcatgatgaagaaaatgaagaagggcgggatggcgaagatgatgcggagtatgaaggggatgatgccgccaggcttccctggccgctaatttcccggcctggct

SEQ ID NO: 36867 - DNA, 306 bp, Salmonella paratyphi A
atgacgccgggctccgttcctcgatggggcccggttgttttattcacacaagaggatgttatggtaactattcgtttagctcgtcacggcgctaaaaagcgtccgttctaccaggttgttgtcaccgacagccgtaatgcacgcaacggtcgcttcattgagcgcgttggtttcttcaacccaatcgctagcgaaaaagaagaaggcacccgcctggatctggatcgcatcgctcactgggttggccagggcgcaaccatttccgatcgcgttgcggcgctgatcaaagaagtaaaaaaagcagct

SEQ ID NO: 36868 - DNA, 546 bp, Salmonella paratyphi A
atgagcaagcaactcgccgcacaagtacccgctgaaccggttgtactggggaaaatgggttcttcatacggtatccgtggttggctcagagtgttttcctccactgaagacgccgaaagcatttttgactatcagccctggtttatccagaaggcgggtcagtggcagcaggtacagctggaaagctggaagcaccacaatcaggatctgatcatcaaactgaaaggcgttgacgatcgagatgccgcgaatcttctgaccaattgcgaaattgtcgtggattcctcgcaacttcctgcgcttgaggagggagactactactggaaagacctgatgggttgccaggtagtcaccgctgaaggctacgatctcggtaaagttatcgacatgatggaaaccgggtcgaatgacgttctcgtcattaaggcgaacctgaaagatgcatttggtatcaaggaacgactagtaccgttcctcgatgggcaggttatcaagaaagtcgatctcgctactcgtactatcgaagtagactgggatcctggtttt

SEQ ID NO: 36869 - DNA, 769 bp, Salmonella paratyphi A
gtgtttattggcatcgttagcctgtttcctgaaatgttccgcgcaattaccgattacggggtaactggccgggcagtaaaaaaaggcctgctgaacatccaaagctggagtcctcccgacttcgcgcatgaccggcaccgtaccgtggacgaccgtcttacggcggcggaccggggatgttaatgatggtgcaaccttgcgggacgccattcatgcagcaaaagccgcggcaggtgaaggcgctaaagtgatttatctgtcgcctcagggacgcaagcttgatcaagcgggcgttagcgagctggccacgaatcagaaactcattctggtgtgtggtcgctacgaaggcgtagatgagcgcgtaattcaggccgaaattgacgaagaatggtcaattggcgattacgttctcagcggtggcgaactaccggcaatgacgctgattgactccgtcgcccggtttataccgggggttctggggcatgaggcatcagcaatcgaagattcgtttgctgatgggttgctggattgtccgcactatacgcgccctgaagtgttagaggggatggaagtaccgccagtattgctgtcgggaaaccatgctgagatacgtcgctggcgtttgaaacagtcgctgggccgaacctggcttagaagacctgaacttctggaaaacctggctctgactgaagagcaagcaaggttgctggcggagttcaaaacagaacacgcacaacagcagcataaacatgatgggatggcataggcc

SEQ ID NO: 36870 - DNA, 345 bp, Salmonella paratyphi A
atgagcaacattattaagcaacttgaacaagagcagatgaagcagaacgtaccttccttccgtccgggcgataccgtggaagtgaaagtatgggttgttgaaggtaccaagaaacgtctgcaggcattcgagggcgtggttatcgctattcgtaaccgcggtctgcactctgcattcactgttcgtaaaatttccaacggcgaaggcgttgagcgtgtcttccagactcactctccggtagttgacagcattgctgttaaacgtcgtggtgctgttcgtaaagctaaactgtactacctgcgtgagcgtactggtaaagcagctcgtatcaaagagcgtcttaac

SEQ ID NO: 36871 - DNA, 1157 bp, Salmonella paratyphi A
atgtctgtaattaagatgaccgatctggatctggccgggaaacgcgtttttatccgtgcggatctgaacgtacctgttaaagaagggaaagtgaccagcgacgccgtatccgcgcctctctgccgaccatcgaactggctctgaaacagggcgcgaaagtgatggtaacttcccacctgggtcgtcctaccgaaggcgagtacaacgaagaattctctctgctgccggttgttaactacctgaaagacaaactgtctaacccggttcgcctggtcaaagattacctggacggcgttgacgtggccgaaggtgagctggtggttctggaaaacgttcgctttaacaaaggcgaaaagaaagacgacgaagcgctgtctaaaaaatacgccgccctgtgtgacgtattcgtgatggacgcctttggtactgcgcaccgcgcgcaggcttctacccacggtatcggcaaatttgctgacgttgcgtgcgcaggcccgctgctggccgctgaactggatgcgctgggtaaagcgctgaaagaaccggctcgtccgatggtggctatcgttggtggttctaaagtatctaccaaactgaccgttctggattccctgtctaaaatcgctgaccagctgattgtcggcggcggtatcgccaacaccttcgttgccgctcagggccacagtgtcggtaaatccctgtacgaagctgacctggttgacgaagcaaaacgtctgctgaccacttgcgatatcccggttccgaccgatgttcgcgttgccaccgagttctccgaaaccgcaccggcgactctgaaatccgttaacgacgtgaaagaagacgagcagatcctggatatcggcgatgcttccgctcagcagctggctgaaatcctcaagaatgccaaaaccattctgtggaacggcccggttggcgtgtttgagttcccgaacttccgtaaagggactgaaatcgtggcgaatgccatcgctgatagcgaagcgttttccatcgctggcggcggcgacaccctggcggcaatcgacctgttcggcattgctgacaaaatctcctacatttctactggcggcggcgcattcctcgaattcgtggaaggtaaagttctgccagccgtagcgatgctcgaagagcgcgctaag

SEQ ID NO: 36872 - DNA, 1018 bp, Salmonella paratyphi A
atgaccgtacgcatagcgattaatggctttggtcgcatcggacgtaacgtggttcgtgctttgtatgaatccggacgtcgggcggaaattaccgtggtggccatcaacgagctggcggatcgcaggcatggcgcatttgttgaaatacgataccagccacgggcgttttgcatgggaggttcgccacgagcgcgacagcctttttgtcggcgacgatgtcattcgtattctgcatgaacgaacgctggcggatctgccgtggcgcgaactgggcgtggatgtcgtgttggattgtacgggcgtatatggcaaccaggagcatggcgaggcgcatattgccgctggcgcgaagaaagtgctcttttctcatccgggcagcaacgatcttgacgccaccgtcgtttttggcgtgaaccagaatcaactgcgtgcggaacatcgtattgtctcaaacgcatcctgtaccacgaattgcataattcccgtcattaaattgttggatgatgcttacggcatcgagtctggtaccgtcacggcgatccactccgcgatgaacgatcagcaggtgatcgacgcgtatcactccgatctgcggcgcacgcgcgcggccagccagtcgattatcccggtagatacaaaactggcggcaggcattacgcgtatattcccgcagtttaacgaccgttttgaggcgattgccgtgcgcgttccaaccattaatgtgacggcgatcgatttaagcgtgacggtgaaaaaaccagtaaaagccagtgaagtcaaccagttgctgcaaaaagcagcacaaggtgcatttcatggtatagttgactatacggaatcaccgttggtctcgatagattttaaccacgacccgcacagcgccattgttgatggcacgcaaacccgggtcagtggcgcccacctgatcaagacgctggtctggtgcgataatgaatggggctttgctaaccggatgctcgacaccacgttagcgatggccgcagttgatttcaggctc

SEQ ID NO: 36873 - DNA, 1370 bp, Salmonella paratyphi A
  misc_feature (1332)..(1332): n=g, a, t or c
ggcgttccgggtcaaatccgcgccattgacggcaatcaggcaaaagttgacgtctgcggcattcagcgcgacgtcgatctcacattagtcggcagttgtgatgaaaacggtcagccgcgtctgggtcagtgggtgctggttcatgtcggattcgccatgagcgtcattaacgaagcggaacgcgcgacacgctcgacgcgctacaaaatatgtttgatgttgagccggacgtcggcgcactgctgtatggtgaggagagataatgcgttttgttgacgagtaccgtgcgccggaacaggtaatgcagctcattgaacacctgcgtgaacgcgccgcccttcttccttacactgctgaacgaccgctgcgcattatggaagtctgcgggggtcatacccacgcgatttttaaatttggtctcgatcagttactgcccgaaaacgtggagtttattcacggccccggttgtccggtctgcgtgctgccaatgggacgcatcgacagttgcgtggaaatcgccagccatccggaggtgattttctgcacctttggcgatgccatgcgcgtgccggggaaacagggttctctgttgcaggctaaagcgcgcggcgcggatgtgcgtattgtttattctccgatggacgcgctgaagctggcgcaggataacccgacccgcaaagtggtatttttcgggctgggctttgaaaccaccatgccgaccaccgccatcacgctacagcaggcaaaacagcgtgacgtgcgaaacttctactttttctgccagcacattacactgatcccgacgctgcgtagcctactggagcagccggacaacggcattgacgcctttcttgcgccaggccacgtcagcatggtcatcggcaccgaggcgtaccagtttatcgccgccgattttcatcgcccgctggtggtggctggattcgaaccgcttgatctactgcaaggcgtggtcatgctggttgagcagaaaatagcggccctaagccaggttgaaaaccaataccgtcgcgtggtgccggatgccggaaacatgctggcgcagcaggccatcgccgatgtgttctgcgttaatggcgacagcgagtggcgcggcctgggcgtgattgaatcctccggcgtccacctgacgccggagtatcagcgctttgacgccgaagcgcatttccgcccagcgccacagcaggtctatgacgatccgcgcgccgctgcggcgaagtgctgaccggcagatgcaagccgcatcagtgcccgctatttggtaaaacatgtaatccagagaccgcgttcggcgcgctgatggtctcttccganaagcatgcgccgcctggtatcagtatcgtcagcaggag

SEQ ID NO: 36874 - DNA, 870 bp, Salmonella paratyphi A
atgtgtacgacttgcggttgcgctgaaggcaacctttatatagaaggcgatgaacataatccgcactcagcgtttcgtagcgcgccctttgccccagcggctcgcccggcgctgaatattaccggcattaaaacgcctgactttaccccaagtcagaccgcagaaggcgatctgcattacggccacggcgaagccggaacccacgcgcctggtatgagtcagcggcggatgctggaggttgaaatcgacgtgctggacaaaaataatcgtctggctgagcgcaaccgcgcccgtttcgccgcccgccagcaactggtgctcaacctggtgtccagccccgggtccggtaaaaccaccctgctgaccgaaacgctgatgaaattgaaagaccgtgtaccgtgcgcggtgattgaaggcgaccagcagacagtgaacgacgccgcccgcatccgcgctaccggcacgcccgccattcaggtcaacaccggtaaaggctgccatcttgacgcgcaaatgatcgccgacgccgcgccgcgcctgccgctggatgaccacggtattctgtttatcgaaaacgtcggaaatcttgtctgcccggccagcttcgatctgggcgaaaagcataaagtcgcagtgctttccgtgaccgaaggtgaagataagccgctgaagtatccccatatgtttgccgcggcgtcgctcatgctgctcaataaagtcgatctgctgccctacctcaattttgacgttgagaagtgcatcgccagcgcgcgtgaagtgaacccggagattgaaattatcctgatttccgccaccagcggcgaaggcatggatcagtggctggcctggctggaggcgcagcgatgtgca

SEQ ID NO: 36875 - DNA, 897 bp, Salmonella paratyphi A
gtggcaaaaaacattcaagccattcgcggcatgaacgattatctgcctggcgaaaccgccatctggcagcgcattgaaggcacactcaaaaacgtgctcggcagctacggttacagtgaaatccgcttgccgattgtagagcagaccccgttattcaaacgcgcgatcggtgaagttactgacgtggttgaaaaagagatgtacacctttgaggatcgcaacggcgatagcctgacattgcgccctgaaggtacggcgggctgtgtacgcgccggcatcgaacatggtctcctgtacaatcaggaacagcgtttgtggtatatcgggccgatgttccgtcatgagcgtccgcaaaaaggccgctaccgtcagttccatcagctaggcgccgaagtctttggcttacaaggcccggatatcgacgcggaactgattatgctgaccgcacgctggtggcgcgcgctgggcatctctgaacacgttagcctggagctgaactctattggttccttagaggcgcgtgcgaactatcgcgatggcctggtcgcgttcctcgaacagcatcaagagacgctggacgaagactgcaaacgccgcatgtataccaatccgctgcgcgtgctggattcaaaaaatccggacgtgcaggcgctgctcaacgacgcgcctgttctcggcgactatcttgatgacgattcacgcgagcactttaccggtctgtgtaaattgctggacgcggcggggattgcctacaccgtcaaccagcgtctggtacgcggtctggattactacaaccgcactgtatttgaatgggtaacaaacagtctggggtcacagggtaccgtctgtgcgggtggtcgttatgatggtctggtggaacaactgggggggatcctc

SEQ ID NO: 36876 - DNA, 1112 bp, Salmonella paratyphi A
  misc_feature (156)..(156): n=g, a, t or c
atgcataaccaggctccgattcaacgtagaaaatcgacacgtatttacgttgggaatgtgccgattggcgatggcgcccctatcgccgtccagtcgatgactaacacgcgtaccactgacgtggaagcgacggttaatcagatcaaagcgctgganggcgttggcgcagatattgttcgtgtttctgtaccgaccatggacgccgccgaagcgttcaagcttatcaaacagcaggttaacgtcccgctggttgccgatattcacttcgactaccgcattgcgctgaaagtagcggaatacggcgttgactgcttgcgtatcaaccccggcaatatcggtaacgaagaacgtattcgcatggtggtggactgcgcgcgcgacaaaaacatccctatccgtatcggcgtaaatgccggatcgctggaaaaagatctgcaggaaaaatacggtgagccgacgccgcaggcgctgctggaatcagccatgcgccatgtggatcatctcgatcgtctcaactttgatcagttcaaagtgagcgtaaaagcatccgatgtattccttgccgttgagtcttatcgtttgttggctaaacagatcgatcagccgctgcatctggggatcaccgaagcgggcggcgcgcgtagcggggcggttaagtcggcgatcggtttaggtctgctgttatcggaaggcatcggcgacgcgcgcgtatcgttggcggccgacccggtggaagagatcaaagtcggtttcgatatcctgaagtgccgattcgcgcgcgcggcatcaatttcatcgcctgcccgacctgttctcgtcaggagttcgacgttataggcacggtgaacgcgctggagcagcgtctggaagatatcatcaccccgatggacgtctcgatcatcggttgcgtagtgaacgggccgggcgaagcgctggtatcgacgctgggtgtgacgggcggcaataagaaaagcggcctgtatgaagacggcgtgcgtaaggacagactcgataacgacgatatgatcgcgcagcttgaatcccgtattcgcgcgaaagcaagtcaacttgatgaagcgcgtcggattgacgtgctgcaggttgaaaaataa

SEQ ID NO: 36877 - DNA, 1004 bp, Salmonella paratyphi A
atgaatactgaagccacgcacgaccaaaatgaagcacaaaccaccggcgttcgtctgcgcaatgcccgtgaacaactcggactcagccagcaggctgtcgctgagcgactttgcctgaaggtttctacggtacgcgatattgaagaagataaggcgccgtccgatcttgcttcaaccttcctgcgcggatatatccgctcatatgcgcgtctggtgcatgttccagaagaggaactgctgccggggctggaaaaacaagctccgctgcgcgccgctaaagtcgccccgatgcagagtttctcattaggaaagcgtcgtaaaaaacgcgacggctggttaatgtcttttacctggctggtactgtttgtggtcgtagggctgaccggcgcctggtggtggcagaaccataaggcgcagcaggaagagatcacgacaatggccgatcaaagcacggctgaactgaacgcagataaagacagcggccaaagcgtacgctggacaccggtgccgcgacaagccaggatacgacgccagcgcaaacggctccggctcctgcgacgccggttgattcgacggcagcgacgcaaacgccagcgccaacggcggcggcgacgcaaaatacggtagtcgcgccttcgcaggcgaatgtcgatacggctgcgacatctgccgcgccagcggcaacggaaacgccgtccgcgctgccgaccagtcaggctggcgtagcggcgcctgctgccgatccgaacgcgctggtgatgaattttaccgctgactgttggctcgaagtcactgacgccacgggtaaaaaactgtttagcggtatgcagcgtaaagatggcaatttaaacctaaccggtcaggcgccttataaacttaaaattggcgcgccggccgcggtgcagatccagtatcaaggaaaacctgtcgatctgagccgctttatcagaactaatcaggttgcgcgtctgacccttaatgccgaaccgacaccggcgcagtaa

SEQ ID NO: 36878 - DNA, 2143 bp, Salmonella paratyphi A
atgctttataaaggcgacaccctgtacctcgactggctggaagatggcatcgcgaactggtgttcgatgctccaggctcggtcaataaactcgacaccgcaaccgtcgccagcctcggccaggcgcttgaggtgctggaaaagcaacacgatttaaaagggctgctgctgcgctctaataaagcggcctttattgtcggcgcggacatcaccgaatttctttcactgttcctcgtccccgaagagcagttaagccaatggctgcatttcgctaatagcgtctttaaccgtctggaagatttacccgtaccgacccttgccgccgtaaacggctatgcgctgggcggcgggtgtgaatgcgtgctggcgaccgattaccgtctggcgacgccagacctccgtatcggcctgccggaaactaaactgggcatcatgccgggtttcggcggctccgttcgtctgccgcgtatgctgggcgcggacagcgcgctggagattatcgcggcaggtaaagatgtcggtgctgagcacgcgctgaaaatcggccttgtggacggcgtggtcaaacaagagaagctaattgaaggcgcgatagcggtgttacgccaggccattaccggcgatctcgactggagagctaaacgccagccgaaactggaaccgttgaaactcagcaaaattgaagcagcgatgagctttactatcgctaaaggcatggtcgcacaaacggcgggtaaacattatccggcgccgatgaccgcagtgaaaaccattgaagccgccgcgcgttttggtcgtgaagaagcgctgaatctggaaaataaaagctttgttccctggcgcataccaatgaggctcgtgcgctggtcggtatcttcctcaacgatcaatatgtaaaaggtaaagccaaaaagctgaccaaagatattgagacgccgaaacaggcagccgtactgggcgcgggcattatgggcggcggtatcgcttaccagtcggcctggaaaggcgtaccggtcatcatgaaagatatcaacgataaatcgttgaacctcggcatgaccgaagcggccaagctgctgaacaaacagctggaacgcggcaagatcgacggtctgaagctggcgggcgtcatttcgaccatccacccgactctcgattatgccggtttcgatcgtgtagatgttgttgtcgaagcggtggtcgaaaatcccaaagtcaaaaaagcggtactggcggaaaccgagcagaaagtgcgcccggaaaccgtgctggcctcaaatacctctaccatcccgattggcgaactggcaagcgccctggaacgtccggaaaacttttgcggaatgcacttcttcaacccggtacaccggatgccgctggttgaaatcattcgcggcgagaagagttcagacgaaaccattgccaaagtcatcgcctgggcaagcaaaatgggcaagacgccgattgtagtcaacgactgccccggcttctttgttaaccgcgtgctgttcccctatttcgccggtttcagtcaactgctgcgcgacggcgcggatttccgcaaagtcgataaagtgatggaaaaacagttcggctgccgatgggcccggcctatctgctggatgttgtcggcattgatacgcgcatcacgcgcaggcggtaatggcggcaggcttcccgcaacggatgcagaaagagtatccgatgcgatcgacgctctgtttgatgctaaccgtttcggacagaaaaacggtctgggcttctggcgctataaagaagacagcaaatgcaagccgaagaaagaagaagatgccgcggtggatgacctgctggcaagcgtcagccagccgaaacgcgacttcagcgacgacgagataatcgcccgtatgatgatcccgatgattaacgaagtggttcgctgtctggaagaaggcattatcgcaagccacgcggaagccgatatggcgctggtctacggcctgggcttccactcgttccacggcggcgcattccgctggctggatacacagggcagcgcgaaatatcttgatatggcgcagcagtatcaacacctcggcccgctgtatgaagtgccggaagggctgcgtaataaagcgcgccataacgaacctattatcccccgg

SEQ ID NO: 36879 - DNA, 1161 bp, Salmonella paratyphi A
atggaacaggttgtcattgtcgatgctattcgcaccccgatgggccgttcgaagggcggcgcgtttcgcaacgtgcgggcagaagatctctccgcccacttaatgcgtagcctgctggcgcgtaatccgtcgcttacagcggcgaccctcgatgatatttactggggctgcgtacaacaaacgctggagcaaggcttcaacattgcccgtaacgccgcgctgctggcagaaattccccattcggtaccggcggtcaccgtcaaccgtctgtgtggttcctcgatgcaggcgttacacgatgcagcgcgaatgatcatgaccggcgatgcgcaggtttgtctggttggcggcgtggagcatatggggcacgtgccgatgagccacggcgtggattttcacccgggtctgagccgcaacgtcgccaaagcggcagggatgatggggctaacggcggaaatgctctcccgcctgcacggcattagccgggaaatgcaggaccagttcgccgcgcgttctcacgctcgcgcctgggccgccacgcagtctggcgcattcaaaacggagattatcccgactggcggtcatgatgcagacggcgtgttgaagcagtttaactacgatgaagtgatccgcccggaaaccacggtcgaagcgctatcaacgctgcgtccggcatttgatccggttagtggcacggtcacggcgggcacctcatccgcgctttccgatggcgctgccgccatgctggtaatgagcgaaagtcgtgcccgtgagctgggcctgaaacctcgcgcccgtattcgctcaatggcagtggtgggttgcgatccgtcaattatgggttacgggccggttccggcatcaaaactggcgttgaaaaaagcgggactgtcggccagcgatatcgatgtgtttgagatgaacgaagcgtttgccgcacagatcctgccatgcattaaggatctgggattgatggagcagatagacgagaagatcaacctcaacggcggcgcgatcgcgcttggtcatccgctcggctgctccggagcacgtatcagcaccacgcttatcaacctgatggagcgcaaagacgcgcagtttggtctggcgacgatgtgtattggtctgggtcagggcatcgccacggtgtttgagcgggtt

SEQ ID NO: 36880 - DNA, 261 bp, Salmonella paratyphi A
ttggctaatatcaaatcagctaagaagcgcgccgttcagtctgaaaaggctcgtaagcacaacgcaagccgtcgctctatgatgcgtactttcatcaagaaagtatacgcagctatcgaagctggcgacaaagctgctgcactgaaagcatttaacgaaatgcaaccgatcgtggaccgtcaggctgctaaaggtctgatccacaaaaacaaagctgcacgtcataaagctaacctgactgcacagatcaacaaactggct

SEQ ID NO: 36881 - DNA, 930 bp, Salmonella paratyphi A
atgaagctgatacgcggcatacataatctcagtcaggccccgcatgggtgtgtgctgaccattggtaatttcgacggcgtacatcgggggcatcgcgctctactgcagggtttgcaggaagaaggacgcagacgcggtctgccggtggtggtcatgattttcgaaccgcagccgcaggagctgttcgcgacggataaagcgcccgctcgcctgacgcgcctgcgtgaaaaactgcattaccttgcgcagtgcggcgtggactatgtgctatgcgtgaaattcgatcgccgctttgccgctttgacggcgcaaacgtttatcagcgaactgctggtggagcgacttggcgtgcaatttcttgccgtcggcgatgatttccgctttggtgctagccgcgcgggcgatttcttgttattacagaaggcgggggtggagtatggttttgcggtttccagcacccaaaccttttgtgaaggcggcgtgcgtatcagtagtaccgcagtgagacaggcgctggcggaagataacctggcgcttgcgaaagcctgctgggacatccctttactatttccgggcgtgtcgttcatggcgacgagctgggacgtaccattggcttcccgacggcgaacttaccgctgcgccgtcagtctccccggtcaaaggggtctatgcggtggaagtcaccgggcttggcgataagccgttacccggcgtacgaacattggcactcgtccaacggtggctggcgtgcgtcaacaactggaagtgcatctgctggacgttgtaatggacctctacggtcgccatatagatgtaatactgcgtaaaaagatacgtaatgagcagcgatttgcgtcgcttgatgagctaaaagcgcaaatcgcacgcgatgagttaacggcccgcaagttttttgggctagccgggcag

SEQ ID NO: 36882 - DNA, 1548 bp, Salmonella paratyphi A
cactatcgcgagcggtttactaacatcctggtggacgaattccaggataccaacaacattcagtacgcctgggttcgtctgctggcgggcgataccggtaaagtgatgattgttggcgacgatgaccagtcgatctacggctggcgcggggcccaggtagagaacatccagcgcttcctgaatgatttccccggcgcgcagaccattcgtctggagcagaattaccgctcgaccagcaacatccttagcgcggcgaacgctctgattgaaaacaacaacgggcgtttgggtaaaaagctgtggactgacggcgttgatggcgaaccgatatcgctgtactgcgctttcaacgagctggatgaagcgcgctttgtggttaaccgtatcaaaacctggcaggacaacggcggcgcgcttgcgcaatgcgccatcctttatcgcagcaacgcccagtcgcgcgtgctggaagaagcgttattacaggccagcatgccgtaccgcatttacggcgggatgcgcttcttcgaacgccaggagatcaaagatgcgctctcttatctgcgtttgattgccaatcgcaacgatgatgctgcctttgaacgcgtggtgaataccccaacgcgcggcatcggcgaccgcacgctggacgtggtgcgccagacctcgcgcgatcgccagctaacattgtggcaggcgtgcgtgaattgttacaggaaaaagccctggccgggcgtgcggcagcgcgctgcaacgctttatggaactgatcgacgccctgggcaggaaaccgccgacatgccgctgcatgtgcagactgaccgagtgatcaaagattccggcctgcgcaccatgtatgagcaagaaaaaggcgagaaaggccagacgcgcatcgaaaacttagaggaactggtgacggcgacgcggcagttcagctacaacgacgaagatgaagatttgatgccgttgcaggccttcctctctcacgcggcgctggaagcgggcgaggggcaggcggatacctggcaggatgcggtgcagctgatgacgctgcctcggccaaaggcctggagtttccacaggtgtttattgtcggcatggaagagggcatgttccccagccagatgtcgctggatgagggcgggcgtttggaagaggagcgtcgtctggcctacgtcggcgttacccgtgccatgcagaaactgacgctaacctatgccgaaacgcgtcgtctgtacggtaaagaggtctaccatcgcccgtcgcgtttcatcggcgagttgccggaggagtgcgtggaagaggtccgtctgcgcgccaccgtcagtcgtccggtgagccatcaacgaatgggcaagcgctggcggaaaacgacacaggctacaaactcggccaacgcgtgcccatgcgaagttcggcgagggaactattgtcaacctggagggcagcggcgagcatagccggttgcaggtggcttttcaggggcaagggatcaaatggctggttgccgcgtatgcgaagctggaaacggtttgaccgactctcatagtg

SEQ ID NO: 36883 - DNA, 2887 bp, Salmonella paratyphi A
gtttgggatatcctggacgaagtgatccgcgaacacccggtactgctgaaccgtgcaccaacactgcaccgtttgggtatccaggcatttgaaccggtactgatcgaaggtaaagctatccagctgcacccgctggtttgtgcggcatataacgccgacttcgatggtgaccagatggctgttcacgtaccgctgacgctggaagcccagctcgaagcgcgtgcgctgatgatgtctaccaacaacatcctgtctccggcgaacggcgaacctatcatcgttccgtctcaggacgtggtattgggtctgtactacatgacccgtgactgtgttaacgccaaaggcgaaggcatggtgctgactggcccgaaagaagctgagcgtatctatcgcgcaggtctggcctctctgcatgcgcgcgttaaagtgcgtatcactgaatatgaaaaagatgaaaacggcgaattcgttgcgcacaccagcctgaaagacacgaccgttggtcgcgccattctgtggatgatcgtaccgaaaggtctgcctttctccatcgtcaaccaggcgctgggcaagaaagcgatctccaaaatgctgaacacttgctaccgtattctgggcctgaaaccgaccgttatttttgcggaccagacgatgtacaccggctttgcttatgcagcgcgttcaggtgcgtccgttggtattgatgacatggtcatcccggagaaaaaacacgagatcatctctgaagcggaagccgaagttgctgagatccaggagcagttccagtctggtctggtaaccgctggcgaacgctataacaaagttatcgatatctgggctgcggcgaacgatcgtgtatccaaagcgatgatggataacctgcaaaccgaaaccgtgattaaccgtgacggccaggaagagcagcaggtttccttcaacagcatctacatgatggccgactccggtgcgcgtggttctgcggcacagattcgtcagctggcaggtatgcgtggtctgatggcgaacgcaagatggctccatcatcgaaacgccaatcaccgcgaacttccgtgaaggtctgaacgtactccagtacttcatctccacccacggtgcgcgtaaaggtctggcggataccgcactgaaaaccgcgaactccggttatctgacccgtcgtctggttgacgtcgcgcaggatctggtggtgaccgaagatgactgtggtacgcacgaaggtatcctgatgaccccggttatcgagggtggcgacgtgaaagagccgctgcgtgaccgcgttctgggtcgtgtgacggcggaagatgtgctgaatccgggtacggcggacattctggttccacgcaacacgctgctgcacgaacagtggtgtgacctgctggaagcaaactccgttgacgccgttaaagtgcgttccgttgtatcctgcgataccgattttggtgtatgtgcgcactgctatggtcgtgacctggcgcgtggccacatcatcaacaaaggtgaagctatcggcgttatcgcggcacagtccatcggtgagccgggtacacagctgaccatgcgtacgttccacatcggtggtgcggcatcgcgtgcggctgctgaatccagcatccaggtgaaaaacaaaggtagcatcaagctcagcaacgtgaagtcggttgtgaactccagcggtaaactggttatcacttcccgtaacaccgaactgaagctaatcgacgaattcggtcgtaccaaagagagctataaagtgccttatggcgctgtcatggcgaaaggtgatggcgagcaggttgccggcggcgaaaccgtggcaaactgggacccgcacaccatgccggttatcaccgaagtgagtggtttcatccgcttcactgacatgatcgacggtcagaccattacgcgtcagaccgacgaactgaccggtctgtcttcgctggtggttctggattcggctgaacgtactaccggtggtaaagatctgcgtccggcgctgaaaatcgttgatgctcagggtaatgacgttctgatcccgggtaccgatatgcctgcgcagtacttcctgccgggtaaagcgattgtacagctggaagatggcgtacagatcagttctggtgacaccctggcgcgtattccgcaggaatccggcggtaccaaggatatcaccggtggtctgccgcgcgttgccgatctgttcgaagcgcgtcgtccgaaagagccggccattctggcggaaatcgcaggtatcgtttccttcggtaaagaaaccaaaggcaaacgtcgcctagtgattacgccggttgatggtagtgacccgtacgaagagatgattccgaaatggcgtcagctcaacgtgttcgaaggggaacgtgtagaacgtggtgatgtgatttccgatggtccggaagcgccgcacgacattctgcgtctgcgtggcgttcatgctgtgacgcgttatattgttaacgaagttcaggatgtataccgtctgcagggcgttaagattaacgataaacacatcgaagttatcgttcgtcagatgctgcgtaaagcgaccatcgaaagcgccggtagttccgacttcctggaaggcgaacaggttgaatactctcgcgtcaagatcgctaaccgcgagctggaagcgaacggcaaagtgggggctaccttctcccgcgatctgctgggtattaccaaagcgtctctggcaaccgagtcgttcatctctgccgcatcgttccaggagaccacgcgtgtcctgaccgaagcagccgttgcgggtaaacgcgacgaactgcgcggcctgaaagagaacgttatcgtgggtcgtctgattccggccggtaccggttacgcgtaccaccaggatcgt

SEQ ID NO: 36884 - DNA, 723 bp, Salmonella paratyphi A
gtgattgaatttaaaaacgtctccaagcactttggccccacccaggtgctgcataacattgatttaaacatccgtcagggcgaagtggttgtgattatcggcccttccggttcgggtaaatccacgttattacgctgtatcaataaactggaagagatcactccggcgatctgattgtcgatggtctgaaagtcaacgatccgaaagtagacgaacggctgattcgccaggaagccggcatggtgtttcaacagttttatctgttcccgcatctgaccgcgctcgaaaacgtgatgttcggtcctctgcgtgcgcggcgtaaagaaagaagaagcggaaaaacaggcgaaagctctgttagcgaaagttggactggcggaacgggcgcaccactacccctccgagctttccggaggtcaacaacagcgcgtcgccattgcccgagcgctggccgtgaagccgaaaatgatgctctttgacgagccaacctccgctctggaccctgaactgcgccatgaagtgctgaaagtcatgcaggatctggcggaagaaggcatgaccatggtcattgtcactcacgaaatcgctttgccgaaaaagctcgtcacggctgattttcatcgataaaggccgtattgccgaagatggcagtccgcaggcgttgatcgaaaacccgccaagcccacgtttacaggaatttttacagcacgtctcctgagatat

SEQ ID NO: 36885 - DNA, 655 bp, Salmonella paratyphi A
atgcagtttgactggagcgccatctggcccgccattccgcttttgcttgagggcgctaaaatgaccctgtggatctcggtcctcggtctggctggcggcctggttattggactggcggcaggttttgcccgtacgtttggcggctggttcgctaaccacatcgccctggttttcattgaaattattcgcggcacgcctatcgttgtccaggtcatgtttatctactttgccctgccgatggcatttaatgatttgcgtattgatccgttcagcgcagcggtcgtgacaattatgattaactccggcgcttatatcgcggaaattactcgcggcgcagtactatccattcacaaaggttttcgcgaagcgggtctggcgctgggcctttctcgccgggaaaccatccgccatgttattttaccgcttgctctgcgccgtatgctgccgccgctgggcaaccagtggatcattagcatcaaagacacctcgttgtttattgttatcgcgtagccgagctgacccgtcagggccaggaaattattgccggtaactttcgcgccctggaaatctggagcgccgtggccgtcttctatttgatcattacgctggtgctgagctttattttgcgtcgtcttgaaagaaggatgaaaatcct

SEQ ID NO: 36886 - DNA, 501 bp, Salmonella paratyphi A
atgagtaccgctaaactggtaaaaacaaaagcgtctaatctgctttatacccgtaacgatgtatcagagagcgataaaaaagcgacggttgagttgcttaatcgtcaggtgatccagttcattgacctgtcgctgatcacgaaacaggcccactggaacatgcgcggtgctaactttattgccgttcatgagatgctggatggcttccgtaccgcactgaccgatcatctggatactatggccgagcgcgccgtacagcttggcggtgtagcgttaggcaccacgcaagttatcaacagcaaaactccactgaaaagctatccgctcgacatccataacgtgcaggatcacttaaaagaactggccgatcgctacgctgttgtcgctaatgatgttcgcaaagctatcggtgaagccaaagatgaagacactgccgatatctttaccgccgcatcacgcgacctcgataaattcctgtggtttatcgaatccaacatcgaa

SEQ ID NO: 36887 - DNA, 895 bp, Salmonella paratyphi A
atgccggggtcaacacgtaaactaccagtctggttgcccattttggttttgctcattgccatgtcctctattcagagtggcgcttcactggcaaaatcgttatttcctcttgtcggcgcgcgcgggtgtaacggcgcttcgtctggcgttgggaacgcttatccttatcgcctttttcaaaccctggcgtttgcattttgccaaagagcagcggctgcctttactgttttatggtctgtcgctgggcgggatgaactatctattctatctgtcgattcagacggtgccgttgggtattgcggtcgcgctggaatttaccggccctctggcggtcgcgctgttttcatcccggcgtccggtagattttatttgggtcgtactggctgtgcttggactctggttcctgctgccattaggacaagatatgtctcacgtcgatcttaccggggccgcgttagctcggccgtggtgcctgttgggctgtctatattcttaccggccagcgagcaggcgcggaacatggtccggccacggtggcggtaggctcgctgattgccgccatcattttcgtgccgattggcgcagttcaggctggcgatgcgctatgacactggtcgattcttcccttagggttagcggtcgctgtgctttctacggcgctgccttattcactggaaatgattgcgctgacgcgtctgccaacccggcaccttcggtacgctgatgagcatggaacccgcgctggccgcgtttccgggatgatttttctgggcgaaacgcttacgggcatacaaatcctggccctgtgcgccatcattgccgcctcaatggttctaccctaacgattcgccgcgaaccgcaaattaaacaagttgacgtaaaatagtttcttatt

SEQ ID NO: 36888 - DNA, 2065 bp, Salmonella paratyphi A
ctggtctcgctgctgctgtggaaaaagatcgcccgtgtgtttgtcggcaggtcgcgttcagtctgtcgcggtccgtctggtcgttgagcgcgacgtgtattaaagcgtttgttccggaagagttctgggaaattgacgctaatacgacgacgccgtctggagggctaccgctacaggtcacgcatcagaacgacaagccattccggccggtaaatcgcgagcagacgcttgccgccgtcagcttgttggaaaaagcgcgctatagctatctggagcgtgaagacaaaccgaccagcagcaaacctggcgcgccgtttatcacctccacgctacaacaggcggccagcacccggctggtctttggcgtgaagaaaaccatgatgatggcgcacgtctgtatgaggcgtgctacatcacctatatgcgtacagactccaccaacctgagtcaggatgcggtcaacatggtgcgtggttatattggcgataatttcggcaagaaatacctgccggataacccgaaccagtacgccagcaaagaaaaactctcaggaagcgcacgaagcgatccgtccttccgacgttgctgtcatggctgagtcgctgaaagacatggaggctgacgcgcagaagttgtatcaactaattttggcgtcagtgtgttcgctgtcagatgacgtcagcgcaatatgactctactacgcttaccgttggcgcagggaattccgtctgaaagcgcgtggggctattttgcgctttgacggctggacaaaagtgatgccggcgctgcgtaaaggcgatgaagatcgcacattgcctgccgtgaataagggcgatgcgctgacgctagttgaattgacgcctgctcagcactttactaaaccgccagcccggtttagcgaggcttctctggttaaagagcttgagaagcgcggtattggtcgtccgtctacctatgcgtcgattatctcgaccattcaggatcgcggctatgttcgcgttgaaaaccgtcgcttctatgcggaaaaaatgggtgaaatcgtcaccgatcggctggaagaaaacttccgcgaattgatgaactacgattttaccgcgcagatggaagatagtctggatcaggttgcaaatcaccaggccgagtggaaagcggtactggataacttcttcagcgattttactcagcagctcgataaagccgagaaagatccggaagaaggggggatgcgtcctaaccagatggtgctgaccagcatcgactgtccaacctgtggccgtaaaatgggaattcgtactgccagtacgggggttttccttggatgttcaggttatgcgctttcgccgaaagagcgttgtaaaacgaccattaacctggtgccggaaaatgaagttctgaacgtgctggaaggcgacgacgccgaaaccaacgccctggcgccaaacgtcgctgtcagaagtgcggtacggcgatggacagctatctgatcgatccgaagcgtaaattgcatgtgtgtggtaataacccgacctgtgacggctacgagattgaagaaggcgagttccgcatcaaagggtatgacggcccgatcgttgagtgtgagaaatgtggttccgaaatgcacctgaaaatggggcgttttggtaagtacatggcctgtactaacgacgaatgtaaaaatacccgtaagatcttgcgtaacggcgaagttgcgccgccgaaggaagatcctgttccattgccggaactgccgtgtgaaaaatcggacgcgtactttgtgctgcgcgatggcgccgcagggatattcctggcggccaatacgttcccgaaatcacgcgaaacgcgcgcgccattagtcgaggagctttaccggttccgcgatcgcctgccggaaaaactgcggtatctggcggatgcgccgcagcaggatccggaaggtaataaaaccgttgttcgctttagccgcaaaacaaaacagcagtacgttgcggcggaaaaagacgggaaggcgacgggatggtcagcgttcttcgtcgacggcaagtgggttgaaggtaagaaataaccc

SEQ ID NO: 36889 - DNA, 426 bp, Salmonella paratyphi A
atgcgtaactacgatttatccccactgctgcgtcaatggatcggttttgacaagctggccaatgcgctgcaaaacagcggcgaaagccagagcttcccgccctataacatcgaaaaaagcgacgataaccattatcgcattaccttagcgttagccggtttccgtcaggaagatctggatattcaactggaaggcacgcgcctgacggtgaaaggcacgccggaacagccggaaaacgagcccaaatggttacatcagggcctggtcatgcagccttttagcctgagctttacgctggctgagaatatggaagtttccggcgcgacgtttaccaacggcctgctgcatattgatttaacccgcaacgagccggaaaccattgcgccgcagcgtatcgcgattaacgaacgctccgcattaaatagc

SEQ ID NO: 36890 - DNA, 951 bp, Salmonella paratyphi A
  misc_feature (460)..(460): n=g, a, t or c
tatcgtaacggaccgttttactcgcgcggcccgattatgatgagcgcaatcgccgtatgaccacgacatgtaggatatcaaaggcaaagtgttgaatgcgccggtctggcagctcatggacgcactggtgcgcgacaaaatcaaggcctatagctgggtgggtgacgatcgtccggcagacgtcattgacagtattgaaaaattgcgcggtattcgttttgacaccttcaagctgaacggctgtgaagagatgggcgtgattgataattcccgtgcggtggatgcggcggtcaataccgtggcgcaaatccgtgaagctttcggcagtgaaattgagtttgggctcgacttccacggtgcgttagcggccgatggcgaaggtactgattaaagaactggaaccctatcgcccgctgtttattgaagagccggtgctggcggaacaggcggaatattatcncctgcggcgcaaacgcatattccgattgccgcaggcgagcgtatgttctcgcgttttgaatttaaacgcgtgctggacgcgggcgggttggggattctacagccggatttatcccacgcgggcggcattaccgaatgctataaaatcgccggaatggcggaagcatatgacgtggccgtggcgccgcattgccgctgggtccaatcgccctggctgcctgcctgcatatcgattttgtttcgcgcaacgcggtattccaggagcagagcatgggcattcactataacaagggcgcggaactactcgactttgtgaaaaacaaagaagacttcagcatggacggcggcttctttaaacccttaacaaaaccgggtcttggcgtagacattgacgaggccagggtgattgaacttagcaaaagcgcgccggactggagtaatccgttgtggcggcacgctgacggatcggtagccgagtggtgatcgccacgc

SEQ ID NO: 36891 - DNA, 1653 bp, Salmonella paratyphi A
ctggccttcgccctgatggcggcactcaccctgctcagcaccgtgatcggctggataagctgcgcgtcattagtcaggtggagcaaaccaatacgcaagcgctgctccccacgatgaatatggccaggcagttaagcgaagccagcgcttacgagctcttttctgcgcaaaatctgaccaatgccgacagtgagggcgtttggctggcgcaggggaagatgctgaaagcgcaaagccttaaaattaaccatcttttgcaggcattaagcgagcagggatttaatacctcggccatcgcccggcaagaaaaagagattgcgcaaacgcttgggcaacagggaacactggtcggtgaaatctcacgctgcgcgcacagcaacagcagttaagccaccagattgcggaggcggcggaaagcattgccgcccaggctcacggccaggccaataatgccgcgacatctgcgggcgccacccaggccggtatttacgatcttatcgaaagcggtaaaggggatcaggctgaacgcgcgcttgaccggctgattgatatcgaccttgagtatgtgaatcagatgaatgagttgcgggtcaatgcctgcggtttaagcaactcattgtgaccttaaaagacgcgcaagggctgagcgatgccgaggacaccgatgaaaaacttaatcagttggttaaaattttatcccgccgccagcagcgtatagaagatcctaccgttcgcgcccaaatcgccgacgcgctggaaaaaataaaccagtacaccacactggttaccctgtttcgtaaggaaaacgccatccgcgaccaacttcaaacgcttatggccaataacctctttcagtttacccgcttcagtacggaagtgtcgcagttggtgaacgccatcgaaaaacgaaacgaggctgggttagcgcgtcttacacacgccagtcagcgtgggcaaatagggttagtgatcttaggcatcctggcgctgtgctcattaagttttattctttggcgagtggtttaccgttccgtatcccgcccgctggcgcagcaaacgcaggccttacagcggctactggagggcgatattgactcgccgtttccggaggcggtctggcgtcacgaaactggataccatcagccgttctgatggaagcggtttgcgccaacgtgccaaatttgaaccgccatcgtgaggatttggcggatcaggtgcgatcgcaaacggcggacgttcattcgctggtgcttgaacaccggcagtcgctcgtcgaatcggataaatgccatcgaggcgaaatctacgttccttgccgccatgagccatgaaattcgcacgccgctttacggcattctcggtacggtacaattgctggccgataaaccgctcatggcaaactaccgcgactatttacagcccattaatgattcaggcgaatcgctactggcgattcttaacgatattcttgattactcggcgattgaagtaggcggcaccaacgtttccattagcgaggaaccgtttgaaccgcgacaattgttgaatagcgcgctgcatttaatgcacagccgcgtgcaggtggcgctcatcaccgactttagcgagcaactcccttccacgctacaaggcgatccgcgccggatacgtcaa

SEQ ID NO: 36892 - DNA, 1022 bp, Salmonella paratyphi A
ttcttttttttgataatcatcgtctcgaatgtagaaacggcgtcagccgaaaccggactgctacactggacgcgcgccgatcgggcgattccctggcggcaaacgtcagtcaatgcgagtaaaccctggaaactgtgcgcattataccccagcctgaaagattcttactggttgtccgtcaactacgggatgcaaaaagcggccaaattgtatggcgttgatttaaaagtgctggaagcgaatggctatcggcaactggcgacgcaacaacagcaaatgacgcagtgccgggagtggggcgccgacgctattctgcttggcagcagtaccgatcgtttcccggagctggaacgatatgccggtaatgtgccggttattgaactggtgaacatgattcacgatgccagcgtcgcaacccgcattggtctgccgtggtttcagatggggtatctgccgggacgtttcctggtgcagtggagcaaaggaaaaacgcttaacgttttactcttcccggggccggaagaagctggcggcagtcaggagatggtggcgggttttcgtcaggcaattaaagcagcgccatcaacattgtggatatcgcctggggcgataacgacattgaagtgcagcgaaacttactccaggaaatgctggaacgccatccggacgccaatgtggtcgccgggtcggcgatagcggcggaggcggcgatgggcgaagggcgaaatttgacgactccgctcacgatcgtctcattttatctgacgcatcaggtttatcgcggtttaaaacgcggccatatcctgatggcgctcagcgatcagatggcctggcagggagaattagcgataacgcagtcgattaaggtcttacaggggcaaccggtgcctgaaaatatcagcccgccggtacttattttgacgcataacaacgccgacagcgcgcgcgttcgtcgttcgctatcgcctccgggatttcggcccgtctatctgtatcaatacacctccgaggctaaaaagtag

SEQ ID NO: 36893 - DNA, 519 bp, Salmonella paratyphi A
atgctgagattacttgaagagaagatagccacgccattaggccccgttatgggtggtttgcgatgagcagtttcgactgcgggccattgagtgggaacagtaccgcgatcgtatggagcaactgctaaatatccactaccgtcacgaaggctatgaacgcgtttctgcgactaaccccggtggactcagcgataagcttgcagattattttgcaggcaatctcgccgtaattggtaccctggaaaccgccacggggggcacaccttttcaacgggaagtatggcaggcgttgcgcgctatcccctgcgggcaggtgatgcactatggccaactggcggcgcaactgggacgaccgggcgcccacgcgcagtgggtgctgcgaatggcgctaaccccatcagtattgttgttccctgccatcgcgtcatcgggcgtaacggcactctgaccggatacgcaggcggcgtgcagcgaaaagagtggctattacgccatgaaggctatcttttattatgaata

SEQ ID NO: 36894 - DNA, 1512 bp, Salmonella paratyphi A
  misc_feature (712)..(712): n=g, a, t or c
cgcggccaccgctttatgggtgagccggagtttaccattgacagtgccgaacagtacccgcaaattctgctggagcgcggtaaagtcattgccgattacgaagcgcgtaaagccaaaatcaaagcggacgctgaagaagcagcacgtaagattggcggtaatgccgacctgagcgaaagcctgctggaagaagtggcttcgctggtggaatggccggtggtattgacggcgaaattcgaagagaaattcctcgccgtgcctgccgaagcgctggtatacaccatgaagggcgaccagaagtatttcccggtttatgacaacgcgggcaagctgctgccaaactttatcttcgtcgccaacatcgaatcgaaagatccgacccagattatctccggtaacgagaaagtggtgcgtccgcgtctggcagatgctgaattcttcttcaataccgaccgtaaaaaacgtctggaagaccatctgccgcgtctgcaaaccgtgctgttccagcaacaactgggcacgctgcgcgacaagaccgaccgcattcaggcgctggcgggctggattgccggtcagattggcgctgacgtcaaccatgccactcgtgcgggcctgctgtctaagtgtgacctgatgaccaacatggtcttcgagttcaccgacacccagggcgtgatggggatgcattacgcgcgtcacgatggcgacgganagatgtggccgtggcgctgaacgagcagtaccagccgcgctttgccggtgatgacctgccgtctaacccggtggcctgcgcgctgggatcgcgataagatggacaccctggcgggtatcttcggtattggtcagcatccgaaaggcgacaaagacccgtttgcgctgcgtcgtgccgcacttggcgtgctgcgcatcatcgttgagaagaacctgaatcttgatctgcaaacgctgaccgaagaagcggcgcttctgtatggcgacaagttgaccaacgccaacgtagtcgatgatgtgatcgattttatgctgggtcgtttccgcgcctggtatcaggatgaaggttacaccgtcgacactatccaggcggtactggctcgtcgtccgacccgtccggcagattttgatgcccgcatgaaggcggtgtctcatttccgcaccctggaagaagcctctgcgctggcggcggcgaacaagcgcgtctccaacatcctggcgaaagccactgagccgctgaacgatatcgtccacgcctccgtactgaaagaagcggcggaaattgagttggccagacatctggttgtgctgcgtgataagcttcagccgtactttgccgatggtcgttatcaggaagcgttgattgagctggctgctctgcgcgcgccggtggatgaattcttcgaaaatgtcatggttaacgcggaagagaaagatatccgtatcaaccgcctgacgctgttgtcgaaactacgcgaactgttcctgcaggttgcggatatttcgttactgcaataagcg

SEQ ID NO: 36895 - DNA, 423 bp, Salmonella paratyphi A
cccattattgatctcttcaataacgaagtgatctcctgcagtatttcagaacgtccaaccatgccgatgatcgatgacatactcatgaaggcatttgcagacttgatgcgggtacaatccggttcttcattcagatcagggctggcaataccgtcatcaatggtaccagtatcagttacgagagtttggcatcatccaaagtatgtccgcaaaggcaactgccttgataatgcctgtgcagaatgttttttcgggactttaaaatcagaaagtttttacaccagtaaatttaaggatattgatgaacttaaaatagctattgaagattacatacgatactacaatacccgatgaattagccttaaatttaacggactcagcccggttgaataccgcctaaagagctatcaaggcagaaattaa

SEQ ID NO: 36896 - DNA, 210 bp, Salmonella paratyphi A
atgtccggtaaaatgactggtatcgtaaaatggttcaacgctgataaaggcttcggctttattactcctgatgacggttctaaagacgtgttcgtacacttctccgctattcagaacgatggttacaaatctctggacgaaggtcagaaagtttccttcaccatcgaaagcggcgctaaaggcccggcagctggcaacgtaaccagcctg

SEQ ID NO: 36897 - DNA, 302 bp, Salmonella paratyphi A
atgaagtctcttatttttactctttcactgctagccctgacgggatgcaccattactcgacaagcgcaggtcagcgacgcagcccgataagcggcatcgtgcgcctgacgtataaccagccgctattttttacttcacggacagatgactatgtatctcacggaaccgcaacacgcgaatgccagcagatgggctatgcgatgccgtttcgtttggtcagccggtagaacctgtagcatttatggggctcgttgtgtctgaacacccgatttaccctctcctggcagtgcggggcgttgcgt

SEQ ID NO: 36898 - DNA, 505 bp, Salmonella paratyphi A
atggcagctgtaggaatggttcaaaagctcaacacgccaatgaatcttgagttttacgcatcaaatctttacctccatctaagcgaatggtgttctgaacacagtttaacaggtacagccacctttcttcgtacccaagcgcaaggcaacgtgacgcaaatgatgcgcatgtttaattttatgaaaaacgccggcgccacccctatcgttaaagccattgacgttccgggtgaagagctctgctctctggaagaattgttccagaaaaccctggaggattatcagcaacgcgccagcagcgctgtcgcgtctggcagatgaagcgaaagcgctgaatgatgcctcaacgctcgattttctccataccctggaaaaagagcagcagcaggatggcgtacttttacaaactattctcgaagaagttcgcagcgctaaacgagcagggctatgcctggcgcaaaccgatcagcatctccttaacgtcgtgacctatcagcatcactga

SEQ ID NO: 36899 - DNA, 1148 bp, Salmonella paratyphi A
  misc_feature (364)..(364): n=g, a, t or c
atgaaaaggcagagaaacgtcaatttgttgttgatgttggtgttactggtggccgtaggcagatggcgcaaaccatttatattcccgccatcgccgatatggcacaagcgctaaacgtccgggaaggcgccgtccagagcgtaatggctgcttacctcctgacctacggcgtctcgcaactattttacggcccgctttccgaccgggttgggcgccgcccgtaatcctcgtcggcatgtctatttttatggtagcgaccctgttcgccatgaccacgcatagtttgacggtgttgattgccgccagcgccatgcaagggatgggaaccggcgttggcggagtaatggcgagacgctcccgcgcntctgtatgaaggaacgcaacttcgtcacgccaatagcctgttaaatatggggattctggtcagcccgctgttagcgccactgattggcggtctgctggacaccctgtggaactggcgcgcgtgttacgctttcctgctggtgctttgcgctggcgtcaccttcagcatggcgcgctggatgccggaaacccgccccgccggcgcgccgcgtacgctgatcgccagctataagacgctgtttggcaacggcgcatttaactgttacctgctgatgctaatcggcgggctggctggcattgcggtctttgaagcctgttccggcgtgctgatgggagcagtattaggtctcagcagtatggtggtaagcattctgtttattctgccgattccggcggcgttcttcggcgcctggtttgccggacgcccgaataaacgcttctcagccctgatgtggcagtcagttatttgctgtctgctggcaggccttatgatgtggattcccggctggtttggcgtgatgaacgtctggacactactcatccccgctgcgctgtttttcttcggcgccgggatgttatttccactggccaccagcggcgcgctggtcggcgggctgcaaaatattggttccggcgtactggcgtggctttcggcaatgctgccgcaaaccggtcaaggcagtctgggattgctgatgacccttatgggattgctgatcctggcgtgctggctgccgctggcgtcacggatatcgcatcagggacagacggtttaacattcccct

SEQ ID NO: 36900 - DNA, 838 bp, Salmonella paratyphi A
ctccaattggatgccatcatcattacctgctggatcattctgaacgcgatttgcgtggcctgcggctgcaaaaaggggtcagaatcgccagcgatatgcgtacgacctgagcttcctgatgctcggctgggtgtttatcgtcagcggcgccacttcatcatgaactacttcaccgactccgtcgggatgctgttaatgcacctgccacggatgctgttctataccgacgccatcggtaaaggcggcttcccacagggctggaccgttttctactgggcgtggtgggttatttacgccatccagatgagtatcttcctgggcccgtatttcccgtggtcgtaccgtacgtgaactgtgcttcgggatggtgatgggtctgaccgcgtctacctggatcctgtggacagtgctgggcagcaacacgctgctgctgatggataaaaacatcctcaacattccgcaactgattgagcaacacggcgtggcgcgcgccattatcgaaacctgggccgccttgccgctcagcaccgccaccatgtggggcttcttcatcctctgctttattgccaccgtcacgctgattaacgcctgctcttacaccctggcgatgtcgacctgtcgtgaagttcgcgatggtgaagagccgcctctgttagtgcgtatcggctggtcggtgctggtcggcatcatcggtatcgttctgctggcgctgggtgggttgaagcccattcagaccgcgattatcgccggaggatgcccgctgttcttcgtcaacattatggtgacgctgtcctttattaaagacgccaaagtgcactggaaagacaagtaattctta

SEQ ID NO: 36901 - DNA, 1616 bp, Salmonella paratyphi A
gtgtcccgtattattatgctgatccctaccggaaccagcgtcggtctgaccagcgtcagcctcggcgtcatccgtgctatggaacgcaaaggcgttcgtctgagcgtctttaagcctatcgcccagcctcgcgctgggcggcgatgcgcctgaccagaccaccactatcgttcgcgcgaactctaccctgccggcggctgaaccgctgaagatgagccacgttgaatctctgctctccagcaaccagaaagacgtgctgatggaagagatcatcgcgaactaccatgcgaataccaaagacgcggaagtggtgctggttgaaggtctggttccgacccgtaaacatcagttcgctcagtctctgaactatgaaatcgcgaaaacgctgaatgcggaaatcgtttttgtcatgtctcagggtaccgacacgccagaacagctgaacgaacgtatcgaactgacgcgcagcagcttcggcggcgcgaaaaacaccaacatcaccggcgttatcatcaacaaactgaatgcgccggttgatgaacaaggtcgtactcgcccggatctgtcggagatttttgacgactcttccaaagcgcaggtgatcaaaatcgatcctgctaaactgcaggaatccagcccgctgccggttctgggcgcggtgccgtggagcttcgatctgattgcgacccgcgctatcgatatggcgcgtcacctgaacgccaccatcattaacgaaggcgatatcaaaacccgccgcgttaaatccgtcacgttctgcgcgcgtagtattccgcatatgctggaacatttccgcgcaggctcgttgttagtgacctccgctgaccgtccggacgtactggtcgcagcttgcctggccgcgatgaacggcgtagaaatcggcgccctgctgctgaccggcggctatgaaatggacgcgcgcatttctaaactgtgcgaaccgcattcgccaccggtctgccggtctttatggtgaacaccaacacctggcagacctcgctgagcctgcaaagcttcaatctggaagtcccggttgatgaccacgagcgcatcgaaaaagttcaggaatacgtcgcgaactacgttaacgctgactggatcgagtcgctgaccgccacttccgagcgtacgcgtcgtctctctccgccggcgttccgctaccaactgactgagctggcgcgtaaagccggtaaacgcgtagtgctgccggaacgactgaaccgcgtaccgtcaaagcggcggcaatctgcgctgaacgcggcatcgcagcttgcgtactgctgggcaacccggatgaaatcaaccgcgtcggccatctcagggcgtaaactgggccaggtattgaatcgtgatcggagtggtcgtgaaacatgtcctcgctagttagctgcgtagagcaaaggcttgatcgaaccggttgcccacgagcagctggaagacaacgtggttctcggcagcattatgctgagcaagacgaatcatcgggctggttccggcgcggtcataccacaccaaaacatccgtctccgcttatcttatagacggcacgggatctcctagtcactcagtttcttatgctacgacggacagtttactat

SEQ ID NO: 36902 - DNA, 375 bp, Salmonella paratyphi A
atggaaaagcggctggcgcccgttttcgtcgaaaaccgcgtcattcgtatgacgcgctatgccatacgatttatgccgcctgtcgccgtctttacattatgctggcagatagcgctgggcggtcagttaggtccggccgtggcgaccgccctgttcgccctgagcttgcctatgcagggattatggtggttagggaaacgttccgtgacgccattgccgccttcaatccttaactggttttacgaagttcgcggtaaattgcaggaggctggacaagcgctggcgccggtagaaggaaagccggattaccaggcattagctgacacgcttaagcgcgccttcaaacaactggataaaactttcctggatgatttg

SEQ ID NO: 36903 - DNA, 1649 bp, Salmonella paratyphi A
  misc_feature (442)..(442): n=g, a, t or c
  misc_feature (466)..(466): n=g, a, t or c
gaatcttttgctcaactctttgaagaatccttaaaagaaatcgaaacccgcccggttccatcgttcgtggtgttgttgttgctatcgacaaagacgtagtactggttgacgccggtctgaaatctgagtctgccattccggctgagcagttcaaaaacgcccaggggcaactggaaatccaggttggtgacgaagttgacgttgctctggatgcagtagaagacggcttcggtgaaactctgctctctcgtgagaaagctaaacgtcacgaagcatggatcacgctggaaaaagcttacgaagatgctgaaactgttaccggtgttatcaacggcaaagttaagggtggcttcactgttgagctgaacggtattcgcgcgttcctgccaggttctctggtagacgttcgtccggtgcgtgacactctgcacctggaaggcanagagcttgaattcaaagtaatcangctggacccagaacgtgacacgttgtgtttctcgtcgtgccgttatcgatccgaaaacagcgcagaacgcgatcagctgctggaaaacctgcaggaaggcatggaagttaaaggtatcgttaagaacctcactgactacggtgcattcgttgatctgggcggcgttgacggcctgctgcacatcactgatatggcctggaaacgcgttaagcatccgagcgaaatcgtgaacgttggcgacgaaatcaacgtgaaagtgctgaaattcgaccgcgagcgtacccgtgtatccctgggcctgaaacagctgggcgaagatccgtgggttgctatcgctaaacgttatccggaaggtaccaaactgaccggtcgcgtgaccaacctgaccgactacggctgcttcgttgaaatcgaagaaggcgttgaaggcctggttcacgtttccgaaatggactggaccaacaaaaacatccacccgtccaaagtggttaacgttggcgacgtagtggaagtgatggttctggatatcgacgaagaacgtcgtcgtatctccttagggttgaagcagtgcaaatctaacccgtggcagcagttcgcagaaacccacaacaagggcgaccgcgttgaaggtaaaatcaagtctatcactgacttcggtatcttcatcggcctggacggcggcatcgacggcctggttcacctgtctgacatctcctggaacgttgcaggcgaagaagcagttcgtgaatacaaaaaaggcgacgaaatcgctgcagttgttctgcaggttgacgcagaacgtgaacgtatctccctgggcgttaaacagctcgcagaagatccgttcaacaactgggttgctctgaacaagaaaggcgctatcgtaaccggtaaagtcactgcagttgacgcgaaaggcgcaaccgtagaactggctgacggcgttgaaggttacctgcgtgcttctgaagcatcccgtgaccgcgttgaagatgcgactctggttctgagcgttggcgacgacgttgaagctaaattcaccggcgttgatcgtaaaaaccgcgcaatcagcctgtctgttcgtgcgaaagacgaagctgacgagaaagatgccatcgcaactgttaacaaacaggaagatgcaaacttctctaacaacgcaatggctgaagcattcaaagca

SEQ ID NO: 36904 - DNA, 1752 bp, Salmonella paratyphi A
atgcataacgataaagatctctctacgtggcagaccttccgccgactgtggccaaccatagcgccttttaaagcaggtctgatcgtggcgggcatagcgttaattctcaacgcagccagcgataccttcatgctatcgctcctcaagccattactggatgatggtttcggtaaaacggatcgctcagtgttgctgtggatgccgctggtggttattgggctgatgatattacgaggcatcactagctatatctccagctactgtatttcatgggtgtcaggcaaggtggtaatgaccatgcgccgtcgcctgtttggccatatgatgggaatgcccgtcgccttctttgataaacagtctaccggtacgctgctgtcgcgtattacatacgattcagaacaggttgcctcttcttcatctggcgcgctgattaccgtggtgcgtgaaggggcatcgatcatcggattgtttattatgatgttctattacagctggcagctgtcgatcatcctggttgttttagcgccgattgtgtcgattgcgattcgcgttgtctcaaagcggttccgcagcatcagtaaaaatatgcagaacacgatgggacaagtgactaccagcgctgaacaaatgctgaaaggacacaaagaggtactgattttcggcggtcaggaagtcgaaactaaacgctttgataaagtcagcaataagatgcgactgcaaggcatgaaaatggtctctgcctcgtcaatttccgatcctatcattcagctcattgcctcgctggcgctggcgtttgttctctatgctgcgagcttcccaagcgtaatggatagcctgacggcagggaccatcacggtggtgttctcctccatgatcgcgctgatgcgtccattaaaatcgctgacaaacgttaacgcgcagttccagcgtgggatggcggcttgtcagacgttgtttgcgattctggacagcgaacaggagaaagatgaaggtaaacgtgtcattgaccgcgcgaccggcgatctcgaattccgcaatgtgacgtttacttacccgggccgtgaagtgccggcattgcgtaacatcaatttgaaaattctgccgggaaaaccgtggcgctggtggggcgttccggatcgggtaaatcaactatcgccagtctgatcacccgtttctacgatattgatgaaggacacatcctgatggatggtcacgatctacgcgaatacactctggcctctctacgtaatcaggtggcgctggtttcgcaaaacgtgcatctgtttaacgacacggtcgccaataacattgcttatgcccggacggaagaatacagccgcgagcagattgaagaggcggcgcgcatggcctatgccatggactttatcaacaagatggataatggcctggataccatcatcggcgaaaacggcgtactgctttccggtggtcaacgtcagcgtatcgcgattgcccgcgccttactgcgcgacagccgattctgatccttgatgaagctacgtccgcgctggataccgaatctgaacgtgcgattcaggccgcgttggatgagctgcagaaaaaccgtacctctctgatgattgcgcaccgtctctccaccatcgaacaggcggatgagatcgttgtagtcgaagagggtattatcgttgagcgcggcactcatagcgagctgctggcgcaacacggcgtttacccgagctacataagatgcaatttggccaatgattgcgc

SEQ ID NO: 36905 - DNA, 2010 bp, Salmonella paratyphi A
gccgccaaagacgaatttaaacgctccatgccaggccgtattatcggcgtctcaaaagatgcggcgggcaataccgcactggcatgggatgcagactcgcgagcagcatatccgtcgtgagaaagcgaactccaacatttgtacctcgcaggtactgctggctaacatcgccagcctgtatgccgtttatcatggtccggtcggtctgaagcgcatcgctaatcgtatccaccgcctgaccgatattctggcggcaggtctgcaacaaaaaggactgaagctgcgtcatgcgcactacttcgacaccctgtgtgtggaagtggctgataaagctgcggtactggcgcgtgcgaacggcagagatcaacctgcgcacgatattcataacgcggtgggtattaccctcgatgaaaccaccacccgtgagaatgtggcgcagttgttcaatgttttgctgggcgacacgacggtctgaacattgaaacactggataaagacgtggcgcttgatagccgttctattcagcaaagtatgctgcgtgacgatgcgattctgacgcatccggtatttaaccgttaccacagcgaaaccgagatgatgcgctatatgcactcgctggagcgtaaagatctggcgctgaaccaggcgatgatcccgctgggttcctgcaccatgaagctgaacgccgccgccgagatgattcctatcacctggccggaattcgctgaactgcatccgttctgcccgccggaacaggccgaaggatatcatcagatgattagccagctttcggactggttggtgaaactcaccgggtacgacgccgtctgtatgcagccgaactccggcgcgcagggggaatacgcggggctgctggcgattcgtcactatcacgaaagccgcaacgaagggcatcgcgatatctgcctgatcccggcttctgctcacggcactaaccctgcttctgcacatatggcaggaatgcaggtggtggttgtggcgtgtgataaaaatggcaacattgatctgactgatctgcgcgcgaaagccgaacaggcgggtgataatctctcctgcatcatggtgacctatccgtccacccacggcgtctatgaagaaacgatccgcgaagtgtgtgaagttgtgcaccagttcggcggtcaggtttaccttgatggcgcgaacatgaacgcccaggtcggcatcacctcaccgggctttattggcgcggacgtttcgcacctcaacctgcataaaaccttctgcattccgcacgggcggcggcccaggcatgggaccgatcggcgtgaaagcgcatctggcaccgtttgtgccgggtcatagcgtggtgcaaattgaagggatgctcacccgtcagggcgcggtgtctgcggcgccgttcgcagcgcctccattctgccgattagttggatgtacatccgcatgatgggcgcagaaggcctgaagcaggcaagtcaggtagcgattcttaacgctaactacattgccagctgtctgaaagacgcgtacccggtactgtatactggtcgcgatggccgtgtggcgcacgaatgtattcttgatattcgtccgctgaaagaagaaaccggcatcagcgagctggatattgccaagcgtctgatcgactacggtttccatgcgccaaccatgtcgttcccggtggcgggcacgctgatggtagagccgacggaatctgaaggtaaggccgagctggatcgctttatcgatgcgatgctggctatacgcgcagagattgaccaggtgaaagccggtgtctggccgctggaagataacccgctggtgaacgcgccgcacattcagagcgaactggtcgccgagtgggcgcatccgtacagccgtgaagttgccgtattcccggcaggcgtggcagacaaatactggccgacggtgaaacgtctggatgatgtttatggcgaccgtaacctgttctgctcctgcgtaccgattagcgactaccagtaatttact

SEQ ID NO: 36906 - DNA, 1421 bp, Salmonella paratyphi A
accttgccaaaagattttttatggggcggcgcggttgctgcacaccaggttgaaggcggctggaataaagacggtaaaggccccagcatctgcgacgtgctaaccggcggcgcacacggcgtgccacgcgaaatcacccagaatgtcgttgctggcaaatactatccgaaccacgaggcggtggatttttacggacattacaaagaagacatccgtcttttcgccgaaatggggttcaaatgcttccgtacctctattgcctggacgcgtatcttcccgaatggcgacgaatcccagccaaacgaggccggtctgaaattctacgacgacatgtttgatgagttactcaaatacaacatcgaaccggtcattaccctgtctcactttgaaatgccattacatctggtacagcactacggcggctggaccaatcgtaaggtcgttgatttctttgtccgttttgctgaagtcgtgttgaacgctacaaacataaggtcaaatactggatgaccttcaatgaaatcaacaatcagcgaaactggcgcgcgccgctgtttggctactgctgttccggcgtagtgtataccgagcatgagaatccagaagaaaccatgtatcaggtcttacatcatcagtatgtcgccagcgcgctggcggtaaaagcggcacgtcgtattaatccacagatgaaagttggctgtatgctggcgatggtcgcgctgtatcctttctcctgtaaaccagaagatgtgatgtttgctcaggagtcgatgcgtgaacgctacgtctttaccgatgtacagctgcgcggctactacccgtcctatgtgttgaacgagtgggagcgccgcggatttaacatcaaaatggaaaatggcgatcttgaagtgctgcgcgaaggcacctgcgattatcttggtttcagttattacatgaccaacgcggtcaaagccgaaggcggtagcggcgatgcgatttccggttttgaaggcagcgtaccgaacccctatgttaaagcatctgactggggctggcagattgacccggtgggtctgcgctattcattgtgtgaactgtacgaacgctatcaaaagccgctatttattgtcgaaaacggttttggtgcttacgacaaagtagaagaagatggcagcatcaacgacgactatcgcattgactacctgcgcgcccatattgaagagatgaaaaaagcggtcacttacgatggtgtcgacctgatgggctacacgccgtggggctgcatcgactgcgtgtcgttcaccaccggtcagtacagcaagcgctacggcttcatctacgtgaacaagcacgatgacggtacgggcgatatgtcgcgttcgcgtaagaaaagcttcaactggtacaaagaggtgattgccagcaacggcgagaagctttaa

SEQ ID NO: 36907 - DNA, 646 bp, Salmonella paratyphi A
atggtgcaaaaaccattaatgacgcagggatattcgctggctgaggaaatcgccaacagtattagccacggcattggattggtatttggtattgtcggcctggtgctgttgttggttcaggcggtagaggcgaatgcgggtatgacggctatcgccagctacagtttatatggcgggagcatgatcctgctttttcttgcctcaacgctttatcacgccattcctcatcagcgggcaaaaatctggttaaagaaatttgatcactgcgctatctatctgctcattgccggaacctatacgccatttctgctggtaggtctggattcgccgctggcgcgcggactaatgattgtgatctggagcctggcgctattcggtatcctcttcaagttgacgattgcgcaccgatttaaagtgctttcactggttacgtatctggcaatgggctggctgtcgctgatagtggtttatcagttggcgattaagctggcgataggcggcgtgacctgctggcggtaggtggcgtcgtttactcgctaggcgtaattttctatgtttgcaaacgcatacccttaaaaccacgccatctggcatggctttgtgctgggttgcagcgtgtgcactttcctggcatctatttgtatgt

SEQ ID NO: 36908 - DNA, 1176 bp, Salmonella paratyphi A
  misc_feature (38)..(38): n=g, a, t or c
atgaattcaacccttatcgattcacttctggccgtcgntggctgtaacccgtgggcgggcctctactttttacagtcgctgctgattaacctcgcgctcggctacccctttagcctgctttataccgcggcgtttacctgcctgttgctgttgctctggcgctacctgccccgcggacaaaaagcgctgctcggcatctgttcgctggtagctgcttgctattttccctttggccaggcttacggcgcgccgaactttaatacgctgctggcgctgcactccaccaatatggaagagtcgagcgaaatcctgaccatcttcccgtggtatagctacctgaccggactttttatttttgcgctgggtattattgcgcttcgccgccgaaaagaagaggtcaagccgcgctggaatagcctcgacagcctgtgcctgctgattagcgtcgcggcatttttcgtcgcgccggtacaaaatctggcgtggggcggcgtttttaaggttattgataccggctatccggtttttcgcttcgccaaagacgttatcgtcaataacaacgaagtcattgaagagcagcaccgtatggcacagctatccggcataaaagatagctggacggttactgcggtgaaacccagatatcacatctatgtcgtggtgattggtgaaagcgcgcgacgggatgccatggcgctttcggcggccactgggataatacccccttcgccagccatgtgaatggcgacttctttatggattacatcgccgccagcggtcaacgcaaaaatcgcttggtttaacgctcaatcgcgtggtggataacaaaccgcagtatcaggataacttcgtcacgctggctaaccgcgccggttttcagacatggtggttttccaatcaggtgcaaatcggcgaatacgacacggccatcgccagtatcgccaaacgcgccgatgaagcgcatttcctgaaaaacggcgattttgaagcggataaaaatactcgcgacgacgcgctgttaaccatgacggcgcaggtattggcgacagaacgcacgcaaccgcagttgattgtgttgcatgtaatgtgatcgcatgccaggcctgcgaccgtactcagggaatatacgcgacgtttgtgcagtctgaagaggacgtctgttatttatacaccagg

SEQ ID NO: 36909 - DNA, 1595 bp, Salmonella paratyphi A
gtgttagtttccagcaacgttaccatgcagcttcgcagtaagccgctgttcgaaaacatttccgtcaaatttggcggcggcaaccgttacgcgtgatcggcgccaacggtagcggaaagtccacttttatgaaaatcctcggcggcgacctggagccgacgctgggcaatgtttccctcgatccgaatgagcgcatcggtaagctgcgtcaggaccagttcgcttttgaaacattcaccgtacttgatactgtcattatggggcatggcgaactgtgggaagtcaagcaggagcgcgaccgtatctacgctttgccggaaatgagcgaagaagacggctataaagtcgccgatctggaagtaaaatacggcgagatggacggttattccgctgaggcgcgcgcgggcgaactgctgttgggggtgggcatcccgctggagcagcattacggtctgatgagtgaagtcgcgccaggctggaatttgcgtgtgctgctggcgcaggcgttattctctaatccggacatcctgttgctcgacgaaccgaccaacaacctggatattgatactatccgttggctggagcaggtgctgaacgagcgcgatacgacgatgatcatcatttcgcacgaccgtcacttcctgaacatggtttgtacgcatatggcggatctggattacggcgacttgcgcgtctatccgggtaactatgatgagtatatgacggcggcgacccaggcgcgtgaacgtctgttggccgataatgcgaagaaaaaagcgcaaattgccgagctgcaatcttttgttagccgttttagcgccaatgcctctaaatcgcgtcaggcaacgtcgcgcgcgcggcagattgataaaatcaagctggaagaggtgaaagcctccagtcgtcagaacccgttcatccgttttgagcaggataaaaaactgttccgtaacgctttggaagtggaagcgttgacgaaaggttttgataacggtccgctgtttaaaaatgtcaatttgctgctcgaagtcggcgagaagctggcagtactcggcaccaatggcgtgggtaaatctacgctgctgaagacgctggttggcgatctggacgccgatcatggcaccgttaaatggtcggaaaacgcgcgtattggttactacgcgcaggaccacgaatatgaattcgaaaatgacctgacggtgtttgaatggatgagtcagtggaagcaggaaggcgacgacgagcaggcagtgcgcagtattctgggccgcctgctatttagccaggatgatatcaaaaagcctgcgaaagtcctctccggtggcgagaagggccgtatgctgttcggcaaactgatgatgcaaaagccgaatatcctgatcatggacgaaccgactaaccacctggatatggagtcgatcgaatcgctgaatatggcgctggagctgtatcagggcacgctgatctttgtttcgcacgaccgtgagttcgtcagctcgctggcaacccgcgtcattgaaattacgccggagcgcgtggtggacttcagcggcaactacgacgattatttgcgtagtaaagggattgaaagctaa

SEQ ID NO: 36910 - DNA, 444 bp, Salmonella paratyphi A
catcaaattgaccgtcttctcaccctcatgcagcgcctgcgatctccggaaaacggctgcccgtgggataaagagcagaccttcgccagcatcgcgccttatacactggaagaaacctatgaagtactggatgcgattgcgcgtgaggattttgacgatttgcgcggcgaactgggcgacctgttgttccaggtggtgtttgtacgcgcagatggcgcaggaagaaggccgcttcgattttaatgatatctgcgctgccatcagcgacaagctggagcgccgccatccgcatgtttttggcgagctttccgcggataatagcgaagaagcattagttcgctgggaacaaatcaaaacggaagagcgcggcaaaaagcgcagcattccgcgctggacgatattacccgtagcttaccggccttaatggcgcgcaaaaaacgcagt

SEQ ID NO: 36911 - DNA, 1541 bp, Salmonella paratyphi A
  misc_feature (495)..(495): n=g, a, t or c
  misc_feature (497)..(498): n=g, a, t or c
tctggtaagcccagcgagcatgtactgcattgcgcctggctgaacagcattatcagaccggtctaaaaaatttactggatacggcggtcctggagggagtagacgaaaccgccgcggtcacgtctccggacgctggcagaaaatcgatgagatcccgtttgattttgagcgtcgccggatgtcggtggtggtcgccgaagattcgaacgtgcatcaactggtctgcaaaggcgcgttacaggagatcctgaacgtgtgtactcaggtgcgccacaacggcgatattgtgccgctggacgacaatatgctgcgccgggtgaaacgcgttaccgacacgctgaaccgtcaggggctacgcgtggtcgccgtcgcgacaaatacctgcctgcgcgtgagggcgattaccagcgtatcgatgaatctgacctgatcctggaagggtatatcgcttttctcgatccgccgaaagagaccaccgcgccgaggctgaaaggnannaggcgagcggaattacggtgaaaattctcaccggcgacacgagctggtagcggcgaaagtttgccatgaggttgggctggatgcgggcgatgtcgttattggcagtgatattgaagggttaagcgacgacgcgctggcgctgcccgcccggctaacgaacgttgttttgcgcgtctgacgccgatgcataaagagcgcatcgtcactttgctcaaacgcgaggggcatgtggtcggttttatgggcgacgggattaacgatgctccggcgttgcgggcggcggatattggtatctcggtagatggcgcggtggacatcgcccgtgaggcggccgatattatcctgctggaaaagagcctgatggtgctggaagaaggcgtcattgaaggtcgtcgtactttttctaatatgttgaaatatatcaagatgacggccagctcaaatttcggtaacgtgtttagcgtgctggtggcgagtgcctttttgccgttcctgccaatgctgccgctgcacttgctgattcaaaacctgctgtacgatgtatcccaggtggcgattccgtttgataatgtcgatgaagaacaaattcaaaagccgcagcgctggaatccggctgatttggggcgctttatggtctttttcggtccgatcagctcgattttcgacattttgaccttttgtctgatgtggtgggtatttcatgcgaatacgccagaaacgcaaaccttgttccagtccggctggtttgtggtgggattactgtcgcaaacgctgattgtgcatatgatccgtacccgtcgtctgccgtttattcaaagtcgcgccgcctggccgctgatggcgatgacattgttggtgatggtggtgggagtctcgttgccgttttcgccgctggcgtcttacctgcagttgcagcgctgccgttaagctatttcccgtggctgattgctattctggcgggctatatgacgttaacccagttagtgaaagggttttacagccgacgttatggctggcagtaaacactttcgtcggggattcgc

SEQ ID NO: 36912 - DNA, 1373 bp, Salmonella paratyphi A
gtgaccgctttttcaaccctgaatgttttgcccgccgcccagctcaataaccttactgagctgggctatcttgagatgacgcctgttcaggccgcggcattacccgtcattctggcgggaaatgatgtgcgtgtgcaggccaggaccggtagcggcaaaacggcggcgtttggtcttgggctcttgcatcgaattgacgtcagtctgttccagacacaggcgttagtgctgtgtccgacgcgggagctggcggatcaggttgccggagagttacgtcgcctggcccgttttctgccaaataccaaaattctgaccttgtgtggcgggcagccctttggcgcacagcgcgactcgcttcagcacgctccgcatatcattgtcgcgacgccggggcgccagctggatcatttacaaaaagaaaccgtatcgctggatgcgctgcatattctggtaatggatgaagcagaccgaatgctggacatgggattcagtgacgccattgatgaggtgatccgctttgcgcctgcgacgcgccagacgttattgttttcagcaacctggcctgaggccattgcggcgattagcggccgtgtacagcagcagccaatacgtattgaaatcgatacggtagatgcgctaccggctatcgaacaacagttcttcgaaacgtctgcgcatgaaaaaatttcgctgctacaaacgttgcttagccagcatcagccagcgtcctgcgtggtgttttgcaataccaaaaaagattgtcaggccgtttgtgatgcgcttaatgcggtgggacaaagcgcgttggcgctccacggcgatctggaacaacgcgaccgcgaccagacgttggtgcgttttgcaaatggtagtgcgcgcattctggttgccaccgacgttgccgcgcgaggattagacattaaatcgctcgaactggtggttaactatgaactggcctgggacccggaggtgcatgtccaccgtattgccgtacggcgcgcgcgggaagcagcggcctggcgatcagtttctgcgcgccggaagaggcgcagcgggcgaatattctttcagaaatgctgcaactcaagctgaactggctgaatgcgcccgcccggcagccgttactccctctggccgcagagatggctaccctatgcattgacggcggcaaaaaagcgaaaatgcgtccgggagatattttgggcgcgctgaccggcgatattggattagacggggcggatatcggcaaaattaacgtgcatccaatgcacgtttacgtcgccgtacgtcaagcagtagcgcaaaaagcctggaagcagttgcaaaacgggaagatcaaaggcaagtcatgccgggtacggctattaaaatga

SEQ ID NO: 36913 - DNA, 517 bp, Salmonella paratyphi A
gcaattgccccggtaataaccattgatggcccaagcggtgcaggtaaaggcaccttgtgcaaagcaatggcggaagcattgcaatggcatctgctggattccggcgcgatataccgcgtactggcgctggcggcattgcatcaccatgtcgatctcgcctctgaagatgcgctggtgccgctggcgtcccatctggacgtgcgtttcgtctcaacggacggcaacctggaagttatcctggaaggcgaggacgttagcggcgaaatccgtacgcaggaagtcgcgaacgcggcatcccaggtggcggcattcccacgcgtgctgaagcgcttcttcgccgccaacgcgcattccgcgaagcgcctggtttaatcgccgatggacgcgatatggggaccgtggtcttcacggattcaccggtaaaaattttccttgacgcctcctcggaggaacgtgcgcatcgacgtatgctacaggtgcaggagaatggctttagtgttaactctgaacacctctt

SEQ ID NO: 36914 - DNA, 656 bp, Salmonella paratyphi A
gaacttattgagacgaccagttactggcacctgctcggtgaaggcacccataccgttaatggcaaaacggttgtcgtgaatctgcgtgctggaagaaaaaactgtatctgtgcctgatgagcgtgaagctggaagcatccgcttctacgtcagcttcgcctgctctttcgcatttgccgagcgtgaactgatggaaggcaacgcaaaattatccgtctgatcgcccgtgacgaagctctgcatctgaccggcacgcaacatatgctgaacctgttgcgtacggcgtggacgacccggagatggcggaaatcgccgaagagtgtaaacaggaatgttatgacctgttcgtgcaggcggcgcagcaggaaaaagagtgggcggactatctgttccgcgacggttcgatgatcggcctgaataaagatatcctgtgtcaatacgttgaatatattactaatattcgtatgcaggcggtagggctagatctgccgttccagacccgctccaacccaatcccgtggatcaatacctggctggtgtccgataacgttcaggtcgcgccacaggaagtggaagttagctcttatctggtcggacaaatcgattcggaagtcgataccgacgatctgagtaatttccagctctgatgggacgcg

SEQ ID NO: 36915 - DNA, 965 bp, Salmonella paratyphi A
gtgagactccccgccttttatcgttggctgcttttagtggttggtttatcaatttcaggaatatccttagcccaggacgccggttggccccggcaaatccaggacagccgcggcgttcatactctggaccacaaacccgcgcgtatcgtctctaccagcgtgacgttaacaggctcgctgctggcgattgatgcgcccgtcgtcgccagcggggctactacgccgaataaccgctttgctgacgatcaagggtttatgcgccagtggagtgacgtagcaaaggctcgccatgtcgcccggctgtacatcggcgaaccgaatgccgaaacggtcgccgcgcaaatgccggatctcattttgattagcgcaccggcggcgactccgcgctggcgctttacgatcagctctccgctatcgcgccgacgctcgtcatcaattatgacgataaaagctggcagagtttgctcacgcagcttggcgagatcaccggccaggagaaacaggccgccgcgcgaatagcggaatttgaggcgcaactgacgacggttaaacagcgaatcgccctgccgcccgcagccggttagcgcgctggtgtatactcctgccgcgcatagcgaatctgtggacgccagaatcaacacaaggcaagctattgacgcaggtaggctttacgctggcgacattgcccaagggctgcaaaccagcaaaagccagggtaagcgccacgatatcattcagcttggcggtgaaaatctggccgccgggttaaacggcgaatctcttttcctgtttgccggcgacaacaacgatgtccggccctttacgccaatccactgctggcgcacctgccagcagtgcaaaataagcgcgtctatgccctgggtacggagacgttccgtctggattattacagcgcaacgttgctgcttaaccggctagccgccctgttttagccttatcggagt

SEQ ID NO: 36916 - DNA, 931 bp, Salmonella paratyphi A
  misc_feature (769)..(769): n=g, a, t or c
gtgcggcgcgttattactactggccgccgatgcgtgcgcgcagcaactgtttatgccttatcagcttccagtgggcgtggtcaccgtcagcctcggcggtatttaccttatcgtcttgttaattcaggagtcccgcaaaaaatgaccgaatccgtagcccgtttgcgcggcgaccagttaacgctgggttatggcagctataccgtcgcaaaaaaccttaatgtttcgattccggacggccattttaccgccatcatcggccctaacggctgcggcaagtcaacgttgctacgcacgctaagccgtctgatgacgcctgttgacggccatgtctggctggatggcgaacagatacagcattacgccagtaaagaggtggcgcggcgcatcggattgctggcgcaaaacgccactacgccgggcgatatcaccgtacaagagctggtcgccagagggcgttatccgcatcagccgttatttacccgctggcgtaaggaagatgccgatgccgtcgccagtgccatgcgtgcaacaggtatcacctcactggcggcgcaaagcgtagatactctgtccggcggccaacgtcagcgggcgtggatagccatggtgctggcgcaggaaacgtccatcatgctgctggatgagccgacaacgtggctggatattagccatcaaattgatttgttggaattgttaagcgatctcaaccgcgaaaaaggctatacgctagccgccgtcctgcacgacctgaatcaggcctgccgantacgccacacatttgattgcattacgcgaaggtaacattgtcgcacagggcgcgccgaaagagattgttaccgctgagcttatcgaaaaaatctatgggctgcgctgtatgattatcgacgatccggttgccgggacgccgctggtggtaccgctgggggcg

SEQ ID NO: 36917 - DNA, 1371 bp, Salmonella paratyphi A
gtgcttcataatattcatgtgtataaaaaattatattctcacatgaacacttggttcttatttatggacaggcgaaggtttatgaaaacatccaattttcaaaaatggttgatggtcattcttctggcaatcggaggagggaccatttttaaatcgatgtacctcagggaagtattttattacccctggaatgaattcatgggagtgaataacacggattcaggcctgctgatgagttggctggggtttgtggggattgtttcatcttcaattgctggggtgattatcgataaggtgaacaatacccgactgattatttcttttacctttctggctgtgggcgtaaccacattatggcagtcaacagcaccgggtctggctacgcagtatgtcatcatcggcatactatctttcctcgcaaatggtcttttcctagtatcgatggtgcgcgcaacccgcctgattggtaatgccagtgaccaggggaagctgtttggtttcctggagtccggacgtggtatcgctgggtcagccatctctgccgttgccgtagcatggttcgccatgtctgcaaccgaagtggaagggattggcagtgtgctacatgcatacggctttctctacctggcgctgggtgttctgatgtggttcgccatgccccgtgataaccataattctgcttccggagaagaaaaggccaaagaaaaaatatctgtacacgatattctggctgtcatgaaggttaaggaagtctggtttgcagctttctccatctttgcaaccatctccttctatcaggggtcctcatatctggttccttatctgtctgatgtctacggaatgaccgccgaacatgccggaattatcggtatgatccgtgcttatgtcctcgctatcctgattgcaccggttgtgggtctgctcgcagacaaagtcggctcagcgattaaggtgatgaattggctgtttattgccggggtgattggtgtcgccatgttcctggtgatcccacaggatccggctatggtatgggtcctgatcggcaccctgatgattgtaggctccattaactttgctctgcgcgggatcatgtatgcgcaaattgaggaaatgaaggttcctgttcgtctgaccggtaccgttatggggatcatggccactgtgggattctctccggaaatgtttatccatgcgttattcgggtactggcttgatgcatataaagtacagggttacacctacatgtttatcttcatgggtgccatgtttgctctcgctgtattcacttcacttttacttctccgcaatgccaaaacggcatttaagaaaatggatggtaaaccggcagatactttccggactgcggctgaa

SEQ ID NO: 36918 - DNA, 1283 bp, Salmonella paratyphi A
agttctgtcaaaaagatcgggctatttgcctgtactggcgtcgttgccggtaatatgatggggagcgggattgcattattacccgccaaccttgccagtattggtggcattgcatctggggctgggtaatttctattattggggcaatgtcgctggcttatgtttatgcgaggctggcaaccaaaaacccgcaacagggtggccctatcgcttatgctggggaaatatctccggcgtttggtttccagaccggcgttctttattatcacgcaaactggattggtaacttagccatcggtattaccgcggtttcttatctttctacgttcttcccggcattaaataatccaataccggcagtattgcctgtattgctatcgtctggctgttcacctttattaatatgctgggcggggctgggtcagccgcttgacaacgattggcctgtttctggtgctgatcccggtagtcttgaccgcagtcgccggctggcattggttcgatatcgcgacctatcacgcgaactggaacacgtctacgacgaccgactctcacgccattgttaaaagtattctgctctgcctgtgggcgttcgttggcgttgagtctgccgccgtcagcaccggcatggtgaaaaacccgaaacgcaccgtaccgctggcaaccatgctgggtaccgcgctggcaggcatcatctatatcgccgcgactcaggttatcgccgggatgttcccagcttccgttatggcctcttccggcgcgccgttcgctatcagtacctccacgattctgggtggctgggctgcgccgctggtttccgcctttaccgctttcgcctgcctgacgtctctgggctcctggatgatgctggtcggccaggctggggttcgcccgccaacgacggcaacttcccgaaaatttacggtgaaatggataaaaacggtattccgaaaaaaggtctgctgttggctgcggtgaaaatgacggcgctgatgattctgatcaccatcatgaactccagcggcggtaaagcgtccgacctgttcggcgaactgaccgggattgccgtactgcttaccatgctgccgtacttctactcttgtgttgacctgattcgtttcgaagggttcaacatccgtaactcggtaagcctgatttgttctgtactggcgtgcgcattttgcttcatcgcactgatgggcgccagctccttcgaactctccggcacctttatcgtcagtctgatcatcctgatgttctacggtcgcaaaatgcaccagcgc

SEQ ID NO: 36919 - DNA, 1091 bp, Salmonella paratyphi A
atgggattcaaatgcggtatcgtcggtctgcccaacgtcgggaaatccaccctgttcaacgcgctgacaaaagccggtattgaagcggcaaactttccgttctgcactatcgaaccgaataccggtgtcgtgccgatgcccgatccgcgtctggaccagttggctgagattgttaaaccgcaacgcattctaccaaccacgatggagttcgtggatatcgccggtctggtaaaaggcgcatccaaaggcgaagggttgggtaaccagttcctgaccaatatccgtgaaaccgaagctatcggtcacgtggtccgctgctttgagaacgacaatatcatccatgtggcgggtaaagtaaacccggcagaagatattgatgttatcaataccgaactggcgctggctgacctcgatacctgcgagcgcgctatccatcgcgtacagaagaaagccaaaggcggcgataaagacgccaaagcggaactggccgcgctggaaaaatgcctgccgcacctggccgaagcggggatgctgcgttcgctggacctgacggacgaagataaagcggctatccgttatttaagcttcctgacgctgaagccgacaatgtatatcgctaacgtcaatgaagacggttttgaaaataacccgtatctggaccaggttcgcgaaatcgccgccaaagaaggttcggtcgtggttccggtgtgtgccgccgtcgaagctgatattactgagctggaggatgacgagcgcgacgaatttatggctgaactgggtctggaagagccggggctgaaccgcgttattcgcgcaggttatcgtctgctgaacctccagacctatttcaccgccggggtgaaagaggttcgcgcatggaccattccggttggcgcaaccgcccgcaggcagcaggtaaaatccataccgacttcgaaaaaggctttatccgcgcccaaactatcgcctttgacgactttattacctataaaggtgaacaaggcgcgaaagaagccggtaagatgcgagcggaaggcaaagattacatcgttaaagatggcgatataatgaacttcctgttcaacgtctaa

SEQ ID NO: 36920 - DNA, 441 bp, Salmonella paratyphi A
atgctgggaacctggttatctgacgcaaccatcacgctacaggagagcgtggaaacgtggccgcaggcgctggaaatttgcggcaaacccctgctggacgcaggtgttatcgcaccggaatacattacggcgattgttcagcagcaccaaaagcttgggccatattatgtattagcgccagggttagcgatgccgcatgcgaggccggaagagggggcgaaagggttaggtttatcgttactgaaactacagcgcggcgtttcatttggcgcagacgaattcgatccggttgacatcattattatgctggcggcgcctgataagcacagtcatatcgaaatgatatcggcgctggcggaattattttccagtgatgtagatatggaaaaattacatcaggcaaaaaacctggaggacattaaaaagattattgaccgtttc

SEQ ID NO: 36921 - DNA, 1261 bp, Salmonella paratyphi A
ctgaattttgttgttgatattttaaaagtgccctcggtgcttgtagggttaattgcgctgattggtctggtggcgcagaaaaaagcgttttccgatgtggtgaaaggcacgattaaaaccattttaggttttattgtgcttggcggcggcgcaaccgtactggtgggttcattaaacccgctagggggtatgtttgaacacgcttttaatattcagggtattattcctaataatgaagcgatagtctcaatcgcgctggaaaaatatggcgcgtccacggcgttaattatggcatttggtatggtggccaatattgtcgtggcgcgctttacgcgtcttaaatatatctttttgaccgggcatcacaccttttacatggcctgtatgattggcgtaatcctgaccgtggcggggtttgagggcgtagggctggtcttcaccggatcgctaatcctggggctggtgatggccttcttcccggcgttggcccaacgttatatgaggcggattaccggtaccgatgacattgcgtttggtcacttcggtaccctgggatatgtgctttccggctggattggcagcctgtgtggtaaaggctcccgctccacggaagagatgaacctgccgaaaaacctcagttttttacgcgacagttctatctcgatttcgctgaccatgatgattatctatctgatcatggcagtcagcgcagggcgtgagtatgtcgaagcgacgtttagcggcgggcaaaactatctggtgtacgccattatcatggcaatcaccttcgccgccggtgattcatcattctgcaaggcgtccgtctgattctggcggaaattgttccggcctttaccggcttttcagaaaaactggtgccaaacgcgcgtccggcgctgactgcccggtggtgtatccctatgcccctaacgcggtactgattggcttcctgttcagttttctcggcgggctggtggggctgttcctgcttggacagatgaagcttgtgttaatcctgcctggcgttgtgccgcacttctttaccggcgcgaccgcaggcgtctttggcaatgccaccggcggtcgccgcggggcgatgatcggcgcatttgctaatggtctattaatcactttcctgccagtgctgttactgccggttctcggcgcgatcggcttcgccaataccacgttctcggatgctgactttggcgtaatcggtattttgctgggcaacctggcgcgttatctgtcgcgatggcta

SEQ ID NO: 36922 - DNA, 906 bp, Salmonella paratyphi A
atgcgcaaagtttatgccggttttgtcgccgggcagattgaggccggaagcccaattattgcgcttgaggctgatttaatgagctcgatggcgatggacagcgtggcgcgtgactacccgcagcatgtcattaactgcggtattatggaggcgaatgtgattggcacggcggcgggactggcgctgaccggtcgcaaaccgtttgtgcatacctttaccgcttttgccagccgtcgctgttttgatcagctctttatggcgctggattatcagcgtaacaacgtcaaagtgatcgcctccgatgccggagtgacggcgtgccataacggcggcactcatatgtcttttgaagatatggggattgttcgcgggctggcgcactctgtagtactggaggtgacggatgcggtgatgttcgcgaatattttacgccagctaatggacctggacggtttttactggctgcgtaccatccgtaagcaggcgacgagtatctatgcgccaggctctacctttaccattggcaagggcaacgtactgcgcgagggcgatgatattacacttatcgccaacggcattatggtggcggaggcgctggaggcgcgcgcaactggagcaggaaggcgtgacgctgcggtcattgatatgttcaccttaaagcctatcgatcgcatgttggtgaaaaactacgcggaaaaaacgcggcgtatcgtcacgtgtgaaaaccacagtatccataatggactagggtcagcggtaggacaggtgctggtggaaaactgcccggtgccgatgcgccgtgttggcgtcaaagagcgttatgggcaggtaggaacgcaggatttcttacaacaagagtacggactcaccgccgaagcgattgtagaagccgcgaaatcactgctt

SEQ ID NO: 36923 - DNA, 1491 bp, Salmonella paratyphi A
aaatgggcaatgcccgatacgctggtcatcatcttttttgtcgccattttaaccagtatcgccacctgggtcgtacccgttgggatgtttgatagccaggaagtgcagtatcaggtcgatggtcagacaaaaacccgcaaagtcgtcgacccgcactcttttcgcattgtgaccaatgaggccggggaagcgcagtatcatcgcgtacaatttttcactaccggcgatgaaagaccagggctgatgaattttccgtttgaagggttaacatccggatcgaaattcggcactgccgtcggcatcattatgtttatgttggtgattggcggcgcattcggcatcgtgatgcgtaccggcaccgtggataacggcattctggcgcttattcgccacacgcggggcaacgaagtcctgtttattccggtgctatttgtcctcttttcgttagggggcgccgtatttggcatgggcaaaaacgcggtcgcctttgcaattatcatagccccgctgatggtcaggctgagctatgacagcattaccaccgtcctggtgacctatatcgccacccaaattgctttgccagttcgtggatgaaccctttctgcgtagtcgtcgcccaggggatcgccggcgtgccggtactttccggctccgggctgcgtattgtggtctggattgtcgccacgctgattgggctggtttttacgctggtctacgcctcacgcgtgaaaaagaatccgctgctgtcccgcgtccacgaatccgatcgctatttccgcgaacagcaggatgaagtcgtccagcgccctatcacttcgcgactggctggtgctgctggtcctgaccggcgtaatgatttgggtcgtctggggcgtgattgtccacgcctggtttattccggagatcgccagccagtttttcaccatgggcgtggtgatcggcctcatcggcgttatcttccgcctcaacggtatgacggtcaacgtgatggcgtcctcattcaccgaaggggcgaggatgatgatcgcgcccgccttgctggtgggttttgccaaaggcattctgctgctggtcggcaacggcgaagccggggaacccagcgtgctcaatacgttgcttaacagtatcgcgcatggcatcagcgggcttaataatgctatcgccgcctggtttatgctgctcttccaggcggtatttaatttctttgtcacgtccggttcgggccaggcggcgttaaccatgccattactggcgccgctcggcgatctggtcggcgttaaccgtcaggtgactgttctggccttccagtttggcgatggcttcagccatattatctatccgacatcggcttcgctgatggccacgctgggcgtgtgccgggtcgattttcgcaactggctgaaagtgggggcgtcgctgctgggactattgtttattatgtccagcgtggtcgtcattggcgcgcagatgatgggatatcattgatccaaa

SEQ ID NO: 36924 - DNA, 1350 bp, Salmonella paratyphi A
caaaccgttttagcgaaaatcgtcgcagacaaggcgatttgggtagaagcccgcaaacagcaacagccgctggccagctttcaaaatgagatccagccaagtacacgccatttttatgatcgctccagggcgcgtaccgcctttattctggagtgtaagaaagcatcgccatcaaaaggcgtgattcgcgatgatttcgatccggcgcgtattgccaatatttatcaacattacgcctcggcaatctcggtgctcaccgacgaaaaatattttcagggtagcttcgattttctgccgatcgttagccaaagcgcgccgcagccgattctgtgtaaggattttattatcgatccctatcagatctaccttgcccgttactatcaggccgatgcctgtttactgatgctctcggttctggatgacgaacagtatcgccagctctccgccgtcgcgcacagtctgaaaatgggcgtgctcacggaggtcagtaatgacgaagaacgggagcgcgcgatagcgttaggcgcaaaagtggtaggtatcaacaatcgcgatctgcgcgatctgtcgattgatttgaatcgcacccgccagctggcccaaaactgggccacggcgtgactgtcatcagcgagtccgggattaacacctatggtcaggtacgcgaactgagccacttcgccaacggttttttaattggctcggcgttaatggcgcatgacgatcttaacgccgccgtccgtcgcgtgctgcttggcgagaataaagtctgcggcctaacccgcgcccaggacgccaaagctgcctgtgacgctggcgcaatatatggcgggttgatttttgtgccctcatctccgcgcgcggttagcgttgagcaggcgcgagaagtgataagcggcgcgccattgcagtatgtcggcgttttccagaacgctgatatcgccgatgtttgccagaaagccgccgtcctggcgctttctgccgtacagctacatggcagcgaagaccaggcgtatgtcaacgcgctgcgcgaggcgttgcccaaacaggtgcaaatctggaaggcgctgagcgttagcgatgcccttcccgcacgcgattatcaccatgtcgataaatacattttcgacaatgggcaaggcggcagcgggcagcgcttcgactggtcactgctacaggggcaaccgctggataatgtgttactggcgggcgggctggcggccgataactgcgtccaggcggcgcaagctgcgctgtgccggtctcgattttaattcaggtgtggagtcacagccgggcatcaaagatgctcgtcttctggcctcggtttttcagacactgcgcgcatag

SEQ ID NO: 36925 - DNA, 1568 bp, Salmonella paratyphi A
  misc_feature (347)..(347): n=g, a, t or c
aacatcgactcgtttacctggaacctggcagatcagctacggaccaacggtcataacgtggtgatttaccgtaaccatattccggcgcagacgcttatcgatcgcctggcgacaatggaaaatccggtgctaatgctctcccccggtccgggcgttcccagcgaggcaggctgtatgccggagctgctgacccgactacgcgcaagttgcgatcatcggcatttgtctggggcatcaggcgattgtcgaagcttacggcggttatgtcggtcaggcgggagaaatcctgcatggcaaagctcacagcattgagcatgacggtcaggcgatgttacgagacatggaantaccgctcaccggtcgcgcgttatcattcgctggtcggcagtaatgttcctgccggctaaccattaacgcccatttcaacggcatggtgatggcggtactcatgatgcggatcgcgtttgcggttttcaatttcatcctgagtccatcctgacgacacagggcgcgcgtctactggagcaaacattagcccaggcgcgcaaaagctgggaaccgaccaacacccctacagccaattctggagaaactctatcaggcgcaaactctgacgcaacaagagagccatcagttgttttcggcggtcgtccgcgcgaacttaagcctgaacagctcgcgccgcgctggtgagcatgaaaattcgcgggagcatcccaatgaaattgccgcgccgccactggttgctggaaaatgccgccccgttcccgcgcccggagtatctgtttgcggatatcgttggtaccggcggcgatggcagtaacagtatcaatatttctaccgccagcgcctttgtcgcagcggcctgtggactgaaagtggcgaaacacggcaaccgtagcgtgtccagcaaatcggggtcatccgatctgctggcggcgttcggtattaatctggatatgaacgccgataaatcacgtcaggcgttagatgaactgggcgtctgtttcctgttcgcgccgaaatatcacaccggattccgtcacgcgatgccggttcgccaacagttaaaaacgcgaaccctgttcaacgtactcggcccgctgatcaacccggcgcatccgcctgggcgttgattggcgtctatagcccggaactggtgctgccgattgcggaaacttacgggtattaggctatcagcgcgcggcggtggtacatagcggcggcatggatgaggtttcgctccatgcgccgacgattgtcgcggagctacatgatggcgaaattaaaagctatcaactgacggcggaggattttggcctgacgccttaccatcaggatcagttggctggcgcacgccggaagaaaaccgtgacattctgacgcggttattacaaggtaaaggcgatgccgcgcatgaggccgccgtcgctcccaacgtggcgatgctgatgcgcctgcatggtcaggaagatctcaaggccaacgcgcaaaccgtgcttgatgttctgcgcaacggcaccgcatatgacagagtcaccgcactggcggcaagagggtaaataatg

SEQ ID NO: 36926 - DNA, 885 bp, Salmonella paratyphi A
ttgagcgacacgaattacgcagtgatttacgatctgcacagtcataccacggcgtccgatggactgttgacgccagaaacattagtacaccgtgcggtagagatgcgagtcggcacgctggcgattaccgatcatgacaccacagccgcgattcctgcggcaagagaagaaatttcacgttgcgggctggccctgaatcttattcccggcgtggagatttcaacggtctgggagaatcatgagattcacattgtgggtctgaatattgatattgcgcacccggcaatgcgcgattttctggcgcacagacacagcggcgtcaggcgcgtggtcggctcattgcggagcgtctggaaaaagctcatattcccggcgcgtgggaaggggcattgagactggccaatggcggcgcggtgacgcgcggccacttcgcccgctttctggtggagtgcggcaaagccgcgaccatggcggatgtttttaaaaaatatctcgcgcgtgggaaaaccggatatgttccgccgcagtggtgtacaatagaacaagctattgaagtcattcatcattctggcggtaaggcggtgttggcccacccgggacgctacgaccttagcgctaagtggctgaaaagattagtggcgcattttgccgaccatcacggtgacgcgatggaagtggcgcagtgccaacaatcgcccaatgaacgcacccaactggcgacgcttgccgtcagcatcatttatgggcatcgcttggatctgatttccatcagccctgcccgtggattgagttggggcgtaaactctggctgcccgctggcgttgaaggcgtatggcagacatgggaacagccgcaaatatcacagtgagggaagtatgagccagt

SEQ ID NO: 36927 - DNA, 731 bp, Salmonella paratyphi A
  misc_feature (8)..(8): n=g, a, t or c
atgagcgnaaagttacaaaaagtgctggcgcgcgctggccacggctctcgcgtaaatcgaatccattattgaagcgggacgtgtcagcgttgacggtaaaatcgccacgcttggcgatcgtgttgaagtcactcccggtttgaaaatccgtatcgacggtcacctgatttcggtgaaagagtcggcggaacaaatttgccgcgttctggcctattacaaaccagaaggtgaactgtgtacccgcaatgaccctgaagggcgaccaaccgtttttgatcgcttaccgaaactgcgcggcgcgcggtggattgcggtaggacgtctggatgtcaacacctgcgggctattgttatttaccaccgacggtgaactggcgaaccgcctgatgcaccctagtcgtgaagttgaacgtgaatatgccgtgcgcgtgttcggtcaggtggatgaatcgaaactgcgtgatttaagccgtggcgtacagttggaagatggtccggcggcatttaagaccattaaattcagcggcggcgaaggcattaaccagtggtataacgtgacgctgacggaagggcgcaaccgcgaagttcgccgactgtgggaagcggtaggcgttcaggtcagccgtctgatccgcgttcgttacggcgatatcccgctgccgaaaggcccgcggcggctggactgagctcgacctcgcgcaaacgaactatctgcgtggtctggtagagctc

SEQ ID NO: 36928 - DNA, 522 bp, Salmonella paratyphi A
tgccggcaagtggccgtaccgcatcgcgcgcaactatccccgtctggatggcgtcctgcacaatgccgggttactggcggaaatcgctccaatgagcgaacaagatcgccagatctggcagcatgtcatgcaggtgaatgttaacgccacctttatgctcacccagcggctgttacccgttattattgaagtccgcatcgcggctcgctgctctttacgtcatcaaggcgttggccgtccaggggacgccaactgggcgccctatgccacctcgaagtttgctactgaaggaatgatgcaggtgctggcggacgaataccagaaccgttctctgcgtgttaactgcattaacccgggcggcagcgcaccagtatgcgccagcgcctttccgacggaagatccacagaaattaaaaacgcctgccgatattatgccgctttacctgtggcttatgggcgacagtcgccgtaaaaccggtatgacctttgacgcccaaccgggccgtaaaccaggaatcgccca

SEQ ID NO: 36929 - DNA, 758 bp, Salmonella paratyphi A
aaacatgacgtgcacagcgtcttcagcagcgtgtcacggctattatgcgttatgccgtacagaacgattatatcgactctaatccagccagtgacatggccggtgcgttatcgacaaccaaagcacgacactatccagctttaccctctagccggttccctgagttccttgcacgtcttgctgcatatcgtggccgtgtaatgacgcggatcgcggtcgaactttccttactaacttttgtgcgttcaagtgagttacgtttcgcgcgttgggatgaattcgactttgataaatctctttggcgcattccggcaaaaagagaagagattaaaggcgtgcgttactcctaccgtgggatgaagatgaaagaggagcatattgttccgcttagtcggcaggcgatgattttattagagcagcttaagcagattagtggtgataaagagttactttttccaggagatcacgacgcaacaaaggtcatgagtgaaaatacggtgaatagtgctttacgggcaatgggatatgacactaaaactgaagtttgcgggcatggatttagaacgatggcgcgtggcgcattgggtgagtcggggttatggagcgaagatgcaatcgaacgtcaattaagtcattcagagcgtaatagcgtccgggcggcttatattcatacttctgaacatttggatgaaaggcgattaatggtccaatggtgggctgattatcttgatgcaaacaagattaaacctattagttca

SEQ ID NO: 36930 - DNA, 1285 bp, Salmonella paratyphi A
gcgttatccctactcaccattctgtatcatcacgttccttccgtgacgtccatgccggtttatctcggccagcttgatgcgttgctgcaaccgtatgttagaattctaacacaagatgcgatcgatattcgaataaaacgtttctggcgttatctcgacagaacgctgccagacgcctttatgcatgccaatattggccctgccgatacgcctgtcacacgagcgattttgcgcgctgatgccgagctaaagcaggtggcgcctaacctgacgtttatctacgatgcggaaattacgccggacgatctgctgctggaggtcgccaaaaacatttgtgaatgtagtaagccacacatttccaatggccctgtaaatgataaaattttcacaaaaggtcattatggcatcgtcagttgttataactcgctaccgcttgggcggcggacagtacgctggtacgtctcaacctgaaagccgtgagcagaacgcagtacgtctgtcgatgacttcttttcacgcacgctaccgcactactgccgacagcagatcgccatcattaattcacgatgtgaattcctctatgaaaagtcacatttctttgagaatagctttcttgtacaggaaggtttgatcgatccgaacgttttgcgccgatgttcggtatgtacgggctggcggacgtagaatctgctgtgcgaaaacgcgggcctgaaccgccgttatcgcaagaatgaaacggcaaacgagctgggctaccgtatcagtgcccaactggcggatttcgtcgaaaatacgcatgaagtatggctggaagcaacgggcgctgctccatgcccagtctggcatcagttccgatattggcactacgccggggcgcgtctgccgtatggaatgaaccggaccctatcacccatttgcaaaccgtcgcgccgcaccatgccttttatcatgccgggatcagcgacattctgacgctagaacgaaaccatcaagcgtaatccgcagcgttggtccagctttgtcttggcgcgttcaaagccgggatgcgggaatttaccgccaatgtcagcggcaacgatctggtgcgcgtcaccggttatatggtgcgcctgtcggatctggcgaaatttcgcgccgaacgcgcagcgacgaacaccacctggctgggagaagaagccgcaacgtaaatacccgcatcctggaacgacagccacgcggagtcagccatgcacaacagatgcgctttagtcagtagatcattgcgttttcctgcgtcgatgggcca

SEQ ID NO: 36931 - DNA, 1572 bp, Salmonella paratyphi A
gaggtggccaaacgccgcacttttgccatcatttctcacccggacgccggtaaaaccaccattaccgaaaaagtgttgctgttcggacaggcgattcagaccgccggtacggtaaaaggccgtggctccagccaacatgcaaaatctgactggatggagatggaaaaacagcgtggtatctccatcaccacctcggtgatgcagttcccgtatcacgactgtctggtgaacctgctggacaccccggggcacgaagacttctccgaagatacctaccgtaccctgacggcggtggactgctgtctgatggtgatcgacgccgcaaaaggcgttgaagacaggacccgcaagctgatggaagttacccgtctgcgcgatacgccaatcctgacctttatgaacaaactcgaccgtgacatccgcgacccgatggagctgctggatgaagtcgagaacgagctgaaaatcggctgcgcgccgatcacctggccgattggctgcggcaactgtttaagggcgtttatcacctttataaagatgaaacttatctgtatcagaccggtaaggggcacaccattcaggaagtgcgcatcgttaaagggctgaataacccggatctggacgccgccgtcggtgaagatctggcgcacgagctgcgcgacgagctggaactggtgcagggcgcgtctaacgagtttgatgaagagctgttcctggcaggggaaattaccccggtatttttcggcaccgcgctgggtaactttggcgttgaccatatgctggatggtttagtggcgtgggcgccgcccgatgccgcgtcaaaccgatacccgtacagtggaagcctcggaagagaaattcaccggttttgtctttaaaattcaggccaatatggacccgaaacaccgcgacgcgtggcgtttatgcgcgtggtttccggtaagtatgagaagggcatgaactacgccaggtcgtaccggcaaagatgtggtgatttccgacgcgttaacttttatggcgggcgaccgttcgcacgttgaagaagcgtacccgggcgatattttgggtctgcataaccacggcaccattcagatcggcgataccttcactcagggcgagatgatgaagtttaccggtatcccgaactttgcgccggaactgttccgtcgtattcgcctgaaagatccgctcaagcagaagcagctactgaaagggctggtgcagctttctgaagagggggcggttcaggtattccgtcccatctccaacaacgatctgattgtcggcgccgtgggcgttttgcagtttgacgttgttgtcgcgcgcctgaaaagcgaatacaacgttgaggcgatttatgaatccgtcaacgtggcgacggcacgctgggtggaaagcgccgatgcgaagaaattcgaagagttcaagcgtaagaatgaaacgcagctggcgctggatggtggcgacaacctcacctatatcgccccaacaatggttaacctgaacctgacccaggaacgttaccctgacgttcagttccgtaaaacgcgcgaacactgatccctttccggg

SEQ ID NO: 36932 - DNA, 672 bp, Salmonella paratyphi A
atgctcagtttgcacggggatgagctggctatcccttttgatttcattgctccgagcctggatgttatgctggaaaaccttaacaactcgctgttttattttattaacgccacgcctgattccgcgcagtggacgatttcgctcgctatctttatcgccaaagatgtcatcaacatcgtcccgctcttagccgtggtactctggctgtggggtccccgcgatcgggtctgcgcccagcgtcagctgatcgttaaaatcggcatcgcgctgattatcagtctggcggtctcctggacaatgggacaccttttcccgcacgaccgtccgtttgtcgatcatatcggctataacttcctgcatcatgccgccgatgactcgttccccagcgatcacagtacggtgatttttacctttgcgctggcgtttttgttctggcaccgcctctggtcaggcatcgtgatgatggcgatagccatgaccatcgcctggtcgcgcgtctatctcggcgtacactggccgttagatatgattggcgcgctgctggtagcgatgcttggctgcctgagcgcacagctgatctggcaatggtacggcgcgccgctctaccaggcgctgcaacgttgttaccgtttctgtttcgcattgcccattcgaaaaggctgggtacgtgac

SEQ ID NO: 36933 - DNA, 694 bp, Salmonella paratyphi A
atgcaaaagctcaagcagcaggtatttgacgctaacatggatttgccccgttatggactggtgacgtttacttggggcaacgtcagcgctatcgatcgcgaacgcgggctggtggtgattaagccaagcggtgtcgcctatgaaaccatgaaggtagatgacatggtggtggtggatatggatggcaaagtggtggagggacgttatcgtccctcttccgataacgctacccatctggcgctgtatcatcgctatccgtcgcttgcggcgtcgtacatacccattcaactcacgccacggcatgggctcaggcgtgatggctattccggcgctcggtaccacgcacgcgactattctttggcgatattccttgtaccaggcgttaagcgaagaagaagtgcagggcgagtacgagctgaacactggtaaggtgatcatcgaaacgctgggcgaggtggaaccgctgcatacgccaggcattgtcgtgtatcaacacgggccgttcgcctgggggaaagatgcgcacgatgcggtacataacgcggtggtcatggaggaagtggcgcgaatggcgtggattgcgcgcggtattaaccctggcctcaaccccatcgacgattatctgatgaacaagcacttcatgcgtaagcatggcccgaatgcgtattacgggcagaagtgaagtatgagctcc

SEQ ID NO: 36934 - DNA, 447 bp, Salmonella paratyphi A
atgcaagttattctgcttgataaagtagcaaacctgggtagcctgggtgatcaggttaacgttaaagcgggctatgctcgtaacttcttggtaccacagggtaaagctgttccggctaccaagaaaaacgttgaatacttcgaagcacgtcgcgctgaactggaagctaaactggctgacgttctggctgctgcaaatgcacgcgcagagaaaatcaacgccctggaaaccgttactatcgcgtctaaagcaggcgacgaaggtaaactgttcggttccatcggtactcgcgacatcgctgacgctgtgactgcagctggcgttgacgtggctaagagcgaagttcgtctgccgaacggcgttctgcgtaccactggcgaacacgaagtgaacttccaggttcacagcgaagtattcgcaaaagttatcatcaacgtggttgctgag

SEQ ID NO: 36935 - DNA, 225 bp, Salmonella paratyphi A
atggcacgttatttccgtcgtcgcaagttctgccgtttcaccgcggaaggcgttcaagagatcgactataaagatatcgctacgctgaaaaactacatcaccgaaagcggtaagattgtcccaagccgtatcaccggtacccgtgcaaaataccagcgtcagctgcgtcgcgctatcaaacgcgctcgctacctgtctctgctgccgtacactgatcgccatcag

SEQ ID NO: 36936 - DNA, 312 bp, Salmonella paratyphi A
atgaccaaccgtctggcgttgtccggcaccgtgtgcagggccccccttcgaaaggtcagtccatcaggaattccgcattgccagttcgtgcttgagcatcgttctgtgcaagaggaagccggctttcaccggcaggcgtggtgccaaatgcccgttattgttagcggacacgaaaaccaggccattactcacagtataacggtcggcagccgcataaccgttcaggggtttatctcttgccacaaggcaaagaacggtctgagcaaaatggttctgcatgccgagcagattgaattgatagattctggagac

SEQ ID NO: 36937 - DNA, 396 bp, Salmonella paratyphi A
atgcgtcattacgaaatcgtttttatggtccatcctgaccagagcgaacaggttccgggcatgatcgagcgttactctgccgccatcactggcagaaggcaagatccaccgtctggaagatggggccgccgtcagctggcttacccgatcaacaaactgcacaaagcgcactacgttctgatgaacttgaagcgccgcagaagtgatcgatgagctggaaactaccttccgcttcaacgatgccgttatccgcagcatggttatgcgtactaagcacgctgttaccgaagcatctccgatggttaaagcgaaagacgagcgccgtgagctcgcagtgatttcgctaacgaaaccgcagatgatgctgaagctggggattctgaagagtaatttctg

SEQ ID NO: 36938 - DNA, 1019 bp, Salmonella paratyphi A
  misc_feature (646)..(646): n=g, a, t or c
aatttaaccccgcaagatctcaaggcttatggtatcaacgacgtccaggatatcgtttacaatcccagctacgacaccctttatcaggaagaacttaatcctggtctggaaggctatgagcgtggcgtgttaactaacctgggcgctgttgccgttgataccggtatttttaccggtcgttcgcctaaggataagtatattgttcgcgacgacaccacgcgtgatacgctgtggtggtccgataagggtaaaggtaaaaacgataataagccgctttccaggaaacctggcaacacctgaaaggtctggtgaccatcagctttccggtaaacgcttattcattgttgatgcgttctgcgcgcaaatgccgatacgcgtctttccgtgcgctttattacggaagtcgcctgcaggacaccttcgttaaaaatatgttcattcgcccaacggacgaagagctggtaggcttcaaacctgactttattgtcatgaacggcgcgaagtgcaccaacccgcagtggaaagagcaagggctgaactcggaaaacttcgtggcgttcaacctgactgaacgtattcagcttattggcggcacctggtacggcggcgaaatgaaaaaagggatgttctcggtaatgaactaccnttgccgctcaaaggtatcgcctcaatgcactgttccgccaacgtgggtgaaaaaggcgatgtcgcggtcttcttcggcctattcggtaccggaaaaaccactctctccaccgacccgaaacgtcgtctgattggcgatgatgagcacggttgggatgacgacggcgtgttcaactttgaaggcgggcttacgccaaaaccatcaaactgtcgaaagaagcggagccagaaatttatcatgcgattcgccgtgatgcgttgctggaaaacgtcacctgcgcgaagacggcaccgttgatttcgacgatggttccaaaaccgaaaacacccgcgtctcttacccgatctatcaggggatcctctagagtcgatcc

SEQ ID NO: 36939 - DNA, 1704 bp, Salmonella paratyphi A
atggaaagtgtagcgctttcacgtactactcgctggggtatgttgctcaccggtttgctgcagggcgtcttgtgctacctgctgatggcctggctggtaccacaaaatagcgactggctgttctatggtatgcctgcgacgatagcattgtcgtcaatgctattgcttaccgtggtctcttttaaacagcgcgctctgtggggctggctggggctgacctttgtggtcgtgctggcaatgagcggctggctgaaatggcaggttgaggcggtggagaaatggcgcctggccgagctcctctggctgtatggtctccggcttgtgttgatggcgatgctggtattaccctggatgcaatatcagttacattcgcaaaccggttcggcgcgttatccccagttttatctgcggttatggcataacgtactgacattgtttatcgtcctggtcgccaacggactgttctggctggtgcttctgctctggagcgcgctattcaggctggtgggcatccgctttttcagcacccttttctttgaaactgaagcctttatttatgtgaccatcggcctgattacggcgctggcggtcattctcgcccgcaccagtccgcccttgtggcggcggtgcaaaagctgcgacgctgatcgcgacaggtttactgccggtggtgtcgctgctggccttgctgtttattgtgacgtaccctacgactgagcgatttctgcctgtttccgctgcgaggctgctataccacgctgacgctgattgcagctgctcctcgtggcgattgtcaacggaccgcgaaaggcgtattgccctatccgcgcgtactacgccattggattaagcgcctcgctgtggcttgaccccggatatatatggctgctggcgagactgggcgttaatggggtacgtattcagcaatacggctggacgccggatcgtctgtatggcgcgctgacggcgtctgtcttgctggtatggtccttcggttatctgatcggtctgttacgccgcggacgcgaccctggtgagtggcaaggcaaggtgatactgagcgtctctttgttgacgctggtgatattgctgttgctggcctcgcctgtacttgatgtctggcgtattagcgtcaacagccatatggcgcgttaccatagcggtaaaattactgcggatcagatcagcctgtatatgctggatcacagcggcaaacctggccaggaagcgctgaaatcgttgcgggatgacgaggcgtttacgcagaacagaaagcgcaatcgtgaactgatgacgtttttgcagagaaataaggtctctccgacggcggacgatttagcgcgggtggtgatgattgcgcccggtagccagaagccggatgccgcattttgggcgtttgtcaaagagcagagttattcggacgattcctgccttgaaccggatgcctgcgtgctggtgagtcaggatcttaacggcgacggtcagcctgagcaggtgctgtataactttattgttgccgagagtcaggtctacggcttaaaagaggggaaatggacgcagaaagcgttcgcccgattgccggacgggttttctaagacgcaactgttgcacgcgattgccgggcatcagttagactcagcccccaaagcctggcgcgatatcattgttgatggtcagcggttggatgtggattactacaacgag

SEQ ID NO: 36940 - DNA, 883 bp, Salmonella paratyphi A
atgattatgccgcaacatgaccaattacatcgttatctgtttgaaaactttgccgttcgcggcgagctggtgaccgtttcggaaaccttgcaacagatcctcgacaatcatacctacccgcagccggtgaaaaccgtactggccgaactgctggtcgccactagcctgctgaccgcaacgctgaagtttgccggtgacattacggtacagctccagggcgacgggccgttaagcctggcggtgatcaatggcaataatcagcagcagatgcgcggcgtggctcgcgttcagggcgacatccctgacaatgcggatctcaaaacgctggttggcaacggctatctggtgatcaccattacgccggaagagggtgaacgctatcagggcgtggtgggtctggaaggcgatactctggcggcgtgcctggaagattacttcctgcgctccgagcagttgccgacgcgcctgtttattcgtaccggcgatgtcgacggtaaaccggcggcaggtggaatgttgctccaggtgatgccagcacagaacgcgcaggcggaggatttcgaccatctggctatgttgacggaaaccattaaaagcgaagagctgctgacgttaccggcaaatgacgtgctgtggcgtttgtatcacgaagaagaagtcacgctctacgatccgcaagatgttgaattcaaatgcacctgttcacgcgaacgttgcgcgggcgctgaaaacattgccggatgaagaagtggacagcattctggcggaagaaggcgaaatcgatatgcactgcgattactgcggcaatcattacctgttcaatgcgatggatatcgcggagatccgtaacaacgcctctcctgccgatccacaggttcattaa

SEQ ID NO: 36941 - DNA, 397 bp, Salmonella paratyphi A
aaagaaaagtcctccgttgaggtcagactggataaatggctgtgggccgcgcgtttttataaaacccgcgcgctggcccgcgagatgattgaaggcggtaaggtgcattacaacggccagcgcagtaagccgagcaaaatcgtcgagctgaacgcaacccttaccctgcgtcagggaaatgacgaacggacggtgatcgttaaagccatcaccgaacagcgccgtccggccagcgaagccgccgctctgtatgaagagacggcggaaagcgtggaaaaacgcgaaaaaatggcaggcgcgcaagcttaacgccctgaccatgccgcatccggacaggcgaccggacaagaaagagcgccgcgacctgttacgatttaaacacggcgacagcgaataa

SEQ ID NO: 36942 - DNA, 728 bp, Salmonella paratyphi A
  misc_feature (34)..(34): n=g, a, t or c
  misc_feature (490)..(490): n=g, a, t or c
  misc_feature (503)..(503): n=g, a, t or c
gcggatttgggcgaaggttgcgcacgacagcaantgtattaacgctggtctcctccgccaatatcgccagtggttttcacgccggtgatgcgcaaaccatgctgacctgcgtgcgcgaggcatgaaaaaacggcgtggcgatcggcgcgcatcccagctttccggatcgggataattttgggcggacggcgatggttttgccgccggaaacgtatatgcccagacgctgtaccaaatcggcgcgctgggggcgattgttcaggcgcaaggcggcgtgatgcgccatgtcaaaccgcacggtatgctctataaccaggcggcgaaagatccccgtctggcacaggcgattgcgaaagcggtacacgactatgatccgtcactgatactggttggactggcgggaagcgagctgatccgggccggtgaacgctgtcgcctggtgacgcggcaggaggtgtttgccgatcgcggctatcaggccgacggtagntctggtgccgcgncatgcaacctggcgctctgattcacgacgaagagcaggcgctggcgaaacgctggacatggtgcaagccgggagagtgaaaagcgttactggcgtgtggacgactgtcacggcgcaaacggtgtgcattcatggcgacggcgagtatgcgcttgcattcgcacgcaggctacgcgccgcgttcaatgcgcgtaatatacacgttattgcctgaggcccgacgatt

SEQ ID NO: 36943 - DNA, 621 bp, Salmonella paratyphi A
atgtcaacgattattatggatttatgcagttacacccggctagggttaagcgggtatctggtcagcagaggggtgaaaaaaagggaaatcaacgacatcgaaaccgttgacgaactcgctatcgcttgtggcgcgcatcagccttcggtggtgtttattaatgaggactgttttattcatacgccttcagacagtcaacaaataaagcaaatcattaatcaacatcctgacacgttatttattgtttttatggcaattgctaatgtgcattttgatgaatatttattagtaagaaaaaacttattgattagctcaaaatcgattaaacctgactcgctggataccattcttggcgatattctgaaaaaagagtcgggtatttcaggaaccataaatttaccaacattatcgttaagtcgaactgaatccagcatgttgcgaatgtggatggaaggtcagggaaccattcagatttctgacagaatgaatattaaagcaaaaacagtatcctcccataaggggaatataaaaagaaagataaaaacgcataataaacaagtgatctatcacgtagtgcggctgacagataacgtcactaacggcatttttgttaacatgcgc

SEQ ID NO: 36944 - DNA, 785 bp, Salmonella paratyphi A
gtgattcctatgtccgaaactaaaaatgaattagaaatcttgctggagaaagcggcgactgagcccgcgcatcgtccggcattttttcgtaccttactggagtccaccgtctgggtgccgggcagcgctccgaaggcgaggcgattgtggaagacagcgctctggatttgcagcactgggaaaaagaagacggcacgaccgtcattcccttctttacttctctggaggcgctgcagcaggccgtggaagacgaacaggcgtttgtggtgatgccggcgcgcacgctgtttgaaatgacgcttggcgaaacgttattcctcaacgctaaattgccgaccggcaaagagtttatgccgcgtgaaatcagcctgcttctcgctgaggaaggcagtccgttaagtacgcaggaagtgctggaaggcggcgagtcgcttattttatccgaagtggccgagccgccgtcgcagatgattgattccctcactacgctgtttaaaaccatcaaaccggtgaaacgcgcatttctctgcgcgattaaagaacatgcggacgcccaacctaatctgctgattggcattgaggctgacggcgaaattgaagagatcattcacgcagcgggcaatgtggcgaccgacacgttaccgggtgacgaaccgatcgatatttgtcaggtgaggaagggcgcgcagggtatcagccactttatcaccgagcatatcgcgccgttctacgagcgtcgttggggtgggttcctgcgcgattttaaacagaaccgcatcatctga

SEQ ID NO: 36945 - DNA, 1469 bp, Salmonella paratyphi A
atgcaaaacaggcttttatcggcaaaggcgacgcttcctgattacgatcgcgcgggctggcggcgcggatggtccatctcggttttggcgcgtttcatcgcgcgcatcagggggtttacacagatattctggctgcggagcagcatagcgactggggctattatgaggttaatcttattggcggcgaacaacagattgccgatctaaagcagcaggataacctctataccgtggcggagatgtcggcagaagcctggacggcgcgtgtggtgggcgtcgtcaaagcggcgttgcatgttcaggttgatggtctggaacgtgtgctggcggcgatgtgcgaaccgcaaatagcgattgtgtctctgaccattaccgagaaagggtattgtcattcgccagccacgggccaacttctgctggaacatcccatgattgccgccgacctgcaaaatccgcatcaaccgctaacggcaccgggtattattgtcgaagcgttagcgcgtcgtaaagccgcaggcttaccggcattttaccgtgatgtcctgcgacaacatgccggaaaatgggcatgtgacgcgtcaggttgtgaacgacttacgcccgggaggtggatgcggaactggcgatatggatcgagcaaaacgtgacatttccgtcaaccatggttgatcggattgtccctgcggtcacgccggagacgctggataaaatcgaacaactgaccggcgtgcgcgatccggctggcgtcgcctgcgaaccgtttcgtcagtgggtgatagaagatacgtttgtggcgggtcgtccgctgtgggaaaacgcgggcgcgacgttggtcgccgacgtggttccgtttgaagagatgaaactgcgaatgcttaacggcagtcattcattcctggcttatctggggtatcttgccggctatcagcatattaatgactgcatggctgacgacaactatcgtctgaccgcgcaggcgttaatgttacgcgagcaggcgccaacgctgaaagtccagggggtagatttacagcgttatgccgatcagttgattgcgcgttaccgtaatccggcgctgcgtcatcgtacctggcagattgcgatggatggcagccagaaacttccgcagcgtatgctggactccgttcgctggcatcttgctaatcatagcgattttgatttgctggcgctgggcgtggcggggtggatgcgttacgttggcggcgtggatgagcagggcaaggccatcgacgtcagcgatccgctattgccggttattcagcgcgccgtggcaaacagtgaagaaggcgcaagtcgtgttaaggcgctgctgggactggcagacattttcggcaacgatttcgcaggcggcgcggtttacgcaaaaagtgcaagaagcctatgacagtttactgacatatggcgcgaaagcgagcgtggcgaaatatgccgagcggttgaaatagcgt

SEQ ID NO: 36946 - DNA, 503 bp, Salmonella paratyphi A
atgaccggtatgagtaatgtaagcaaactggccggcgagccgtcaggtcaggaattcctggtgtttacactgggaaatgaagagtacggcatcgatatcctgaaagtgcaggagatccgtggctatgaccaggtgacgcgcatcgccaatacaccggcctttataaaaggggtgaccaacctgcgcggcgtgattgtacccattgtcgatctgcgcgtgaaattctgcgaggcgacgtagagtacgatgacaatacggtagtgatcgtactgaatctggggcaacgcgtcgtcgggatagtggtagacggcgtgtctgacgtactgtcgttaacggcggaacagatccgtccggcgccagaatttgccgtgaccttgtcaacagaatatttgacgggattgggcgcgctcggcgagcgtatgctgattctggtgaatatcgaaaaactgcttaacagcgaagagatggcgctgctggatatcgcagcatcacacgtcgcgtaa

SEQ ID NO: 36947 - DNA, 1112 bp, Salmonella paratyphi A
ctgaatgattttcacgtttctgaaccttatacgcttggtattgagctggagatgcaggtgatcaatccacctggctacgatttaagtcaggactcttctacgctgatcgacgccgttaagccccaacttactgcgggagaaattaagcacgatatcaccgaaagtatgctggagatggccacgggcgtctgccgcgatattgaccaggcggcggccaactttctgccatgcagcacgttattttacaggcggcgtcggaacaccatctcggcatttgcggcggcggtacgacccttttcaaaaatggcagcgtcaggaggtctgtgataatgagcgctatcaacgcacgctggaaaatttcggctacttaattcaacaggcgacggttttcggccagcatgtccacgtcggctgcgcgaacggcgacgatgcgatttatcttttacacgggctgtcgcattttgtgccgcactttattgcgctctccgccgcgtccccctatatgcaaggagctgacacccgttttgcctgcgcgcgcctgaatattttttccgcttttcccgataacgggcccatgccgtgggtcagtaactggcaagagtttaccggactatttcgtcgcctgtcttacaccacgatgatcgacagcatcaaagatttgcactgggatatccgccccagcccggcctttggcacggtagaagttcgggtgatggatacgccgctcacccttgatcatgccatcaatatggcagggttgattcaggcgaccgcgcactggctgctgaccgagcgtccctttaaaccgcaggaacaagactatctgttatataaattcaaccgttttcaggcttgccgctatggtctggagagcgtgctaatcgatgtctataccggcgaccgccgtcgcctggcagatgatacgctgcgtctgctggataacgttaccctctcagcgcgcaagctgcgccgacagcgccattgacgcgctacgtctgcaggtgaaaaaaggcggtaacgaagcgcaatatatgcgggagtttattgccgacggcggatcgctgataggcctggtacaaaaacattgtgaaatctgggcgggacaatagaca

SEQ ID NO: 36948 - DNA, 1970 bp, Salmonella paratyphi A
atgttcggaaaattatcactggatgcagtaccgttccatgaacctatcgtcatggtaacgatcgctgcaattatcgtcgggggactggcgatactggcagcgattacttacttcggtaagtggacctacctatggaaagagtggttaacgtcggttgaccataaacgcctcggcatcatgtatatcatcgtcgcgattgtgatgctgttacgtggtttcgccgatgccatcatgatgcgtagccagcaggcgcttgcctcgcaggcgaagcgggttttctaccgccgcaccactacgatcagatctttacgctcacggcgtaatcatgatcttcttcgtgcgatgcccttcgttatcggtctgatgaacctggtggttccgctgcagatcggcgcgcgcgacgttgctttccctttcctgaacaacctgagcttctggttcaccgttgtcggcgttattctggttaacctctcgctgggcgtgggtgaattcgcgcagcacagggctggctgcttatccgccgctatcgggaatagagtacagtcccagcgtcggggtcgattactggatatgggcgttgcaactctcgggtattggtacgacgttaaccggtatcaacttcttcgtgacgatcctgaagatgcgtgcgccgggtatgacaatgttcaagatgccggtctttacctgggcctctttgtgcgccaacgtactgatcatcgcctctttcccgattctgacggttaccgtcgcgttgctgaccctggatcgctatctgggcacccatttctttaccaacgatatgggcggcaacatgatgatgtacatcaacctgatttgggcctggggccatccggaagtgtacattctgattctgccggtcttcggggtattctccgaaatcgcagcgaccttctcgcgtaaacgtctgttcggctatacctcgctggtttgggcgaccgtctgtattaccgtactgtcgtttatcgtttggctgcaccacttcttcacgatgggcgcgggcgcgaacgttaacgccttcttcggtatcaccaccatgattatcgccatcccgaccggggtgaagatcttcaactggttgttcaccatgtatcagggccgtatcgtcttccattccgcaatgatgtggaccatcggctttatcgtgaccttctcggtcggcggtatgaccggcgtgctgctggcggtaccgggcgcggacttcgtcctgcacaacagcctgttcctaattgcgcacttccataacgtgatcatcggcggcgtggtgtttggctgcttcgcaggtatgacttactggtggccgaacgcttggcttcaagctgaacgaaacctggggtaaacgcgccttctggttctggattatcggtttctttgtagcctttatgccgctgtacgtactgggcttcatgggcatgacccgtcgcctcagccagcaaattgatccgcagttccatacgatgctgatggttgccgccgccggcccggcgctgattgcgctgggtatcctgtgccaactgattcagatcttcgtttctattcgcgaccgcgatcagaaccgcgatctgaccggcgacccatggggtggccgtacgctggagtggtcaacctcttctccgccgccgttctataactttgccgttgtgccgcacgttcacgaacgtgacgccttctgggaaatgaaagaaaaaggcgaagcgtaccaacagcctggacagtatggagagattcatatgccgaaaaatagcggtgccggtattgttatcgccgccttcgcgacggtatttggcttcgccatgatctggcatatctggtggctggcgatagtgggtttcgcaggcatgatcatcagctggattgtaaaaagctttgatgaagatgtggattactacgtgccggtcccggaagtcgaaaaactggaaagccagcatttcgatgagattactaaggcaggg

SEQ ID NO: 36949 - DNA, 967 bp, Salmonella paratyphi A
atgagactcaggaaatacaataaaagtttgggatggttgtcattaattgcaggcactgcattactcagtggctgtaattctgcgctgctggatcccaaaggacagattggactggagcaacgttcgctgatactgacggcatttggcctgatgttgatcgtcgttattcccgccatcttgatggctgttggtttcgcctggaagtatcgtgcgagtaataaggatgcgaagtatagcccgaactggtcacactccaataaagtggaagccgtggtctggacggtgcctatcttgatcatcattttccttgccgtactgacctggaaaaccacgcacgcgcttgaaccaagcaagccgctgcgcatgacgaaaaaccgatcaccatcgaagtggtttccatggactggaaatggttcttcatctatccggagcagggtatcgccaccgtcaacgagatcgccttcccggcggacacgcgcttttattctcaagtgactaccaaaatccgtgtgcaagtccttcttgaatctgcggctgggtagccagaattactacatggctggtattttgacacgcctgcatttgatcgtcaaagtacccggaatccaagttggtatttccccagctatagcgcccgggtttctccggtatgatgtttataagttatttttatccacagaccgcgcagcattctgaccagtggtcgtttaaagtgtacatcatctccgacgcaccatgaatgatatgcgcggcgtgtcgacaaagtggctatgccaagcgagtacaacaaggtggaatatgtctccagcgtgaaaccagatttgttcaaggacgttattaacaaattcatggaccacggtaagagcatgacatgacccaacctgaaggtgagcacagctcgcatgaaggaatggaaggtatggacatgagccacgcggaatccgccaactccaagggttgaggaaga

SEQ ID NO: 36950 - DNA, 168 bp, Salmonella paratyphi A
  misc_feature (41)..(41): n=g, a, t or c
atgaataagcaaaccgaacacgatacccgcgaacatctgcntgccaccggcgagcagctttgtatgcaacggggttttaccggcatggggcttagcgagttgctcaaaaccgcccaggtgactaaagggtcgttttatcactactttcggggatcctctagagtcgaa

SEQ ID NO: 36951 - DNA, 998 bp, Salmonella paratyphi A
atgtcgttaaaaacaataaaatatttttctactctcattgtcgccgtcgtcgccgttctggccgcgtggtggttatggaattactatatgcagtcaccgtggacgcgcgatggtaaaatccgcgcggaacaggtcagcgtaacgccgcaggtttctggcagcattacccaactcaatatcaaagataatcagttcgtcaacgccggggacgttctctttgtcattgataaaacgcccttccatattgcagaacttaacgcgcaggcgcagttggccaaagcgcagtccgatctggcaaaagcgaataatgaagccgatcgacgtcgacatttatcgcgtaactacatctctgctgaagatctggatagcgccaatctgaatgttaaagcgatgcaggccagcgtagatgtcgcactggcaacgttaaaacaggcgcagtggcagcttagccaaacggaagtaaaagcgccggtatccggctgggtgaccaacctttccacgcgtaccggtgattatgccagcaccggtaagccacttttcgccctggtagatagccattcattttatgtaatgggatatttcgaagaaaccaaactacgccatatccgcgaaggtgagcctgcattaataacactgtatagtggcaatgttaagttacagggtcacgttggcagtatcgggcgcgctatttacgaccaaagcgtggaaagcgactccggtttagtgcccgatatcaaacccaacgtaccgtgggtacgtctgggcaacgcgtaccggtacgtatcgaatttgacgctttgccgcaggatatcacgctcgtctccggcactacctgcagcgtagccattggacagcggtaatgaaactctccctgccggccctgcgaaatacgccttggtttaaagcgactccggccagtggcgttacgcgttgcgcaataccattgccatgtgtctcgcgctgacattcgcttattatctcaatctggactgaaccta

SEQ ID NO: 36952 - DNA, 240 bp, Salmonella paratyphi A
ttgcttgtgaagtgtatactcaacgccacaggattgcccttacaagatctcatgttgggagcatctgtttactttccgccattctttaaagcctttgcgcttgggttcgttatctggttgtttattcaccgactcctgcgtgaccggatatactctgatgaaatctggcatcccctgttaatggatctctccctctttacgctttgcgtatgtctgggcctcgttttactgatcgcgtgg

SEQ ID NO: 36953 - DNA, 440 bp, Salmonella paratyphi A
gtgaaattggaatcgccactaggttctgatctggcacggttggtgcgcatttggcgtgctctgattgaccatcgcctcaagcctctggaattgacgcagacacattgggtcacgttgcacaatattcatcaattgccgcctgaccagtcgcagattcaattggctaaagcgataggcattgagcagccatcgctggtacgcacgttggatcaacttgaagataaggggctaatttcgcggcaaacctgcgccagcgatcgtcgcgctaagcggattaaactgaccgaaaaagcggcgcgctgatcgctgagatggaagaggtcattcataaaacgcgcggtgaaattttggctgggatttcttcagaggagattgagcttctgattaaacttgtcgctaaacttgaacacaacattatggaattgcactctcacgattga

SEQ ID NO: 36954 - DNA, 732 bp, Salmonella paratyphi A
atggtgaaatgtcgacgttatatttatactaatatgacgctaaacaatcagccttttgcttacaaagccacgggcggcgcattatttattagtgtgttgttagtttttattatttatattgttagcctctctcttattgaacacggtcatcccggtctcggttttacgctattcggcttattaattgcgattattccttttatggcggtgaaaggattacagtatcaggcgatgatgacttcgcttaatggcgtacattttggattccagtgttccatgcggcgcgcatggtggtacatgttcgctctcccggtactcctgatggtggcgctttatattgttctttacattatctcactggtaaccatcgccgtcggcggtttagtgttcaatatcgtttttctcggtttgctggctattattgggataggggtcattaacggtattacctacagcaaatggatgaccttgtttggcaatggcgcaaactttggcattcatcgtttctcgattcaggttaatgttaaaacgtgcatcagagggtgcgtgttggcaatgttgacccttttcccttttgctgtcgtgattggttatctaatcgcgccggtgttcaccgacatgattcttttgagtatgatggggaatgcgcaggcaggaggggcgcttatttctgcatattatggccagataatggcatgttatttcttctccgccggatttaatttggtgggt

SEQ ID NO: 36955 - DNA, 504 bp, Salmonella paratyphi A
atgaataatgtcgcctcgccaacgctcacggtgcgccgaatcactaccgccgacaatgccgctattgcccgtgtcatccgtcaggtttcagcggaatacggacttaccgccgataaaggttataccgttgccgaccccaatctggatgaactgtatcaggtttatagccaagcggcgcggcctactgggtggtagagcaaaacggttgtgtggtgggcggcgggcgtggcgccgttatcctgtagcgaaccagacatttgtgaactgcaaaaaatgtattttttaccggtgattcgtggccaggggctggcgaaaaagctggcgctgatggcgctggatcatgcccgtgaacagggttttaaacgctgctatctggaaacaacggcttttttacgcgaggcgattgcgctatacgaacgtttaggatttgaacatattagcgaaccgctcggctgcaccggacatgtcgattgcgaagtgaggatgttaaaggatctctgaaaa

SEQ ID NO: 36956 - DNA, 811 bp, Salmonella paratyphi A
atgacggtacggcagcgtctgctgtcgtatttttttaacaggttacgtatgaattacccgcaaatactctctccggtgcttaatttcctgcattgcccgacgccgcaggcgtggattgtccaggcccgcgatccgcaaaatcttcctcttctgcttaccgatcacctgatctgcgaactgaaggctgcgcaaaccgcgttgctgttagtgcgtaaatatgtcgccgataaatcgggcgccgacgcgctgctcgcctggctgcaaccttacgaggcgttcgcgtttcgtcaggggccggagccggattttgttgccctgcatagacagattagcaaaagcgccatgccgcaaactgatgacccctggggacgtcagcttattgaccgtatggtgttattgattaaagaggagttgcaccatttttggcaggtacgcgaggtcatgcaggccagaaacattccttatgtgaaaatcaccgccagccgctacgcgaaaggaatgttgaaagcggtacgcacgcacgaaccgctcaccttaattgataagctgatttgcggggcgtatatcgaagcccgctcctgcgaacgttttgccgctctggcgcccaggctggatgaggatttacagacgttttatctctcgcttctgcgctccgaagcgcggcattatcaggattacctggcgctggcgcagcagatttccgccgaggacatttctgcgcgtgcgctattttggcgaggtggaagctgaccttatcttgtcgccagaccgcgagtttcgttttcatagcggcgtgccagccgccggataa

SEQ ID NO: 36957 - DNA, 1002 bp, Salmonella paratyphi A
atgtctacgttttaccaaaaaccttttttaaagttacttgatttcaccgccagtgaactcactgctctgttgcagcttgccgccaaactgaaagccgataagaaaaacggtaaagaagaacaaaagctggtgggtaagaatattgcgctcatcttcgaaaaagactcgacccggacacgatgctctttcgaagttgccgcatacgatcagggggcgcgcgtgacgtacctgggttccagcgggagccagatcggccataaagagtccatcaaagatactgcccgcgtcctgggccggatgtttgacggtattcagtatcgaggatatggccaggagatcgtcgaaacgctggctgaatattccggtgtgccggtatggaacggtttaaccgatgagtatcacccaacgcaattactggcggatctgctcaccatgcaggaacatctgccgggtaaagcctttaacgagatgacgttggtctatgccggagacgcgcgtaataacatgggtaactccatgctggaagccgccgcgttaacaggattggatctccgtctggtcgcgccaaaagcctgctggccgcaagccgcgttagtggcggagtgcagcgccatggcgaaaaagaacggcggcgccatcaccctgaccgaagatatcgcctcgggcgtaaaaggcgcggattttatctataccgatgtttgggtctctatgggcgaacctaaagagaaatgggcggagcgtattgccctgctgcgtgattatcaggtcaacagccagatgatggccttaaccggcaatccgcaggttaagttcctgcattgtctgcctgcgttccatgatgacgaaaccacgctcggcaaaaaaatggccgaagagtacggtttacatggcgggatggaagtgaccgacgaggtttttgagtctgcggccagcattgtctttgatgaagcggaaaaccgaatgcataccatcaaagcggtaatggtagcgacgctgtctaaa

SEQ ID NO: 36958 - DNA, 1056 bp, Salmonella paratyphi A
  misc_feature (921)..(921): n=g, a, t or c
ggcagtgagatgaatgacaaaatccgcgttgggttaatcggttatggctacgccagtaaaacctttcatgcgcccttaattatgggaacgccagggttagagcttgcggcggtatccagcagcgatgaaacaaaagtgaaagcagactggccggcggtctccgtggtctctgagccccgacatttatttaacgatccgcatatcgacctgatcgtgatcccgacgcccaacgatacccatttcccgctggcgaaacgtgcgctggaagccggtaagcatgtggtggttgataaaccctttaccgtgacactgtcacaggcgcgagaattggatgcttgcgcggagcactggtcgggtactttccgtcttccacaaccgacgctgggacagcgattttttgacgctgaaggccttgctggcggatggcgtgctcggcgaggtgtccttgtttgaatcccactttgatcgcttccgtccccaggtgcgcgacgtggcgcgagcaaggcgggccgggaagtggtatctggtacgatctggcgccgcacttgttggatcaggccattcaactttttggctgccggtcagcatgacggtggatttagcgcaactgcgtccgggcgcgcaatctacagattatttccacgcgattttatcctacccccagcgccgcgtgattttgcacggtacgatgctggccgcggcggaatccgcgcgatacatcgttcatggttcgcgcggtagctatgttaaatatggcctcgatccccaggaagaacggttaaaaaacggcgagcgtttaccgcaggaagactggggatacgacatgcgtgacggcgtattgaccctggttgagggagagacgcgcaaagaagagaactggcttacgttgccgggtaactatccggcatattatgccgccantcgcgatgcgttaaacggtaacggtgaaaatcctgtgccgcaagccaggcgattcaaattatggagttgattgaactgggcatggaatcggcaaaacatcgcgcgacgctgtgtcttgcctgagatgtcgcattt

SEQ ID NO: 36959 - DNA, 2214 bp, Salmonella paratyphi A
atgctcaatcaagaactggaactcagtttaaacatggctttcgccagagcgcgcgagcaccgtcatgagtttatgaccgtcgagcatctgttgctggcgctgctcagcaacccatcggctcgcgaagcgctggaagcatgctccgtggatctggtggcgctccgtcaggaactcgaagccttcattgaacaaaccacacccgtactgcctgccagtgaagaagagcgtgatacgcagccgacgttaagtttccagcgtgtcctgcaacgtgccgtcttccatgttcagtcttccgggcgtagtgaagtgactggcgctaatgtgctggtggctatctttagcgaacaggaatcacaagcggcttatctgctgcgcaagcatgaagtgagccgtctggatatcgtgaactttatttctcacgggacgcgaaaagacgaaccgagccaatcttccgatctcggcaatcagccaactggcgacgaacaagctggcggggaggaacgtatggaaaacttcacgacgaatcttaaccaacttgctcgcgtgggtggcatcgatccgctgattggtcgtgaaaaagaactggaacgcgcgatccaggtcttgtgtcgtcgccgtaaaaataacccgctgctggtgggggaatccggcgtcggtaaaacggcgattgccgaagggctggcctggcgtatcgctgcagggcgatgtgccggaagtgatggccgattgcaccatttactctctggatatcggttcgctgctgggggcaccaaataccgcggcgattttgaaaaacggtttaaggcgttgctgaaacagcttgagcaggataccaacagcatcctgtttatcgatgaaatcataccattatcggcgctggcgcggcgtcgggtggacaggtggatgcggcaaatctgattaaaccgctgctttccagcggcaagatccgggtgatcggctcaacgacctatcaggaattcagcaatatttttgagaaagaccgcgcattagcgcgccgtttccagaaaattgatattaccgagccttcggtggaagagacggtgcaaattatcaacggcttgaaacctaagtacgaagcgcaccacgacgtgcgttaataccgcgaaagcggtgcgtgcggcggtcgagctggcggtaaaatatatcaatgaccgccatctgccggataaagccattgacgtgattgacgaagcgggcgctcgggcgcgtctgatgccggtgagcaaacgtaagaaaacggtcaacgtggcggatattgagtccgtagtggcgcgaattgcgcgaattcctgaaaagagcgtctcgcagagcgatcgtgatacgctgaagaacctgggcgatcgtctgaaaatgctggtcttcggccaggataacgcgattgaggcgctgaccgaagctattaagatgagtcgtgcgggcctgggccatgagcataaacctgtcggctcattcttgttcgccggcccaactggcgtagggaaaactgaagttacggtacagctttcaaaagcgctgggtattgagctgttgcgttttgatatgtccgaatatatggagcgtcatacggtgagccgtctgatcggcgcgcctccgggatacgtcggtttcgaccagggcgggctgctgacggatgcggtgattaagcatcctcatgcggtgctgttgctggatgagatcgaaaaagcgcacccggatgtctttaacctgctgctgcaggtgatggataacggtacgctgaccgataacaacggccaagcggatttccgcaacgtggtgctggtgatgaccaccaacgccggcgtgcgagaaaccgaacgtaaatctattggtcttattcatcaggacaacagtaccgatgcgatgggcgagatcaagaaagtgtttacgccggagttccgtaaccgtctcgacaacattatttggttcgatcatctgtctggcgaggtgattcatcaggttgtcgataagtttatcgtcgagttgcaggctcagttggatcagaaaggcgtctccctggaagtcagtcaggaagcgcgcgactggctggcggaaaagggctatgaccgggcgatgggcgcacgaccaatggcacgtgtgattcaggataacctgaaaaaaccgctggccaatgagttgctgtttggatcgctggttgatggcggacaggtcaccgtcgcgctggataaagagaaa

SEQ ID NO: 36960 - DNA, 1044 bp, Salmonella paratyphi A
atgacactaaatgggaaatctccagtgaagttcgtaaagtatttattgatccttgcagtatgttgcatcctgctgggagcaggctcgatttatggcctttatcgctatattgagccacagctacctgacgtcgcgacattgaaagatgtgcgtttgcaaattccgatgcaggtttacagcgcggatggcgaacttatcgcgcaatatggcgaaaaacgccgtattcccgttacgctcgatcaaattccgccggaaatgatcaacgcctttatcgccaccgaagatagccgcttttatgagcatcacggcattgacccggtagtattttccgtgcggccacgtcgcgctcttctccggtcacgcatcgcagggagcaagtaccattacccagcaactggcgcgaaacttcttccttagccccgaacgcacgctgatgccaagatcaaggaagcgtttctggcgattcgtattgagcagttgctgaataaaaatgagatcctcgaactctatctgaacaagatctatctcggctaccgcgcctatggcttggcgcggcggcacaggtctactttggtaagacagtcgaccagcttagtctaagcgaaatggcggttatcgccgggctacctaaagcgccttctacctttaacccgctctactcgatggatcgggcgatacgcgccgtaacgtagtgctttcgcgaatgttaagcgagggatatatcactcaggcgcagtacgatcaggcccgtagcgaacctatcgacgcaaattatcacgcgccggaaatcgccttctccgcaccttatctgtcggaaatggtgcgccaggaaatgtataaccgttatggcgaaacgcctatgaagatggttatcgtatttacacgaccatcacccgcaaagtgcagcaggccgcgcaacaggcggtgcgtaataacgtgctggactatgacatgcgccacggttatcgcggcccggcgaatgtgctatggaaagtggtgcacacggcgtgggaacgttaaaaaataccggtacctgaaagacgt

SEQ ID NO: 36961 - DNA, 804 bp, Salmonella paratyphi A
acgggtgataaggagatcgaccgttatggcttttaaaacctggcaaataggattgcatattcagcagcatgaagcgctggccatcgccgttattcgcggcgcatcgggctggtccctgcaacgttggtggcgactgccgctaatgaacgcctccacggcagagggtacgattcctgacccgcaatcgctggctcacgtactgcgaccctggagccgcgagctgccgctacgtcaccgtatttatctctcttttcccgcaaatcggacattgcaacgcgcttttccacatccgccgatgcgtctgcgggaacgtgagcaagtcgcatggctttcacaaacgatggcgcgtgacgtggatatggatccggacttattggtttcgactttcaggacgatgcgctgagccccgcgttcaacgttaccgccgtgcaaagcaaagaaatttcagagctgttaacgctggcgcaaacgctcaatgtgcgcatcgctgctgtaacgcccgatgcctgcgcgttacagcgttgctgccgtttataccttcggggcggcaatgtctggtctggcgcgatgagagccagtggctgtgggcgacgcgctatgcgtgggggcgtaaatcggcgcgagaggcgacgacgctgcatgaccttgccgcgacgttatccgtcgtgccggaacatatttcgttatgcgccgaagtatgtcgacccctggcgcgccgttaccgtccgccaaccgccggttccgccggacggttatcgctttgcgattgcgctgggtttagccatgggggagatacgctgatgg

SEQ ID NO: 36962 - DNA, 838 bp, Salmonella paratyphi A
  misc_feature (837)..(837): n=g, a, t or c
atgaataacttaccggtcgttcgctcgccctggcgcattctgattctggtgctggggtttacttttctctatgcgccaatgttaatgttggtgatttactcgtttaacagttcgaagctggtgacggtgtgggcgggatggtcgacgcgctggtatggcgagctctttcgggataccgccatgatgagcgcagtaggactaagcctgacaattgccgcctgcgcggcgacgatggcggtggtgctcggtactatcgccgcggtggtgatggtgcgatttggacgatttcgcggcgcaaacggctttgcgtttatgatcaccgcgccgctggtgatgccggatgtgattaccgggctgtcgctgctgctgctgtttgtcgcgctcggtcatgctatcggctggccctccgatcgcgggatgctgaccatctggttggcgcacgtcacgttctgtaccgcctacgtggcagtggtgatcgcttcgattacgcgagctggatcgttcgattgaagaggcggcgatggatcttggcgcggcgccgttaaaggtcttttttgtcattacattaccgatgatcatgccagcggtgatctcgggctggctgttggcctttacgctttcccttgacgatctggtgattgccagcttcgtttccggtcccggcgccaccacgctaccgatgctggttttctccagcgtgcgcatgggcgtgaacccggaaatcaacgcgctggcgacgttaatcctcggcgtggtaggaatcgtcggatttattgcctggtacctgatggcgcgagcggaaaaacagcggattcgcgatatccagcgtgcaagacng

SEQ ID NO: 36963 - DNA, 399 bp, Salmonella paratyphi A
atggcgattattttgattcgcggtctcgatgtgctgatgattatgaataccctcggcatacgcgggatgggcgagtttattcatcgcagtgtgcagacgtggagcttaaccctggtctttctggccagcttagtgctggtctttgttgaaatttattgtgcgttttcgctggtgaaaggccgtagctgggcgcgctgggtgtacctggcgacacaaattattgtgagcggatatctgtgggcggcgtcgttaggctacgggtatccggagttgtttagcatcgcgggagaatcgaagcgtgatatcctgcattccctggtcatgcaaaaactccccgatcttttaattctgtttctgctgtttattcccgctcccagccgtcggttcttccggctgcaa

SEQ ID NO: 36964 - DNA, 713 bp, Salmonella paratyphi A
  misc_feature (19)..(19): n=g, a, t or c
gctgcattactcgcctctnttccactggcagcatcgccgctgaaaaaatcaatttcggggtttccgccacctatcccccgtttgaatccctggatgcgagtaataaaattgtgggcttcgatatcgatctggcaaccgcattatgcaagcaaatgcaggcagaatgtacttttaccaatcatgctttcgatagtcttatcccggcgctgaaattcagaaaatatgatgccgtcatttctggaatggacattaccccggagcgcagtaagcaggtcgcctttagcaatccctattatgcgaactccgcgctggtgattgccaaaaaagacacctataaaacctttaccgatctaaaaggtaagcgtatcggtatggaaaatggcaccacgcatcaaaaatatctccaggataaacatccggaggtcaaaaccgtggcctacgacagctaccagaatgcgattatcgacctgaaaaatggccgtattgacggcgtctttggcgataccgcagtggtcaatgagtggctgaaaacgaatccgcaactgggtccggcaacagagaaagtgaccgatccgcaatacttcggtaccggacttggcatcgcggtgcgcccggacaataaggcgttgctggaaaaactgaataatgcgctggccgccattaaagcggacggcacttatcagaaaatcagcgatcagtggttcccgcagtaa

SEQ ID NO: 36965 - DNA, 1261 bp, Salmonella paratyphi A
aacttgattaaacaattgcaagagcgggggctggtagcccaggtgacggacgaagacgcgttggcagagcgactggcgcaaggcccgatcgcgctctattgcggcttcgatcctaccgctgacagcttgcatttggggcatctggttccattgttatgcctgaaacgcttccagcaggcagggcacaaacctgttgcgctggtaggcggcgcgaccggtctgattggcgacccgagctttaaagccgccgagcgtaaactgaacactgaagagaccgttcaggagtgggtggcgaaaattcgtaaacaggttgccccattcctggactttgattgcggcgaaaactccgccatcgcggccaataactatgactggttcggcagcatgaatgtgctgactttcctgcgcgatatcggtaaacatttttccgttaatcagatgatcaacaaagaagcggtgaagcagcgtctgaaccgtgacgatcagggtatctctttcacggagttctcttataacctgctacaggggtacgatttcgcttgtctgaataaactgcacggcgttgccttacagattggcggttctgaccagtgggggaacatcacttccggtatcgacctgacccgtcgcctgcaccagaatcaggtatttggtttgaccgttccgctgatcaccaaagctgacggcacgaaattcggtaaaaccgaaggcggcgctgtctggctggatccgaagaaaaccagtccgtacaaattctaccagttctggattaacaccgcagatgccgatgtttatcgcttcctgaaattcttcacttttatggacattgaggagatcaatgccctggaagaagaagataaaaacagcggtaaagcgccgcgcgcagtatgtactggccgagcaggtgacgcgcctggttcatggtgaagaggggctggtcgcggcgaaacggatcactgaatgcctgttcagcggttcactgagcgcgctgagcgaagctgactttgagcagttggcccaggacggcgtaccgatggttgaaatggaaaaaggcgccgacctgatgcaggcgctggtagacgccgaactccagccgtcacgtggtcaggcgcgtaagactatcgcctccaacgctgtcactatcaatggtgaaaaacaatccgatcctgaatacatctttaacgatgaggaccgtctgtttggccgctataccttattacgtcgcggcaaaaagaactattgtctgatttgctggaaataa

SEQ ID NO: 36966 - DNA, 339 bp, Salmonella paratyphi A
atgccacgtcgtcgcgtcattggtcagcgtaaaattctgccggatccgaagttcggatcagaactgctggctaaatttgtcaatatcctgatggtagatggtaaaaaatctactgcagaatcaatcgtatacagcgcgctggagaccctggctcagcgttctggtaaatctgaactggaagctttcgaagtcgctctcgaaaacgttcgcccgactgtagaagttaaatcccgccgtgtaggtggttctacttatcaggtaccagttgaagtccgtccggtccgtcgtaatgctctggcaatgcgttggggggatcctctagagtcgacctcggtcatc

SEQ ID NO: 36967 - DNA, 372 bp, Salmonella paratyphi A
atggcaacagttaaccagctggtacgcaaaccacgtgctcgcaaagttgcgaaaagcaacgtgcctgcgctggaagcatgcccgcaaaaacgtggcgtatgtactcgtgtatatactaccactcctaaaaaaccgaactccgcactgcgtaaagtttgccgtgttcgtctgactaacggttttgaagtgacttcctacatcggtggtgaaggtcacaacctgcaggagcactccgtgatcctgatccgtggcggtcgtgttaaagacctcccgggtgttcgttaccacaccgttcgtggcgcgcttgactgctccggcgttaaagaccgtaagcaagctcgttctaagtacggcgtgaagcgtcctaaggct

SEQ ID NO: 36968 - DNA, 285 bp, Salmonella paratyphi A
atgctgcataccttacctcattgcgcttcgggcgttgattttcccgctttgctgcgcctgctaaaagagggcgatgcgcttttgctgctccaggatggcgttaccgtcgcgattgaaggtaaccgcttccttgaaagtctgcgcgatgcccccataacggtctatgccttgaaagaagacattgacgctcgcggcctgggtggtcaaatttcagacagtgtcgtcagggttgactatactgagtttgtcagactcacggttaagtatgccaaccagatggcctgg

SEQ ID NO: 36969 - DNA, 1003 bp, Salmonella paratyphi A
gccctggcgctgggtatgagtgccgctcatgcctccgacaacgacacgctctatttctataactggactgagtatgtaccgccgggcctgctggaacagttcactaaagagactggcattaaggtgatttattcgacctacgagtcgaacgaaaccatgtatgccaaactcaaaacctataaagatggcgcgtatgacctggttgttccttctacatactatgtcgacaaaatgcgcaaagaaggcatgatccagaagatcgataagtcgaaattaaccaatttccacaacctcgatccggaaatgctcaacaaaccgtttgaccccaacaacgattattctgttccgtatatctggggcgcaacggcgattggcgtgaacagcgatgctatcgatccaaaaaccattaccagctgggctgacttgtggaaaccggaatataaaaacagcctgcttttaaccgacgatgcgcgagaagtcttccagatggcgtgcgcaagctaggttattccggtaacactaccgatccgaaagagatcgaagcggcatatgaagagttgaaaaaactgatgccgaacgtagcggccttcaactccgataatccggcgaatccgtatatggaaggggaagtcaacctgggtatggtgtggaacggttcggccttcgttgctcgtcaggctggcacgccgctggaggtcgtctggccgaaggaaggcggtattttctggatggacagcctggctattccggcgaacgcgaaaaataaagagggcgcgctgaagctaatcaacttcctgctgcgtcctgacgtcgcgaaagaggtggcagaaaccatcggctaccctacccccaacctggcggcgcgtaagtgtttaagcccggaggtcgccaatgataagtcgctctatccggatgcgcaaaccatcagcaaaggcgagtggcaaaacgatgtcggcgacgcagcgccatttatgaagagtattatcagaagctaaaagcagga

SEQ ID NO: 36970 - DNA, 1169 bp, Salmonella paratyphi A
caattttaccattcaggaggcctaatgagccacgtagacgacggtttccgttcactgacgctgaaacgttttccgcaaacggatgatgttaacccgcttctggcgtgggaggcggccgatgagtatctgctgcaacagttggatgagacggaaattcgcggcccggtgctgatcctgaatgatacgtttggcgcgctaagctgtgcgctggcggacattcgccatacagtattggcgattcgtatttaagcgaactgggtacgcgagagaatttacgccataacggcatcgcggagtccagcgtaacgtttctcgacagtaccgctgactacccgcaggcgccgggcgtggtattgattaaagtaccgaaaacactggcgttgctggaacagcagttacgcgctttgcgtaaggtcgttacggcgcaaacgcgtattatcgccggcgaaagcgcgtgatattcatacctctacgctggaactgtttgaaaaagtactgggcccaaccacgacgacgctggcgtggaagaaagcgcgcctgattaactgtaccttcagtcatccgcaactggccgacgcgccgcaaacgctaagctggaaactggaagatacaggctggacgattcacaaccacgcgaatgtgttttctcgtaccggattggatatcggcgcgcgcttctttatgcaacatttgccggaaaacctcgacggggagattgtcgatcttggctgcggcaatggggtgattggcctgagcttactggcgaaaaatccgcaggcgaacgtggtatttgtcgatgaatcggccgatggcggtagacttccagccgtttgaatgtagaaacgaaactgccggaagcattcgaacgctgcgaatttatgatcaacaacgcgctctccggcgtggagccgttccgttttaacgcggtgttctgcaacccgccgttccaccagaaacatgcgctgacggacaatatcgcctgggagatgttccatcacgcccgccgctgcctgaaaatcaacggcgaactgtatattgtggcgaaccgccatctggactatttccacaagctgaagaagattttcggtaattgcgcgacgatagcaaccaacaataaatttgtcattttgaaagcggtgaagcagggacgccgtcgataaggcgctcaa

SEQ ID NO: 36971 - DNA, 2741 bp, Salmonella paratyphi A
ttgtacgataaatcccttgagaaggataactgtggtttcggcctgatcgcccacatagaaggcgaacctagccacaaggtagtgcgtaccgccatacacgcgctggcccggatgcagcaccgtggcgcgatccttgccgacggtaaaaccggcgacggttgcggcttgctgttacaaaaacctgaccgtttctttcgcatcgtggccgaagagcgcggctggcgcttagccaaaaactacgccgtcgggatgatctttttgaataaagatcctgaactggccgccgcgtcacgccatattgtcgaagaagaattacagcaggaaaccctgtcgattgtcggctggcgcgatgtgccaaccaatgaaggcgtgctcggtgaaatcgccctctcctccctgccgcgtattgagcagatttttgtcaacgctccggcgggctggcgtccgcgcgatatggagcgccgtctgtttatcgcccgccgacgcattgaaaaacgtctgcaggacgacaaagatttctacatatgcagcctgtcgaacctggtcaacatttataaaggtctgtgtatgccggcggatctgccgcgcttctacctggatcttgcggatctgcgtctggaatcggccatctgcctgttccaccagcgcttttccactaacaccgtgccgcgttggccgctgcgcagccgttccgctacctggcgcataacggcgagattaacaccatcaccggcaaccgccagtgggcgcgcgcccgtacctataaattccagacgccgctgatcccggatttacaatccgctgcgccgtttgttaacgaaaccggttcggattccagctcgctggacaacatgctggaactgctgctggcaggcgggatggacattatccgcgccatgcgcctgttggtgccgcccgcctggcagaacaaccccgatatggaccaggatctgcgcgccttctttgactttaactccatgcatatggagccgtgggacggtccggcaggcatcgtgatgtccgacgggcgcttcgcgcctgtaaccttgaccgtaacggcctgcgcccggcacgctatgtcattaccaaagataagctgatcacctgcgcctccgaagtcggtatctgggactatcagccggatgaagtggtcgagaaaggccgcgtcggcccaggcgagctgatggtgatcgacacccgcggcggacgtattctgcattccgcggaaaccgatgacgatctgaaaagccgccatccgtataaagcgtggatggaaaagaatgttcgccgtctggtgccgtttgaagaattgccagatgaagaagtcggtagccgcgaactggacgatgacctgctcgccagctatcagaaacagtttaactacagcgccgaagagctggactccgttatccgcgtgttgggcgaaaacggccaggaagccgtcggttcaatgggcgacgataccccctttgccgtgctctccagccagccgcgtattatttacgactacttccgccagcagttcgcgcaggttactaacccgcctatcgacccgctgcgggaagcgcacgtcatgtcgctcgccaccagcatcggtcgcgaaatgaacgtcttctgcgaagcggaaggtcaggcccatcgcctgagttttaaatcgccaattctgctgtactccgatttcaaacagctcaccaccatgagcgagcatcactaccgcgccgactggcttgacattacctttgatgtcaccgaaaccacactggacgcgacggttaaggcgctgtgcgataaagcggaacagatggtgcgcaacggcaccgtgctgctggtcctctcggatcgcaatatcgataagaatcgcctgccggtccccgcgccgatggcggtgggcgcggtgcagactcgtctggtcgatcaaagcctgcgctgcgacgccaacatcatcgtagaaaccggaagcgcccgcgatccgcatcactttgcggtactgctcggctttggcgcaacggccatctatccgtacctggcctacgaaacgctggggcgtctgattgatacccaggccatcgctaaaaactaccgtaccgtgatgcagaactaccgtaacggcatcaacaaggggctgtacaagattatgtccaaaatgggcatttcgaccattgcctcttaccgctgctccaaactgtttgaagcggtcgggctgcacgatgatgtgataaacctgtgcttccagggcgtggtcagccgtatccgtacgcgagctttgatgacttccagcaggatctgctgaatctctccaaacgcgcctggctggcgaaacccattagcccgggcggcctgctgaagtacgtccacggcggcgaatatcacgcctataacccggatgtcgtgcgtaccctgcaacaggcggtacagagcggcgagtacagcgattatcaggaatacgccaaactgttcaatgagcgtccggcgtcaactgcgcgattctgctggcgatacatccagacggcgaggcggtgactatcgacgaggttgagaccgccagtgagctgtttaaacgctttgataccgcgccatgtctatcggcgcattaagtccggaagcgcacgaagcggggcggaacggatgaacagcctcgcgtcaactccaactccggcgaagcgcgaagacccggcgcgctacggcaccaataaagtgtcgcgtatcaggcaggtggcttcggccgttttgcgcgtgacgcg

SEQ ID NO: 36972 - DNA, 1329 bp, Salmonella paratyphi A
atgagtactactgatagcattgtatccagccaggcaaaacagtcgtcatggcgtaaatcggacacgacgtggacgctgggtttatttggtaccgccatcggcgccggggtgctgttcttccctatccgcgccgggtttggcgggcttatccccattctgctgatgctggttttagcttatcccattgcgttctattgtcaccgggcgctggcgcgtctgtgtttatccgggtctaatccgtccggcaatattacggaaacggtcgaagagcactttggtaaaacgggcggggtagttatcacgttcctttacttctttgcgatttgtccgctgctgtggatttatggcgtcaccattactaacacgttcatgacgttttgggaaaaccagttgcagatgccagcgttgaatcgcggtttcgtggcgctgttcttgctgctgctgatggcctttgtgatctggtttggtaaagatctgatggttaaggtgatgagttacctggtatggccgtttatcgccagtctggtgctaatctcattatcgctgattccttactggaactcggcggttatcgatcaggttgatctcagtaatatcgcgctgaccgggcacgatggcatactggttacggtgtggctgggcatctctattatggtgttctcctttaacttttcgcccatcgtctcttccttcgtggtgtctaagcgtgaagagtatgagaaagagtttggccgcgaatttaccgagcgtaaatgttcacagatcatctcgcgcgccagtatgctgatggtcgccgtggtgatgttcttcgcctttagctgtctgtttacgctctccccgcagaacatggcggatgcgaaagcgcagaacattccggtactttcctacctggccaaccatttcgcctctttgtcggggacaaaatccacttttgcaacggtgctggagtatggcgcgtctatcatcgcgctggttgctattttcaaatctttcttcggccactacctggggacgctggaagggctgaacggcctggtgctgaaattcggttataaaggcgataaaaccaaagtctctatgggcaagcttaataccatcagcatgatcttcattatggggtctacctgggtcgtagcttacgcaaacccgaacattctggacctgattgaagcgatgggcgcgccgattatcgcctcgctgttatgcctgctgccgatgtacgccattcgtaaagcgccgtcgctggcgaagtaccgtggtcgtctggataacgtgttcgtcaccctgattggtctgctgaccatcctgaatattgtctacaaattgttc

SEQ ID NO: 36973 - DNA, 792 bp, Salmonella paratyphi A
atgaaacagtatttagaactgatgcaaaaagtgctggatgaaggcacacagaaaaacgaccgtaccggcaccggcacgctttccatttttggccatcagatgcgttttaacctgcaggaaggctttcctctggtgacgacgaaacgctgccatttacgttcaattattcacgaactgctatggtttttgcagggcgataccaacatcgcttacctgcacgaaaataatgtcaccatctgggacgaatgggccgatgagaacggcgatttaggcccggtttatggtaagcagtggcgtgcatggccaacaccggatggccgccatatcgatcagatcgccacggtcttaagccagcttaaaaacgacccggactctcgccgtattatcgtttctgcgtggaacgtcggcgagctggataagatggcgctggcgccgtgtcacgcctttttccagttttatgtcgcagatggaaaactctcctgtcagctttatcagcgctcctgcgatgtgttcctcggtctgccgttcaacattgccagctacgcgttactggtgcatatgatggcgcaacagtgcgacctggacgttggcgattttgtctggaccggcggcgacacgcacctgtacagcaaccatatggagcagacgcacctgcaattaagccgtgaaccgcgcgcgctgccgaaattggtcattaagcgtaaacccgattcgctttttgactaccggttcgatgatttcgaaattgaaggctatgatccgcaccccggtattaaagcgccggtcgctatc

SEQ ID NO: 36974 - DNA, 2846 bp, Salmonella paratyphi A
ttattgttattggtcgccctctgggggcctgcagttcaggcggatatcggttggcaaccgctgcaagaaactatccgtaaaagcgataaagatacccggcagtatcaggcgatacgtcttgataatgacatggtggtgttgctggtatccgatccgcaggctgtaaagtctctttctgcgttagtggtgcccgttggatcgcttgaagatcctgaggctcatcaggggcttgctcattatcttgagcatatgtgcctgatggggtcaaaaaaatatccgcaggcggatagccttgccgaataccttaaaagacatggcggtagccacaacgccagcaccgcgccttatcgaacagccttctacctggaggttgaaaacgacgcgcttccaggtgccgtagatcgcctggccgacgccattgccgcgccattgctcaataaaaagtatgccgaacgcgaacgaaacgcggtgaatgccgagctgacgatggcgcgcacccgacggtatgcgtatggcgcaggtaagcgccgaaaccattaacccggcgcatctaggctcgcacttttcaggcggcaatctggaaacgctaagcgataagccgggcaatccggtgcaacaagcgctgatcgcttttcatgaaaaatactattcagctaatctgatgaaggcggtgatttacagtaataaacccttgccggaactggcgcgtattgccgcagatacctatggtcgcgtgccgaataaacagattaaaaaaccggaaattaacgtacctgtcatcaccgaggcgcagaagggcatcattattcattacgtgccggcgctaccgcgtaaagtgctgcgcgtggagtttcgtattgataacaatagcgcgcagttccgtagcaagaccgatgaactggtctcttatctgattggcaatcgtagcccggggacgctctctgactggctgcaaaaacaaggactggtcgaaggtattagcgcggattccgatccgattgttaatggtaacagcggcgtatttgccatttcggcaacgctgaccgataaaggtttggccaatcgtgatgaagtcgttgcggctattttcagctatctcaatatgttacgtgaaaaagggatagataaacgttactttgacgagctggcgcatgtgctggatctcgactttcgctatccgtcgattacccgcgatatggactatgtcgaatggctggcggacactatgatccgcgtcccggtagcgcatacgctggatgcggcgaatatcgccgatcgttacgatcctgccgctatcaaaaatcgcctggcgatgatgacgccgcagaatgcgcgtatctggtatatcagtccccaggaaccccataataagacggcatattttgtggatgcgccttatcaggtcgataagattagcgaacagacgtttaaaaactggcagcaaaaagcacagggcattgcgttgtcgctgccggagttaaacccctatattcctgatgattttacgcttgttaagaatgacaaaaactacgtgcggccagaactgattgtcgataaagcggatttgcgcgtggtttatgcgccgagtcgttatttcgccagcgagccaaaagctgacgtgagcgtggtattgcgtaacccgcaggcgatggacagcgcccgcaatcaggtactgttcgcccttaatgattatctggcgggaatggcgctcgatcagctcagcaaccaggcggcagtgggcggcattagcttttccactaacgccaacaatggtctgatggtcaatgcgaacggttatacccagcgtttgccgcagcttctcctggcgttgctggaaggatattttagctacgacgccacggaagaacagctggcgcaggcgaaatcctggtatacgcagatgatggattctgcggagaagggaaaagcctacgaacaggcgattatgccggtgcagatgattttgcaggtgccttatttttcccgtgatgaacgtcgcgctttgctgccgtccattacgttgaaagaggtgatggcctatcgtaatgcgttaaaaacgggcgctcgtccggaatttctggttataggaaatatgagcgaagcccaggcgacctcgctggcgcaagatgttcaaaaacagctagcggcgaacggatcggcgtggtgtcgctaataaagacgtggtggttgagaaaaagcagtccgtaatatttgaaaaagcgggcagtagcaccgactccgcgttacgcgcgtctttgtcccggtcggctacgacgagtacgtcagcgccgcctacagcgcgatgttaggtcagattgttcaaccgtggttttacaatcagctacgaaccgaagagcaactgggatacgccgttttcgcctttccgatgagcgttggccgtcagtggggaatgggattcctgctacagagcaacgataaacagccctcttacctgtggcaacgctatcaggcatttttccctgacgccgagggaactgagggcgatgaagccggaagagttcgcccaaattcagcaggcgatcattacgcaaatgcgccaggcgccgcaaacgttgggcgaagaagcatcccgtttaagcaaggatttcgatcggggtaatatgcgctttgactcgcgtgataaaatcatcgctcagataaaattgctgacgccacaaaagcttgccgacttcttccacctggcggtggtggaaccacaaggtatggcaatattgtcacagattgctggtagccagaatggaaaagcagaatacgtgcatccgacaggctggaaagtgtgggataacgtcagcgcattgcagcaaacgttacctctaatgagcgaa

SEQ ID NO: 36975 - DNA, 1193 bp, Salmonella paratyphi A
ctcaaacagctcctgatgatgtccggtttcgaccgttactatcagatagtcaaatgcttccgtgatgaagacttacgtgctgaccgtcagccggagtttactcagatcgacgtcgagacctccttcatgaccgcgccacaggtgcgcgaagtgatggaagcgctggtgcgccatttgtggctggaagtgaaaggcgtggatctgggggatttcccggtcatgacgtttgccgaagcggaacgtcgctacggttccgacaagccagacctgcgtaacccgatggagctggtagatgtcgctgacctgctgaaatcggtagagttcgcggtcttcgcgggcccggctaacgatccgaaaggccgcgtggcagcgctgcgtcgtgcctggcggcgcacagcttagccgtaagcagatcgacgattacggtaactttgttaagatctacggcgcgaaaggactggcatatatcaaagttaacgagcgcgcgaaaggtctggacgggattaacagtccggtggccaagttcctgaccgccgacatcgtcgaggctatccttgaacgtaccggcgcgcaggacggcgacatgatcttcttcggcgcagataacaaaaaagtggttgccgatgcgctggccgctgcgtctgaaactgggcaaagacctgagcctgaccgacgaagacaaatgggcgccgctgtgggtgattgacttcccgatgttcgaagacgacggcgaaggcggtctgaccgcgatgcaccatccgttcaccgccccggtgacatgacggcgtctgaactgaaaactgccccggaagaagccgtcgctaacgcttacgatatggtgattaacggctatgaagtgggtggcggttcggtgcgtattcacaacggtgaaatgcagcaaaccgtatttggtattctcggtatcaatgagcaggagcagcgcattgaagttcggcttcctgttggatgcgttgaaatacggtacgccgccgcacgcgggcctggcgtttggtctggaccgtctgaccatgctgttgaccggcaccgacaatattcgtgatgttatcgccttcccgaaaacgaccgccgccgcgtgtctgatgactgaagcgccgagtttcgccaaccaggcagcgttgacggagttggggattccggttgtgaagaaagccgagaataactgatatgaacaa

SEQ ID NO: 36976 - DNA, 597 bp, Salmonella paratyphi A
atgaaaaaacattatcctgtccaatatgaaaccggggatatcgtctttacctgtataggtgccgcgcttttcggccagatatccaccgcttcacagtgctggagcaaccatgttgggattattattggtcataatggtgatgactatctggtggcggaaagtcgcgtccccctctcaaccgtcaccacgctgtcactatttatacaacgttcagccggacaacgttacgcggttcgtcgcctgtgcggcggcctgacggtcgagcagaaactcgccatcatggagcaggttcccgcccggctgaataagttttatcacacggggtttaaatacgagtcatcgcgccagttctgctcgaaatttgtgtttgatatctataaagaagcattgtgtattccggtaggcgatattgagacattcgaagaattacttcacagcaatcctgatgcgaaactcaccttctggaaattctggtttttaggttcaatcccgtgggatcgtaagacggtgacgcccgccagcctgtggcaacatcccaatttagaattaattagcgcctgtggaattgaaaaccctcaacgcgaggctgagggagaa

SEQ ID NO: 36977 - DNA, 1167 bp, Salmonella paratyphi A
  misc_feature (1052)..(1052): n=g, a, t or c
atggcatttgcctcgttaattgaacgccagcgtattcgcctgctgctggcgttattattcggcgcctgcggaacgctggctttctctccgtatgacgtctggcccgcagcgatagtgtcgcttatcgggctgcaggccttaacgtttaatcgccgcccgctccagtctgccgccatcgcgtattgctggggactcggacttttcggtagcgggattaactgggtttatgtcagtatcgcgcagtttggcggcatgcgggcccggttaacgtttttctggtggtgctgcttgcagcttatctctcgctgtataccggactgtttgccgggattttgtcgcgcctgtggccaaaaaccaactggctgcgcgtcgctatcgccgcgcctgcagtatggcaaatcaccgaatttttacgcggctgggtgctgaccggcttcccctggctgcaatttggctatagtcaggtcgacggcccgctaaaaggactggcgccggtaatgggcgtcgaagcgatcaacttcctgctgatgatggtcagtggcctgttagcgctggcactggcgacgcggaactggcgtccgactgtgtcgccgtgattctgtttgctttgccctttccgctacgttatatccagtggtttacgctggaaccggccaaagcggatccgtatcgctggtgcagggcgatattccgcagtcgctgaagtgggacgaaaaccagctactgaatacgctaaaaatttatctcaacgaaacccgcccagagttaggcaaatcacagattattatctggcctgagtcggcgattccggatctcgaaatcaatcagcagcccttccttcgttcgctggacgagatgttacgcgaaaaaaatagcacgctgatcaccggtattgtcgatgcgcgtctcaataaacagaatcgatacgacacctacaatacgattattacgttgggcaaggataatccatacagttatgactcgcccaatcgctacaataaaaatcaccttgtaccctttggcgagttcgttccgctggagtctatcctggntccgtggcgccgttcttcgatctgcccatgtcctcctttagccgcggcccttatatccagccgcagttacatgcgcacgactataagctgacggcggcaatctgttatgaaatta

SEQ ID NO: 36978 - DNA, 876 bp, Salmonella paratyphi A
atgagcgacgacaattcacacagtagtgacacagtaaacagtaaaaagggatttttttccctgctactcagccagcttttccacggtgaacctaaaaaccgtgatgagttgctggcgctgatccgtgattccgggcagaacgagcttatcgatgaagatacgcgcgatatgctcgaaggcgtaatggacatcgccgaccagcgcgttcgcgatattatgatcccgcgctcccagatgattaccctaaaacgcaaccagacgctggacgaatgtctcgatgttatcattgagtccgcccactcgcgttttccggtgatcagcgaagataaagatcacattgaagggattctgatggccaaagatttgctgccgtttatgcgcagcgatgccgaagccttcagcatggacaaagtgttacgcaccgcggttgtcgtaccggaaagcaaacgggttgaccgtatgctcaaggaattccgctcccagcgctaccatatggccatcgttatcgatgagtttggcggcgtttccggccttgtgactatcgaagacatcctcgaactgattgtcggtgaaattgaagatgagtatgacgaagaagacgatatcgacttccgtcagcttagccgccatacctggacgattcgcgcgctgggctcgattgaagacttcaatgacgctttcggcacccacttcagcgatgaagaagtcgataccatcggcgggctggtgatgcaggcgttcggccatttaccggcccgcggcgaaaccattgacattgatggttaccagttcaaagtggcgatggccgatagtcgtcgtattattcaggtgcatgtcaggatcccggatgactcgccccagccaaaactggacgaa

SEQ ID NO: 36979 - DNA, 1180 bp, Salmonella paratyphi A
atgacaaatcaaccaacggaaattgccattatcggcgggggaatggtcggcggcgcgctggcgtggtgtctggcgcacaagggtttacggtgatggtaatagaacatgccgcgcctgcgcgcgtttgcggctgacagccagcctgacgtgcggatttcggccattagcgcggcatccgtggcgctgctcaaggggctgggcgtgtgggaggcggtgcaggggatgcgtagccatccttatcggcgactggagacctgggagtgggaaaacgcccatgtggtgttcgacgccgctgaactcaagctgccgctgttaggctatatggtggagaacaacgtcctgcaacaggcgttatggcaggcgctggaagcgcaccccggcgtgacgctgcgcgttccggcttcactggcggcattgcaccgccgccacgatggttatgcgctggaactggccgacggcgaatgggtaacgccgaagttagtgattggcgccgacggtgcgaattcgcaggttcggcaaatggcgggaattggcattcatgcctggcaatatgcgcagtcgtgtatgcttatcaccgtcaagtgtgaaaatgcgccaggcgacagcacctggcagcagtttacgccaacggggccgcgcgcctttttgccgctgttcgacgattgggcgtcactggtgtggtatgacgctccggcacgtattcgccagttgcagggtttatcgatgacgcaattgcaggtggaaattaaccagcactttccggcgcgtctgggggcggtgatgcctgtcgcggcgggcgcgtttccgctaacccgtcgtcacgcgttgcagtatgcgcaacaggggctggcgctggtaggcgacgcggcgcataccattcatccgctggccgggcagggcgtcaacctggggtatcgggatgttgatgcgttgattgatgtgctggcgagtgcccgtagctatggcgagtcctgggccagccattcggtgttgaaacgctatcagacgcggcgcatggcagataattttatgatgcaaagtggaatggatctgttttatgccgggttcagcaatgaactgccgccgctgcgtattttacgcaatatggggctgatggcggcgcacgcaggtcgtgctaaaacgtcaggcgctgaaatatgcgttggggttgtagtttgtg

SEQ ID NO: 36980 - DNA, 1742 bp, Salmonella paratyphi A
atcaaagaaagctacgctttcgccgtactcggcgaacctaagtatgcttttaactttgatcactttgattatgtgaatcctgctgcgccgaaaggtggtcagatgacgctttccgccattggtacgttcgataatttcaatcgctattcgctgcgcggcaatcccggcgtacgtaccgaagccctttacgatacgctttttaccacctcggatgatgagcccggaagctattatccgctgattgccgaccatgcccgctatgccgccgactattcctgggtggaaatctcgattaacccccgcgctcgttttcacgatggcacgcccattaccgcccgcgatgtggcctttacctttcataagtttatgaccgaagcgtaccgcagttccgtctggtctataaaggtactaccgtgaaggcgattgcgcctttaaccgtgcgaattgagctggcgaagcctggtaaagaagacatgcttagtctgttttcattaccgatcatgcccgaaaaattctggaaaaatcataaacttagcgatccgctttcaacgccgcccttagccagcgggccataccggattactcagtggaaaatgggccagtacattgtctattcacgcgtcaaaaactactgggcggctaatctgccggtcaatcgtggacgttttaacctcgacactatccgctacgattactaccttgatgacaatgtcgctttcgaggcgtttaaagcgggcgcatttgatctacggctggaaaacgacgctaaaaactgggcaacgcgctacatcggtaaaaatttcgataatcattacatcattaaagaagagcagaaaaacgagtcggcgcaggacacacgctggctggcctttaatattcagcgcccggtatttaaagaccggcgggtacgtgaagccgtcaccctggccttcgattttgagtggatgaataaagcgctgttctataatgcctggagccgaaccaacagttacttccagaataccgagtacgccgccagaaattatcctgacgccgacgaactggtattactcgcgccgatgaaaaaagatcttcctcctgaagtcttcactcagatctatcagccgccggtctctaacggcgacggctacgatcgcgaaaatcttcttaaagctgacgccttgttgacgcaggccggatgggtgatcaacggacagcaacgggtcaatagcgtcaccggtaagcctctgacgtttgaacttctccttcctgccagcagtaatagccagtgggttctgcccttccagcataatcttcagcgtctgggcattacgatgactatccgtcaggttgataattctcaactcaccaaccggatgcgtagccgcgactatgacatgatgccgaggctatggcgggcgatgccctggcccagctccgatctacaaatctcatgggcgtcggaatacattgactccagttataacgctcccggcgtacaaagcccggtggtggataaactgatcgcgcaaattatcgcagcgcagggtgataaagcgaaactggtgccgctgggacgggcgctggatcgcgtgctgacctggaactattacatgctgccgatgtggtatatggcgcaagacaggctcgcctggtgggataaattctcccatccggcgattcgcccggtatataccatcgggttagatacctggtggtatgatgtcaacaaagccgccaaactaccggcagccaggaggtag

SEQ ID NO: 36981 - DNA, 1361 bp, Salmonella paratyphi A
cgttccaacaaggccatgacattttttgtctgctttcttgcagccctggcaggattactttttggcctggatatcggcgttatcgccggtgctttacccttcattaccgacgagtttcagattaccgcacacactcaggaatgggtggtcagctccatgatgtttggcgcggccgtcgggcctgtcggcagcggctggctctcctttaagctgggtcgtaaaaaaagcctgatgatcggcgctatcctgttcgtcgccggttcgctgttctccgctgcggcgcctaacgttgaagtcctgattatttctcgcgtgctgctgggtctggccgtcgggtcgcttcctacactgcaccgttgtacctgtccgagatcgcgccggaaaaaattcgcggcagtatgatctcaatgtaccaactcatgatcaccatcgggattctgggcgcttatctgtccgataccgcgttcagctacagcggcgcatggcgctggatgctcggcgtgatcatcatcccggccattctgctgctgatcggcgtcttcttcctgccggacagcccgcgctggtttgcggcgaaacgccgtttccatgatgctgaacgcgtcctgttgcgcctgcgtgacaccagtgcggaagcaaaacgtgagctcgatgaaattcgcgaaagtttgcaggttaaacagagcggttgggcgctgttcaaagagaacagcaacttccgccgcgccgtgtttcttggcattttgttgcaggtcatgcagcaatttaccgggatgaacgtcatcatgtattacgcgccgaaaatcttcgaactggcggggtacacgaataccacggagcagatgtggggcaccgttattgttggtctgactaacgtgctggcaaccttcatcgctatcggcctggttgaccgctggggccgcaagccgaccctgacactgggcttcctggtcatggcgattggtatggggattctgggtacgatgatgcacatcggcatccattcgccgtctgcgcaatacttcgctatcgctatgctgctgatgttcatcattggatttgcgatgagcgcaggtccgctgatttgggtactgtgctccgaaatccagccgcttaaaggccgcgatttcggcatcacctgctccaccgcgaccaactggatcgccaatatgatcgtcggcgcaacgttcctgaccatgctgaacaatctgggtaacgccaacaccttctgggtctacgctggcctgaacgtgctgtttatcctgctgaccctgtggctggtgccggaaaccaaacacgtttcgctggaacacattgaacgtaacctgatgaaaggtcgtaaactgcgcgaaatcggcgcc

SEQ ID NO: 36982 - DNA, 1146 bp, Salmonella paratyphi A
atggcaaaacacctttttacgtctgagtccgtatcagaagggcatcctgacaaaatcgcagaccaaatctctgatgccgtgttggacgctatcctgcaacaggatccgaaagcacgcgtcgcctgtgaaacctacgttaaaaccggcatggttttagttggcggtgagatcaccaccagcgcctgggtcgatatcgaagagattacccgtaatacggtgcgcgaaattggctatgtgcattccgacatgggctttgacgccaactcttgcgcggtactgagcgcaattggcaaacagtctccggatatcaaccagggcgttgaccgcgcagacccgctggaacaaggcgcgggcgaccagggcctgatgtttggctacgcgacaaatgaaaccgacgtactgatgcctgcgccaatcacctacgcgcaccgtctggtacagcgtcaggctgaagtgcgtaaaaatggcaccctgccatggttgcgtccagatgcaaaaagccaggtcactttccagtatgacgacggcaaaatcgtcggtatcgacgccgtggttctctctacgcagcacgcagaagatatcgaccaaaaatcgctgcaagaagcggtgatggaagagatcatcaaacccattctgccgtctgaatggttaaatacgtccactaagttttttatcaacccaaccgggcgttttgttatcggcggtccgatgggcgattgtggtctgaccggtcgtaagatcatcgttgatacctacggcggtatggcgcgtcacggcggcggcgccttctccggtaaagatccgtctaaagttgaccgttctgcagcttacgctgcgcgttatgtcgcgaaaaacatcgtggcggcaggtctggcggatcgctgtgaaatccaggtctcctacgctatcggcgtagcggagccgacgtccatcatggtggaaacgttcggtactgaaaaagtgcctgctgaacagttgattctgctggtgcgcgaattcttcgacctgcgcccgtacggcttgattcagatgctggatctgctgcacccgatctacaaagaaactgcggcttacggccacttcggtcgcgaaaacttcccatgggaaaaaaccgacaaagcgcaactgctgccgatgctgccggtc

SEQ ID NO: 36983 - DNA, 663 bp, Salmonella paratyphi A
atgagcaccttaggtcatcagtacgataactcactggtttctaatgcgtttggttttttacgtctgccaatgaacttccagccgtatgacagcgatgccgactgggtgatcactggcgtaccgtttgatatggcaacgtccggtcgcgctggcggtcgtcatggcccggcggcgatccgtcaggtgtcgaccaacctcgcctgggaacatcaccgtttcccgtggaattttgacatgcgcgagcgcctgaacgtcgtggactgcggcgatttggtgtatgcgtttggcgatgcccgtgaaatgagcgaaaaattacaggcgcacgctgaaaaactgctgtctgcaggcaagcgtatgctctctttcggcggcgaccacttcgtcacgctgccgctgctggcgcccacgcgaaacattttggcaaaatggcgctggtacattttgacgcgcataccgatacctacgctaacggctgcgaattcgatcacggcacgatgttctacacagcgccgaaagaaggcctgatcgatccgcatcattcggtacagatcggtattcgcactgagtctgacaaagacaatagctttaccgtgctggatgctgccaggtcaacgatcgcagcagtgatgatattctcgctcaggtgaacagatcgtcggcgat

SEQ ID NO: 36984 - DNA, 1397 bp, Salmonella paratyphi A
tttgaacgtgcaggcgtcatggttgtgggtgatgtaatgctggatcgctattggtatggccccacttgccgtatttcaccggaagcgccggtgcccgtggttaaggtaaataccgttgaggaacgtccgggcggcgcggcgaacgtggcgatgaacattgcgtctctgggagcgaacgcccgtctggtcggcctgacgggtattgatgacgccgcgcgcgctgagcaaaacgttggcggaggtcaatgtgaagtgcgacttcgtttctgtgccgacgcatccgacaattaccaaactgcgcgtgctatcacgtaatcagcagctcattcgtcttgattttgaagagggctttgagggggtggacccgcagccgttgcatgagcgtatcaaccaggcgctgggatcgatcggcgcgctggtattgtccgattatgccaaaggcgctctgaccagcgtgcagactatgatttccctagcgcgccaggcgggcgtgccggtgctcatcgatccgaaaggaacggattttgaacgttaccgcggcgccacgctgctgacgccaaacctttctgaattcgaggcggttgcggggaaatgtaaaagcgaagacgaactggttgaacgcggcatgaagctcattgccgattacgacctttccgcgctgttggtcacgcgttccgaacagggaatgacgctgctgcaaccgaataaagcgccgctacatatgccgacgcaggcgcaggaagtttatgatgttaccggtgcgggcgatacggtgatcggcgtgctggcggcgacctggcggcgggaaataccctggaggaggcgtgttatttcgccaatgcggcggcgggcgtagtggtaggtaaactcgggacgtcaacggtttcccctattgagctggaaaacgcagtcggacgcgcggataccggcttcggcgtcatgaccgaagaggagttgagacaggccgtcgccagcgcgcgtaagcgtggcgagaaagtggtcatgaccaacggcgttttcgatattctgcacgcgggccacgtctcttatctggcgaacgcgcgcaaactgggcgaccgcctgattgttgcggtcaatagtgacgcctcgactaaacgtctgaaaggcgaaagccgtccggttaatccgctcgaacagcgtatgatcgtgctgggcgcgctggagtcggtcgactggattgtctcttttgaagaggatacgccgcaacgactgattgccggtattctgccggatctgctggtaaaaggcggcgactataagccggaagagatcgcgggcagcgaagaggtctggccaacggcggcgaagtcatggtgctgaacttcgaagatggttgttccacgaccaatatcatcaaaaagatccagaccgagagc

SEQ ID NO: 36985 - DNA, 655 bp, Salmonella paratyphi A
atgaatcagacgctactttcctcttttggtacgccttttgaacgtgttgaacttgcactggatgcgctgcgtgaaggacgcggtgtgatggtgcttgatgatgaagatcgtgaaaacgaaggcgatatgattttccccgcagagataatgaccgtagaacagatggcgttaaccattcgtcacggtagcggtattgtttgcctgtgcattactgaagaccgtcgtaagcagctggacttgccaatgatggtggaaaacaacaccagcgcctacggcaccggttttaccgtgaccattgaagccgcagaaggcgtgaccaccggcgtttccgccgctgaccgtgtcactacggtgcgtgcggcaattaaggatggcgcaaaaccgtccgatcttaaccgtccggggcacgttttcccactgcgcgctcaggcgggcggcgtgctgacgcgcggcggtcatacggaggcgaccatcgatctgatgacgctggccggttttaaacctgcaggggtactgtgcgagttgactaacgacgatgggacgatggcgcgcgccggagtgtatcgcgtttgcaggccagcataatatggcggtggttacgattgaagatctggtggcttaccgccagcgcatgagcgcaaagccagctgatcga

SEQ ID NO: 36986 - DNA, 689 bp, Salmonella paratyphi A
atgtccgctctttgtccgctaccgactccgcctgcttcggaagcattgctgttagcccaggcgcggcagctttccggctatacgttaggcgagctggcggcgatggccggcattaccacgcctaaagatttgaagcgagacaaaggctggatcggcgtcttgctggagatctggctcggcgccacgcgggatgcaagccggagcaggatttcgccgcattagggctagaactgaaaaccatcccggtggatagtctgggtcgtcctctggaaacaacctttgtttgcgtggcgccgttaaccggtaacagcggcgtgacctgggagacaagtcacgtacggcataaattgaagcgcgtgctatgggtgccggtcgaaggcaatcgcagcataccgttagccgaacgccgcgtaggttcgccgctactctggagtccgagtgaagaagaggacaggcagctacgcctcgactgggaagagctgatggacatgatagtgctgggccaggtggaacgcattaccgcccgtcatggcgaagtcttgcaactgcgacccaaagccgtcaatgccagggcgctcaccgaggctatcggcgcgcgcggggaacctattttgacgctaccgcgtggattttatctgaaaaaaaattttacgcaggcgctgctggctcgccattttttattgcagaat

SEQ ID NO: 36987 - DNA, 1112 bp, Salmonella paratyphi A
atgacggataatccgaacaaaaaaaccttctgggataaaattcatatcgatcccacgatgctacttattctgctggcgttactggtttacagcgcattggtcatctggagcgccagcggccaggacatcggcatgatggagcgtaaaatcggtcagattgcgatggggctggtggtcatggtggtgatggcgcagatcccgccgcgcgtgtatgaaggctgggcgccctatctctatatcatttgtatcattctgctggtcgccgttgatgccttcggcgcaatatccaaaggcgcgcagcgctggctcgatctgggaatcgttcgctttcagccttcggaaatagccaaaatcgccgtgccgctgatggtcgcccgctttattaaccgtgacgtctgcccgccctcgctgaaaaataccgccatcgccctggtattaatctttatgcctaccctgctggtcgccgcccagccggacctggggacgtctattctggtcgccctttccggtctctttgtcctatttttgtctggcctgagctggcgcttaattggggtcgccattgtattgatcgctgcatttattcctattttgtggtttttcctgatgcacgattaccaacgccagcgcgtcatgatgctccttgatccggagaccgatccgctgggcgcgggctatcatattattcagtctaaaattcccattggctcaggcggcctgcgcggtaaaggctggctccacggcacccagtcgcagctggagtttttacccgaacgccataccgactttattttcgcggtactggcggaagagctcggtctggtgggcatcctgattctctcgcgctctatattttgctaataatgcgcggtctgtggattgccgccagagcgcaaactacatttggtcgcgtgatggctggcggattaatgttaatattattcgtttatgtcttcgtaaatattggtatggtgagcggtattctgcctgtggttggagtacctttacccttggtcagctacggggcgtccgcactgattgtgctgatggccgggttcgggattgtgatgtcgatccacacccacagaaaaatgttgtcgaaaagcgtataa

SEQ ID NO: 36988 - DNA, 471 bp, Salmonella paratyphi A
gtgaagctgcaacttgtcgctgtcggcacgaagatgcccgactgggttcaaacgggatttacggaatatctgcgtcgttttccgaaagatatgccctttgagctgatcgaaactctgcgggcaaacgcggcaagaacgcggatatcaaacgcattctcgacaaagagggcgagcagatgctgccgccgccggtaagaatcgcattgttaccctggatattccagcaagccgtgggatacgccgcagttagccaatgagctggagcgctggaaacaggacgggcgcgacgtcagtttgctgattggcggcccggaaggattatctcccgcctgcaaagcggcagcagaacagagctggtcgctctcggcgttaacgcctccctcaccgctggttcgggttctggtcgcggagagtttgtaccgggcgtggagcatcacaaccaaccacccttatcaccgtgagtgatcgtga

SEQ ID NO: 36989 - DNA, 973 bp, Salmonella paratyphi A
  misc_feature (755)..(755): n=g, a, t or c
atgagtaaacccattgtgatggaacgcggtgtaaaataccgcgatgccgataagatggctcttatcccggttaaaaatgtggtcacagagcgcgacgctctactacgtaaaccggaatggatgaaaataaaacttccggcggattctacccgtatccagggcatcaaagccgcaatgcgcaaaaatggcctgcattctgtctgcgaggaagcgtcttgcccaaacctggctgaatgtttcaaccacggtaccgctacgtttatgatccttggcgccatttgcactcgccgctgtccgttctgtgatgtcgcccatggccgccccgttgcgccggatgcggaagagccgcagaaactggcgcaaacgatcgccgacatgtcggctacgctatgtggtcatcacctctgtcgaccgtgacgatctgcgtgacggcggcgcccagcattttgctgactgcatcaccgccatccgtgccaaaagcccggagataaaaatagagaccctggtgccagacttccgtggacgtatggatcgcgcgctggatatccttaacgcgacgccgccggatgtgtttaaccacaacctggaaaacgtgccgcgtatctaccgccaggttcgtccgggcgccgattacaactggtcgctgaaattactggaacgcttcaaagaagcgcacccggaaattccgacaaaatcgggtctgatggtgggcttaggcgaaaccaatgcggaaatcattgaggttatgcgcgatntctaccgtcacggcgttaccatgtgacgcttggtcagtatctacagccaagccgccatcacctgccggtacagcgttatgtcagcccggaagagtttgacgagatgaaagcggaagccctggcgatgggctttacccatgcccctgtggcccctttgtacgttcttcgtaccatgctgatctccaggcaaaggcatggaagtgaaatgatcgtgtaat

SEQ ID NO: 36990 - DNA, 814 bp, Salmonella paratyphi A
attcttaacctgacgccgtcagccatcagccagtccattcaaaaattacggactatatttcccgatccgctgtttattcgcaaaggccaggcgtaacgcccacgacgtatgtacgcatctgcacgaatacatcagccaggggctggaatctattcttggcgccctggatcttacgggcagctatgataagcaacgtaccattacaattggcacgacgcttcggtcggcgcgctagtgatgccgattatttaccagccatcaggccgcgttatcctcagctttcgtgcgcaacattccggtagacgatgccgaaagccagcttagtcagtttcagaccgatctcattatcaatacccatagctataacaaccggagcatccagtatcacgtcctgtttagcgatacgcttgagattgtctgccgccagcatcacccgtgtctgcgaacgccattactgaagagagactgaacagcgcggatcacacctttctgatgctggagggacaacatctttccctgtgcgccagcgactgcaggagacatttcccgatcagcaaatcagttttagcagctacaatatttttaccattgcctcgctgatcgccagcagcgatctgctgggctgatgcccacccgcttctacgacttatttagccgctgctggccgcttgagcgccttccctacgcgccggtgaatagtgaacaggtcgagttctcgctgcattacaataaactgagtctgcgcgatccggtgctggagaacgtcattgatatcattcgtgaggcgttctgacaaaaatgttgcattcaggtc

SEQ ID NO: 36991 - DNA, 590 bp, Salmonella paratyphi A
atgcaaaaagttgttctcgcaaccggcaacgccggtaaagtgcgcgagctcgcgtcgctgttaagcgattttgggcttgatgtggtagcgcaaacggaactgggcgttgactccgcggaagaaaccggcctgacgtttattgaaaacgcgattctcaaagcgcgccatgccgctaaaatgaccggtctgcccgccattgccgatgactccggtctggccgttgacgttttaggcggcgcgccgggtatctattccgcgcgctattctggcgaaaacgcgacagatcagcaaaatctggaaaaactgctgcatactctacgagatgttccggacgacaaacgccaggcgcgattccattgtgtactggtttattttgcgtcatgccgaagatcccacaccgatagtctgtcacggtaaatagaactgaagtcattactcgccaagacgactggaaaatggcgaatttgactatgatcccatattcttcgtaccgtctgaaggcaaaaccgccgcagaactgacccgtgaagaaaaaagcgcgatttcccaccgtggacaagcgctcaagctgctgctggatgcgttacgca

SEQ ID NO: 36992 - DNA, 711 bp, Salmonella paratyphi A
  misc_feature (511)..(511): n=g, a, t or c
atgtaccgtaatttttcttttgccgcagcgttgctggccgcagcgttttcaggccaggcattggcgatggcattaacaatttttctcaggccaaagcggcgagcgtcaaagtcaatgccgacgcgcccggcagcttttactgcgggtgccaaatccgctggcagggtaaaaaaggcgtcgtagacctggagtcctgcggctataaggtgcgtaaaaacgagaatcgcgccagacgcattgagtgggagcacgttgtccccgcctggcaattcggtcatcagcgccagtgctggcaggacggcgggcgaaaaaactgcgctaaagacccggtctatcgcaaaatggaaagcgatatgcataacctgcaacccgcgattggcgaagtgaatggcgatcgcggcaactttatgtatagccagtggaacggcggcgaaggtcagtacgggcagtgcgccatgaaagtggatttcaaagcgaactcgccgagccgcccgcccgcgcccgtggagtncgcccgcacttatttttatatgcgcgaccaataccaactgaaactttcccgccaacaaacgcagctttttaacgtctgggataagcagtaccccgttaccgcctgggagtgcgagcgcgatcgcatttcgcaaggtccagggtaatcataatccctatgtgcaacgcgcttgccaggcgcgaaagagctaacctacacta

SEQ ID NO: 36993 - DNA, 775 bp, Salmonella paratyphi A
atagccaaacgccggggccatgacgcggatttttttattatgcgtattccccgcatttatcaccctgaattgttgacgtccggtacgcagatttcgttatgcgaagatgcggccaaccatattggtcgtgtactgcgcatgggaccgggacaagcgttacagctgtttgacggcagtaatcaggtattcgatgctgaaatcattagcgccagtaagaaaagcgttgaagtgcaagtgatgaaaggcgaaatcgacgatcgtgaatcgccgctgcatatccatctgggccaggtgatgtcgcgcggtgaaaaaatggaatttactatccagaaatcgatcgaactgggtgtaagctcattacgccactgttctctgagcgctgcggcgttaaactggataatgaacgtctgaacaaaaagcgccagcagtggcaaaagatcgccatcgccgcctgcgaacaatgcgggcgtaaccgggtgccgaaattcgcccgccgatggctggaagcctggtgcgccgagcaagattccgggctgaagctcaatcttcatccgcgcgcccatgccagcatcaacactctgccgctgccggttgaacgcgtccgactgctgatcggcccggaagcgggctgtcggcggacgaaatcgcgatgaccgcgcgctatcagtttactgatattctgttaggacctcgcgttctgcgtactgagacaaccgcgctcaccgccattaccgcgctacaggtgcgttttggcgacttaggatgaagcgttaac

SEQ ID NO: 36994 - DNA, 414 bp, Salmonella paratyphi A
atgagcgacaccttactggcctttgacttcggcacaaaaagcatcggcgttgcaataggacaacgcattaccggcaccgcccgtccgcttccggcaatcaaagcacaggacggcacgcccgactggacgctcattgaacgtttgctgaaagagtggcagccggacgaaattattgtcgggctaccgctcaacatggatggcactgaacaaccgctgacggcgcgcgcacgtaaattcgccaaccgtattcatgggcgcttcggggtaactgtcacgctgcacgatgaacgactcagcaccgttgaagcacgctccggtctgtttgaacgaggtgggtatcgcgcgctgaacaaaggcaaagtggactcggcctccgccgtgattatcctcgaaagctattttgaacaggggtat

SEQ ID NO: 36995 - DNA, 1025 bp, Salmonella paratyphi A
gtgccaggttatgcgcgatatcgttcattttccgaggatgtttatatgaatatggaagaaattgtgacgcttagtgtaaagcataacgtctcggatctacacctgtgtaacgcctggcctgcgcgatggcgcaaacaaggacgcatggagaccgcgccttttaccgcgcctgatgtcgacaggcttctgcttgattggcttaatgacgcgcaacaatatcagtggcgaacgcacggccagcttgatttcgccgtctcgctgtctggcacgcggcgcctgcgccagtgcgttcaaacatcaacagggaacgtcgctggcgctacggctattgcccgagcgttgtcctgatctggcggaaatccagacgccgccgatagtacccgcactgcttgccagcgagaacggactgattctggtcactggcgccactggctgcgggaaatccactacgctggcggcgatggtgggacatcttaatcaacatgccgataaacacatcctgacgctggaagatcctattgagtaccgttacaccagcaagcgttgcctgatacagcagcgggaagtcggccagcattgcgccacttttgccgccggctgccgcggcgttgcgtgaagatcccgatgtcattttgctgggagagctgcgtgacagcgagaccattcgcctggcgctgacggcggcggaaacggggcatctggtactggcaaccctgcatactcgcggtgcggcgcaggcggtggaaagattagtggatagttttccggcgcaggaaaaagaaccggtacgcagtcaactggcgggtagtctgcgcgctgtactatcgcaaaaactggaggtcgacaggcaggaggggcgcgtggcgttgtttgaattactgattaatacgccagccacagggaatttgatccgtgaaggcaaactccatcagttggcccacgtgatacaaaccgggcagcagcaggggatgatgacattcgcccagagcgcgcaatggcgtcaggcgcagggacgactgtagcga

SEQ ID NO: 36996 - DNA, 678 bp, Salmonella paratyphi A
  misc_feature (311)..(311): n=g, a, t or c
atccgggacaaaatctccgccgcggcgagcgttgcggccgctcttcagaagaagttacgttgcttgcagtgagtaaaaccaaacctgcgagcgacatcgcagaagccattgccgccggacaacgggcatttggtgaaaattatgtacaagagggggtggaaaaaatccgccactttcaggaagcgaaagtggaaggcctgcactggcactttattggcctttacagtccacaaaagtcggctgggggcggcatgttgactggtgtataccatcgatcgcctgcgtatcgcctcgcgctgagcatcagcgtnccggataatctgccggcgctaaatgttctgatccaaatcaatatcagcgatggatacagcaaatcaggcattccgctgggaactggatgagctggccgcgcggtggaactacttccgtggcgcttcgcgtggctgatggcgatcccggcaccagagtcagattatgtaaggcagtttgaagtcgcacgtcaaatggctgtagcatttgccgggctgaaagcgcgctagccctgacgttgataccctatctctgggtatgagcgacgatatggaagccgcgattgcggcaggtagcacaatggtgcgcatcggcaccgctatctttggtgctcgtgattacacaaaaaattaaggaaaactgaggaac

SEQ ID NO: 36997 - DNA, 639 bp, Salmonella paratyphi A
atgaaaccgtatcagcgccagtttattgagtttgcgcttaacaagcaggtactaaagtttggcgagtttacgctgaaatccgggcgcaaaagcccctatttcttcaacgccgggctgtttaataccgggcgcgacctggcgttgttaggccgtttttatgccgaagcgctggtggattccggtattgaatttgatctgctgtttggccccgcgtacaaaggtattccgatcgcgacgacgacggcggttgcgctggcggaacatcacgataaagacctgccgtactgctttaaccgcaaagaggcaaaagatcatggcgaaggcgggagtctggtgggcagcgcgctacagggccgcgtgatgctggtggatgacgtgattaccgcaggtacggcgattcgcgagtcgatggagattattcaggcgcacagggctacactggctggcgtactgatttcgctggatcgtcaggaacgtggccgcggcgagatttccgcgattcaggaagtggagcgcgactatggttgtaaggttatctccatcattacgctgaaagacctgattgcctatctggaagaaaaacttgatatggctgagcatctggcggctgtgcgagcataccgggaagaatttggcgtg

SEQ ID NO: 36998 - DNA, 861 bp, Salmonella paratyphi A
atgatccgcagtatgaccgcctacgcccggcgtgaaatcaagggtgaatggggtagcgcgacctgggaaatgcgctcggtaaaccagcgttatctggaaacttactttcgtctgccggaacagttccgtagtcttgaacccgtcgtgcgcgaacgcattcgtacacgcctgacgcgcggcaaagtcgaatgtatgctgcgttttgaacccgatgccagcgcgcaaggcgagcttattctgaatgaaaagctcgcgaaacaattagttagcgccgcaaactgggtcaaaatgcagagcgacgaaggggaaatcaatccggttgatattttgcgctggccaggtgtcatggcggcgcaagagcaggatctggacgcgattgccgcagaaattttagccgcactggacggtacgctggatgactttatcgtcgcgcgcgaaacggaaggccaggcgctgaaagcgctgattgaacaacgtctggaaggcgtcagcgccgaagtagcgaaagtccgcgcgcatatgccggaaatcctgcaatggcagcgtgaacgcctggtcgcgaagctggaagatgctcaggttcagttggaaaacaaccgtctggagcaagagctggtgatgatggcgcagcgcattgatgtggcggaagagctggatcgtctcgaagcgcacgtcaaagagacttacaacattctgaagaaaaaagaggcggtaggtcgccgtctggacttcatgatgcaagaatttaaccgtgagtcgaacaccctggcctctaaatccatcaacgctgatgtaactaactccgctattgaattaaaagtgttgatcgagcaaatgcgcgagcagatccagaatattgaa

SEQ ID NO: 36999 - DNA, 1359 bp, Salmonella paratyphi A
  misc_feature (1088)..(1088): n=g, a, t or c
atggccaaaacgttatacgaaaaattatttgatgcccacgtggtctttgaggcgccaaacgaaacgccgctgctgtacatcgatcgccacctggtacacgaaggtacctcgccaggcgtttgacggtctgcgcgcgcaccatcgtccggtacgtcagccggggaaaaccttcgccacgatggatcacaacgtctcgacgcagaccaaagacattaatgcctccggtgaaatggcgcgtatccagatgcaggagctgattaagaactgtaacgagttcggcgtcgagctgtatgacctgaatcacccataccagggcatcgtccatgtgatggggccggaacagggcgtcaccctgccgggcatgaccatcgtctgcggcgactcccacaccgccacccacggcgcgtttggcgctggccttcggcatcggcacttctgaggtagaacatgtactggcgacgcaaaccctgaaacaggggcgcgctaaaaccatgaagattgaagtcacgggcagcgccgcgccgggcattaccgccaaagacatcgtgctggcgatcatcggtaaaaccggtagcgccggcggcaccggacacgtggttgaattttgcggcgagctatccgcgcgctgagtatggaaggccgcatgacgctgtgcaatatggcgattgagatgggcgccaaagccggtctggtcgccccggatgaaaccactttcaactacgtaaaagggcgtttgcacgcgccgaagggctgcgattttgacgaagccgtcgagtactggaaaacgctgaaaaccgatgacggcgcgacctttgatactgtcgtcaccctgcgagcagaagagatcgcgccgcaggtgacttggggcactaatccgggccaggtgatttccgtcaccgacatcatccccgatcccgcctcctttagcgatccggttgagcgcgccagcgccgaaaaagcgctggcttatatgggcttacagcctggcgtaccgttaacggacgttgctatcgataaagtctttatcggctcttgtaccaattcacgcattgaagatttgcgcgcggcggcggaagtgcccaaggggncaaagttgcgccgggcgtgcaggcgctggtggtgccgggttcaggtccggtgaaagcgcaggcggaagcggaaggtctggacaagatctttatcgaagcaggatttgaatggcgcttaccaggctgttccatgtgcctggccatgaataatgaccgcctgaacccgggcgagcgctgcgcatccaccagcaaccgtaactttgaaggccgtcagggccgcgggggtcgcactcacctggttagcccggcgatggccgccgctgccgccgtt

SEQ ID NO: 37000 - DNA, 263 bp, Salmonella paratyphi A
atgatgcgccggattttatcggtattactggaaaacgaatctggggcgttatcgcgggttatcggcctcttttcgcaacgcggatataatattgaaagcctgaccgtcgcgccgacagacgatccgacgttgtcgcgcatgactatccagacggtaggcgatgaaaaagtgcttgagcaaattgaaaagcaactgcacaagctggttgatgtgctgcgcgtcagcagctgggtcagggagcgcacgttgagcgggaaatcagg

SEQ ID NO: 37001 - DNA, 1011 bp, Salmonella paratyphi A
atgagcgttgtgcctgtagccgacgtactccagggccgcgtagccgttgaccaagaagtcaccgtgcgcggatgggtgcgtacccgccgagattcaaaagctggcatctccttcctcgccgtttatgacggctcctgctttgatcctgtacaggctgtcattaataattctctgcccaattataatgaagaagtattacacctgacgacaggctgctccgtggtagtaacaggtaaagttgtcgcgtcgccgggacaggggcaaagtttcgaaatccaggccacgaaagtagaagtcgcaggctgggtggaagatccggatacctacccgatggcggcaaaacgccatagcattgagtatctgcgtgaggtcgcgcatctcgcccgcgcaccaacctgattggcgcggtagcgcgcgtccgccatactctggcgcaggcgctgcatcgcttcttcgatgagcagggtttcttttgggtctctaccccgctgattaccgcttccgataccgaaggcgctggcgaaatgttccgcgtctcaacgttggatctggaaaacctgccgcgtaacgaccagggcagggtagattttgacaaagacttttttggcccagaatcattcctgaccgtctccggccagctcaacggtgacacgtatgcctgtgcgctgtccaaaatctatactttgtggccgacttgcgcgcggaaaattgcaacaccagccgtcacctgggacgcttctggatgctggagccgcacgtcgcgttcgcgatctggaagacaacgctcgtctggggaagcatgctgaactatgtcttcaaggcggttctggaagagcgtgcgtatgatatgaagttctttgccgaacgcgtgtataaagacgctatcgctcgtctggagcgttttgtctccaccgacttcgctcaggtggattaccacgatgcggtcgccattctggcacgctgtggtcagacatctgacacccggtgttctggggcgtcgactctcttcga

SEQ ID NO: 37002 - DNA, 1202 bp, Salmonella paratyphi A
atgacacaattcgcttctcctgttctgcactcgttgctggatacagatgcttataagttgcatatgcagcaagccgtttttcaccactactatgatgtgcaggtagcggctgagtttcgttgccgtggcgacgacctgctgggtatttatgccgatgctattcgcgagcaggtggacgcgatgcagcacctgcgcctccaggaggacgagttccagtggctctccggcctgcccttttttaaaccggattatctgaactggttacgcgagtttcgctataacccagctcaagtctgtgtcaccaacgataacggcaagctgaatattcgcttaaccggcccgtgcggtgaagtcattatgtgggaagtgccgctgctggccgtgatcagtgagctggttcatcactaccgctcgccaaacgcaggcgttgatcaggcgctcgacgcgctggaaagtaagctggttgatttcactgcgttaaccgccaatctcgatatgtcccgcttccatctgatggacttcggcacccgccgccgtttctctcgtgaagtgcagcaggcgatagttaaacgtctccagcaggagtcatggttcgtcggcaccagcaactatgatctcgcgcgtcgcctgggctgacgccgatgggcactcaggcgcacgaatggttccaggcgcatcaacaaatcagtccggacctggcgaccagtcagcgtgccgcgttggccgcctggcttaacgaatatccggaccagcttggtatcgccttgacagattgcattacaatggatgcgtttttacgcgatttcggcattgaattcgccagccgttatcaggggttacgccacgactcaggagaccctgtcgcatggggcgaaaaggcgattgcccattatgaaaagctggggattgatccgctgacaaaaacgctggtcttttcagataaccttgatctgcaaaaggcggtcgagctctatcgccatttcgcctctcgcgtgcagttaagcttcggcatcggtacccgcctgacctgcgatatccctcaggtaaaaccgctcaatatcgtgattaaactcgtggaatgtaacggaaagccggtggctaaactttccgacagccccggtaaaacgatctgtcatgataaagcgtttgtgcgcgcgctgcgtaaagcgttcgatctcccgcaggtgcgtaaagcaagttaa

SEQ ID NO: 37003 - DNA, 2355 bp, Salmonella paratyphi A
  misc_feature (1735)..(1735): n=g, a, t or c
taccgccatgactatcgcgcgccggattaccagattactgatattgacttgacctttgacctcgatgccgaaaaaaccgtggtcaccgcaataagccaggctgttcgtcatggcgcgcctgatgcgccctcttcgccttgatggggaagatttaacgctggtatctatccacgtcaacgatgcgccgtggacagtatataaggaagaagagggcgcgcttatcatcagcgacctgccagagcgttttacgttacgcattgtcaacgagataagtccggcggcgaatacggcgctggaaggattgtaccagtccggcgatgcgctctgtacccagtgtgaagcggagggcttccgccatattacctggtatcttgaccgcccggacgtactggcgcgatttaccaccaaaattattgccgataaaagcaaatatccgttcctgctttccaatggcaaccgtgttgcgcagggtgaactggagaatggccgtcactgggttcagtggcaagatccgttcccgaaaccgtgttatctgtttgcgctggtggccggtgattttgacgtgctgcgcgatacctttaccacccgctccgggcgtgaagtcgcattagaactgtacgttgaccgtggcaatctggatcgcgcgccgtgggcaatgacctcgctgaaaaattccatgaaatgggatgaagcgcgttttgggctcgaatatgacctcgacatctatatgattgtcgcggtggatttctttaatatgggcgcgatggagaataaaggtctcaatatctttaactccaaatacgtgctggcgcgaaccgataccgcgacggataaagattatctcgatattgagcgcgtgataggccatgagtatttccacaactggaccggcaaccgcgtcacctgccgcgactggttccagttgagccttaaagaggggctaaccgtgttccgcgatcaggagtttagctctgatttggggtcacgcgcggtgaaccgcatcagtaacgtacgtaccatgcgcggtttacaattcgcggaagacgccagcccgatggcgcatcctatccgcccggataaagtaatcgaaatgaataacttctacaccctcaccgtttatgaaaagggtgcggaagtcattcgcatgatccacacgttgctgggtgaggaaaatttccagaaagggatgcagctttattttgagcgccatgacggcagcgccgcgagcgtgtgatgacttcgtacaggcgatggaagatgcttctaatgtcgatttgtcccatttccgccgctggtacagtcagtccgcacgccgattgtaacggtaaaagatgattataatccggaaaccgagcagtacacgttgaccatcagccagcgcactccggcgacggcggatcaggcggagaagcagccgctgcatattccattcgccatcgaactgtacgataacgaaggcaacgtcattccgttgcaaaaaggtggtcatccggtcaatgccttgctgaacgtcacgcaggcggagcagacatttaccttcgataatgtctacttccagcctgttccggccttgctgtgcgagttttcagcgccggtgaaactggaatataaatggagcgatcagcagttgacgttcctgatgccatgcgcgcaatgatttctccgttgggatgcggcgcaaagcctgctggccacatacattaaactgaatgtggcgcgtcatcagcaggggcanacctatcgcttccggtgcatgtcgctgatcgttccgcgcagtactgttggatgagaaaatcgatccggcgttggccgcagaaattttaacgcctgtcggccaatgaaattgcggagctgtttgaggtcattgacccgatcgccattgcgcaagttcgtgaagcgctaacgcgtacgctggcggcagaactggcggatgagttcctggctatctataacgccaatcatctggatgagtatcgtgttgatcacggcgatatcggtaagcgcacctgccgaatgcttgcctgcgcttcctggcgttcggcgagacggagctggctaatacgctggtcagcaaacagtatcgcgacgccaataatatgaccgatgcgctggcggccctgtctgctgcggtggcggcgcagttgccgtgccgcgatacgctgatgcaggagtatgacgataagtggcatcaggacggcctggtgatggataaatggtttatcctgcaatccacaagcccggcgagaaatgtactggaaaccgtacgccgcctgctcaaacacggttctttcagtatgagaaacacgaagcgcatgccgttcatgaattggcgcggttgctggcagaacacggcgt

SEQ ID NO: 37004 - DNA, 534 bp, Salmonella paratyphi A
atgtctatgaaaaaatatttagcaatgatcacaggctcgcttcttgtctccagcagcgcgatggctgtttctgataacaccatcacctttcaaggggaagtctctgatgaaacgtgctctgtcgtgattaatggtaatcaggctaaacccgtcgtgttattgccaacagtaagtactaaagagttatcagaacaagggaaaaccgcggggccaataacgtttgatattgggctgtccgggtgtaccggctctaaggacaaaacaacaaaaatttccactgtctttgttggtaatcaggtcaccagtaacggtaacctgggtaatactggcagcgcgaaaaatgttgaagtccaattactcgacacttcaggggagccaatcaatctgaccggcggctttactggcgacggcgacctacagctggaaccaaatgcttctgaagcgagcgcgacttataccgcgcggtattactctaccgggaaagcagaggctgggacagtcgctgccacccttcaatacgccgtttcgtataaa

SEQ ID NO: 37005 - DNA, 1059 bp, Salmonella paratyphi A
atgctcagcggcgaactggcggtcgatccctccaacgcaggcacgacggggttattggatctggtgacccgcaactggaaacgtagcctgttacagatggcgggcctgcgttctgacattctctcgccggtaaaagaaaccgggacgctgctcggtcacatttcacagaaagcggctgaacagtgcgacctgcaagcgggtacgccggtcatcgttggcggcggcgatgtgcagttaggctgtctggggctgggcgtcgtacgcccggcgcaaacggccgtgctgggcggaaccttctggcaacaggtcgtcaatcttcccgcgccagtcaccgacccaaacatgaacgttcgcatcaatcctcatgtgatccccggtatggtacaaaccgagtctattagcttttttactgggttaacgatgcgttggttccgcgacgccttttgcgccgaggaaaaactaatcgctgaaaggttaggtattgatgcgtattccctgctggaagatatggccagccgggtgcctcccggcgcgcacggtgtgatgcccatcttctctgacgttatgcgttttaaacgctggtaccatgccgcgccgtcgtttatcaatctgtctatcgatcctgaaaagtgtaataaagcgaccctatttcgcgcgctggaagagaatgccgccattgtttccgcctgcaatttacagcaaattgccgcgttttccggcgtacaggccgactcgctggtttttgccggcggaggatctaaaggcaaattatggagccaaatacttgccgacgttacgggactcaccgttcacgtacctgtcgtcaaagaagctaccgcgctagggtgcgctattgccgcaggcgttggcgtgggtgtctggccatcgctggcggaaacgggagaaaagctagtgcgctgggatcgggagcataaacctaatcctgaaaatttcgctgtctatcagcaggccagagaaaaatggcaggccgtttatcaggatcaacgcgcgctggtcgatggtggcttaacgacatccctctggaaagcgccaggcctg

SEQ ID NO: 37006 - DNA, 954 bp, Salmonella paratyphi A
atgacaatgagcgataatacgttggtatctgattatggaatgtgcgaagaagagcaggtggcgcgtattgcctggttctactatcacgatggattgacgcagagtgaaatcagcgagcgtctggggctaacccggctaaaggtttctcgtctgctggagaaagggcatcagtccggtattattcgcgtacaaatcaactcccgctttgaagggtgtcttgagtatgaaaatgccttgcgcaaccacttcgcattgcagaatatccgcgtgctgccggcattacccgatgccgatattggtctgcgcttaggaatcggcgccgcccatatgttgatggagtcactgcggccacagcaattgctggccgtcggctttggcgaagccacgatgaccacattaaaacgcctcagcggatttatctcggcgcaacaaatccgactggtcacgttatccggcggcgtggggccgtatatgaccggaataggccagcttgatgccgcttgtagcgtaagtattatgcccgcgccgctgcgcatcatcgcaggaaattgcctgcacgctgcgcaatgaaaatagcgtgcgggatgtgatgctcacagcgcaagctgccgatgccgccatcgtggggattggggcaattaaccagaaagatcaagccagtatcttaaaatccggttatatcactcagggtgaacaactcatgattggccgcaaaggcgcagtaggcgatattctgggctatttttttgatgctcatggcgaaattattccagacatcaaaatccataacgaattaattggcctgaagttaaattcactttccacgatcccaaccgtgattggcgtccggcggcgaacaaaaagcagaagctattattggctatgcgcggtaactatatcaatgcgctggttaccgatcagaaaaccgcagggaaaataattcaacttattgaa

SEQ ID NO: 37007 - DNA, 836 bp, Salmonella paratyphi A
gctgcgcctgccgctggtagcaccctggacaagatcgctaaaaatggcgtgatcgtcgtcgggcatcgcgaatcttctgtgcccttttcttattacgacaaccagcagaaagtggtcggctattcccaggactactccaacgccattgtggaagcggtaaaaaagaaacttaacaagcccgatctgcaggtgaagctgatcccgatcacctcgcaaaaccgtattccgctgttgcaaaacggaaccttcgattttgaatgtggttcaacgactaacaaccttgagcgccagaaacaggccgccttctccgatacgattttcgtcgtcgggacgcgactgctgactaaaaaaggcggcgatattaaagatttcccggatctgaaaggcaaagcggtcgtcgtcacctccgggacgacctctgaaattctgctgcataagcttaacgaagagcaaaagatggggatgcgtattattagcgcgaaagaccacggtgactcgttccgcaccctggaaagcggtcgcgccgtcgcctttatgatggatgacgcgctgctggccggcgagcgcgccaaagccaagaaaccggataactgggagattgtcggcaaaccgcagtcccaggaagcctacgcgtgtatgctgcgtaaaaacgaccctgagtttaaaaagctgatggacgataccatcgctcaggcgcaaacctccggcgaacggaaaagtggtttgataagtggtttaaaaatccgatcccaccgaaaaacctgaacatgaatttcgagttgtctgacgagatgaaagccctgttcaaagcaccgaatgataaagcgcttaactaa

SEQ ID NO: 37008 - DNA, 941 bp, Salmonella paratyphi A
  misc_feature (290)..(291): n=g, a, t or c
  misc_feature (330)..(330): n=g, a, t or c
gcactgcccattattattgattgcgatccgggtcatgatgacgcgatcgccctcgttctcgccctcgcctcccctgaactggaagtgaaagcgatcacctcttccgccggcaaccagacgccggagaagaccctgcgcaacgtgctgcggatgctgacactgctcaaacgcccggatattccggtggcgggcggcgcggtgaaacctctcatgcgcgaactgattatcgccgataacgttcacggcgaaagcccgctcgacggcaccgcgctgcccgaaccgtcattcgnncccgcaaagcggcactgccgttgagctgatggcaaaaancctgcgtgagagctcacagccagtcaccatcgtctccactggcccacagaccaacgtggcgctgctgctgaatagccatccggaactgcacgcgaaaattgcgcgtattgtgatcatgggcggcgcaatgggattggggaactggacgcccgctgcggaatttaatatttacgtcgaccccggaagccgccagaaaattgtcttccagtcaggtattccggtggtgatggccgggctgaacgtcacccataaggcgcagattcacgccgccgatatcgaagctttcgcgccattggcaacccgatttccaccatcgtcgccgaactgctggacttctttatggagtaccacaaagacgaaaaatggggatttgtcggcgcgccgctgcacgacccgtgcaccatcgcctggctgctgaaacccgagattttcaccaccgttgagcgttgggttggcgtggaaacccaggggaaatacacccaggggatgacggtggtggattattatttcctgacggggaataagccgaatgcgacggtgatggtcgatgtagaccgccaggatttgtcgatttgctggcggaacggctgcaatactacgcataaagcgca

SEQ ID NO: 37009 - DNA, 1099 bp, Salmonella paratyphi A
cgtactgccggaaataccgctctgtgtaccgtgggaaaaagcggtaacgatctgcactatcgcggttacgacattctcgatctggcggagcactgcgaatttgaagaagtcgcgcatttactgatccacggaaaattaccgacccgcgacgactgaacgcgtataaaagcaaattaaaaggctgcgcgattacccgccaatgtccgtaccgttctggaagcgttaccggcggcctcgcacccgatggacgtgatgcgtaccggcgtttccgcgctgggctgcaccctgccggaaaaagaggcacataccgtctccggcgcgcgcgatattaccgataagctgttggccacgctcagctctatccttctttactggtatcactacagccacaacggcgaacgtattcagccggaaaccgacgatgattccatcggcggccatttcctgcatctgctgcacggtgaaaagccaacccaaagctgggaaaaggcgatgcatatttcgctggtgctgtatgccgagcatgagttcaacgcctcgacgtttaccagccgggtgattgccggaaccggctcggatgtctactccgcgattatcggcgcgattggcgctgcgcggcccgaaacacggcggggcgaatgaggtgtcgctggaaattcaacagcgttatgaaacgccggacgaggcagaggcggatatccgtaaacgcgtggaaaacaaagaggtggtgattggctttggacatccggtttacaccatcgccgacccgcgccatcaggtgatcaaacgggtggcgaaacagctttcagaagaaggcggctcgctgaagatgtaccacatcgccgaccgtctggaaacggtgatgtgggagaccaaaaagatgttcccgaatctcgactggttttcggcggtctcctacaacatgatgggcgtccctaccgaaatgttcaccccgctgtttgtcatcgcccgcgttaccggctgggcggcgcacattatgaaacagcgtcaggacaacaaaattattcgtccctctgccaactataccgggccggaagatcgtccgtttgtctcgatagacgatcgttgctaactcact

SEQ ID NO: 37010 - DNA, 632 bp, Salmonella paratyphi A
atgactccgtttacacaatcacagcgcataaaagcgttgttctggtatcgctattccatttactggtgatcatttccagtaactatctggtgcagctccccatcactatttttggtttccacacgacctggggcgcgtttagttttccttttatttttctcgccaccgatcttaccgtgcgtatttttggcgcaccgctggcgcgccgcattatcttcgccgtcatgatccctgcgctgctggtgtcatatgtggtgtcatcgctgttctatatgggtgcctggcaaggtttcgccgcgttgggaactttaatctgttcgtcgcccgtatcgccgccgccagctttatggcctacgcgctgggacagatccttgatgtccatgtgtttaaccgcctgcgccaaaatcgtcgctggtggctggcgccgaccgcttcaacgctgtttggcaatatcagcgatacccttgcctttttcttcattgcgttctggcgacgccgatgcctttatggccgggcactggatggaaattgcgctggtggattattgctttaaggtgctcatcagcattattttcttcctgccgatgtacggcgttctactgaatatgttgctgaaaaagctggcagataaa

SEQ ID NO: 37011 - DNA, 1366 bp, Salmonella paratyphi A
atggcactttggggtgggcgttttacacaggcggcagaccagcggtttaaacaattcaatgattcgttgcgcttcgattaccgtctggccgacgaggatattgtcggttctgtggcctggtccaaagcattggtcacggtaggcgtactgactgccgatgagcaacgacagttggaagaagcgctgaacgtgctgctggaggaggttcgcgcgaatccgcagcaaatcctgcaaagcgatgcggaagatatccatagctgggtggaaggtaagctcatcgacaaagtgggccagttgggtaaaaagctgcacaccgggcgcagccgtaacgatcaggtggcgacggacctgaaactgtggtgcaaagagacggtgagggaactgcttaccgctaaccgcctgctacagagcgcgctggtggaaaccgcgcaggtgaaccaggacgcggtaatgccgggatatacccatctgcaacgcgcgcagccagtgactttcgcccactggtgtctcgcgtatgtcgaaatgctggcgcgcgatgaaagccgcctgcaggacacgcttaaacgtctggacgtgagtccgctaggttgcggcgcgttggcgggaacggcctatgaaattgaccgtgaacaattggcaggctggctgggctttgcgtctgcgacccgcaacagcctggacagcgtgtccgatcgtgaccacgtactggaactgctttctgatgcggctatcggcatggtgcatctgtcacgctcgcggaagatctgattttctttaattctggtgaagcgggttttgtagagctttctgaccgcgtgacttccggttcatcgttaatgccgcagaagaaaaacccggacgcgctggagctgattcgcggtaagtgcggtcgcgtacaaagggcgctaaccggcatgatgatgaccttaaaaggtctgccgctggcgtacaacaaagatatgcaggaagacaaagaagggctgttcgatgcgctcgatacctggcttgactgcctgcatatggcggcgttggtgctggacggtattcaggtgaaacgcccacgttgtcaggaggcggcgcaacaggggtattctaacgccaccgagctggcggattacctggtcgcgaaaggcgtgccgttccgcgaagcgcaccatattgtcggcgaggcggtggtagaagctattcgccagggtaagccgttggaagcgttccgctggccgatttacagaaattcagccgcgtgattggcgacgatgtgtatccgatattgtctttgcagtcgtgtctggataaacgggcggcaaaaggcggcgtttctccacagcaggtggcgcaggccatcgacgatgccagggcgccctcg

SEQ ID NO: 37012 - DNA, 977 bp, Salmonella paratyphi A
atgggtctggttaagcaaggagcacgcgtcgcggtgattgagcgttatcataacgttggcggcggatgtacccactggggtaccatcccatccaaagcccttcgccacgccgtcagccgcattattgaatttaatcaaaacccgctctatagcgaccactcccgtctccttcgttcttctttcgccgatatccttaatcatgccgataacgtgattaatcaacaaacgcgtatgcgtcaggggttttatgagcgtaaccactgtgaaatcttgcagcaacgcccattttattgacgaacataccctggcgctggaatgccatgacggcacggttgaaaccctgacggcagaaaaatttgttattgcctgtggttcgcgtccttaccatcccaatgatgtggatttctcgcatccgcgcatttatgacagcgactcaatcctgagtctccaccatgaaccgcgccacgttattatttacggcgcaggcgttatcggctgcgaatatgcgtccatattccgcggtatggatgtgaaagtggatctgatcaacacccgcgatcgcctgctggcctttctcgatcaggagatgtccgactctctctcttaccatttctggaatagcggcgtggttattcgccacaatgaagagtatgagaaaatcgaaggctgcgatgatggcgtcatcatgcacctgaaatccggcaaaaaactgaaggctgactgcctgctctatgctaatggcgtaccggtaacaccgattcctggcgctggagaatattggtctggaaacagacagccgtggacagctcaaagtcaacagtatgtaccagaccgccctgccgcacgtctatgcggtgggcgacgtgattggctatcccagtctggcctccgccgcctacgatcagggacgtattgcagcgcaggcgctggtgaaaggcgaagcgaccgcgcatcttatcgaagatatccccaccggg

SEQ ID NO: 37013 - DNA, 1393 bp, Salmonella paratyphi A
atgacacgacaaaacgagaattataaccgttatctcttgagtgactggcgacccgaaaatccagccttctgggagaataaagggaaaggcatcgccagaagaaacttatggatttcagtaagttgtttgctcctggcattttgcgtctggatgttgtttagcgctgttgccgtcaacctcaataaaattggatttaattttaccaccgaccaactctttttattaaccgcattaccttctctttccggcgcaatattacgcgtcccctactcctttatggtgccactgtttggtggccgtaaatggaccgtattaagtaccgtaatattgattattccctgcgcctggctgggattcgccgtgcaaaatcccgccacccctttcggggtatttatgctcatcgctctgttgtgcggttttgcgggggcaaacttcgcgtccagtatgggcaacatcagttttttctttccaaaagccagacaaggtagcgcgttgggtattaacggcggactgggaaatcttggcgtcagtgtgatgcagttgcttgcgccgctggttatttttctgccgatatttacttttttaggcgtccggggcgtgcgcaacctgatggctccctgctcgccctcactaacgccgcctggatctgggtgccgttactggctgtcgcgacgcttgccgcctggtttggtatgaacggtatcggcagttcaaaagcgtctgtcgcctcgcaattgccggtgctaaaacgtctgcacctgtggctgcttagcctgctgtacctggcgacattcgggtcattcatcggcttttccgcaggtttcgccatgctcgccaaaacgcaatttcccgacgtaaacattctgcaactggcgttctttggcccctttatcggcgctggcgcgttcggcaggcggcgtgatctccgataaattcggcggcgttcgcgtcacgctcattaattttatctttatggcgctgtttaccgccctgctattcctcacgctgccaggctccggcgcaggcagctttagcgcgttctatcttgtttttatgggcctgtttttgacagcgggtctcggcagcggttctaccttccagatgattgcggtgatcttccgtcagatcacgctctacaacgtcaaactgcgcggcgggagcgatgagcaggcgcagccgaagcggtgacggataccgccgccgcactcggttttatctccgctattggcgctgtgggcggcttctttattccaaaagcgtttggcacctctttggccttgaccggctcgccgtgggcgccatgaaaatctttttgctgttttacatcgcttgcgtcctgctgacctggctggtctacgggcgtcgtaagcctaaacaacaataacaacatacg

SEQ ID NO: 37014 - DNA, 1505 bp, Salmonella paratyphi A
atgtttcgtcagtggttaacgttagtcattattgtgctggtctatattcctgtcgccattgatgccacggtcttgcatgtcgccgccccgacactgagtatgacactgggggcagcggcaacgagctgctgtggatcattgatatttattctttggtcatggctggcatggtgttgccgatgggcgcgcttggcgatcgtatcggttttaaacgcctgctgatgctgggcgggacgctctttggcctggcgtcactgacggcggcgttttcgcataccgccagttgcttattgccaccagggtattactggctattggcgcggcgatgattgtaccggcgacgctggccgggatacgcgccaccttttgtgaagagaagcatcgcaacatggcgctgggcgtctgggcagcggtaggttcgggcggacggcgtttggcggctcatcggcggcatcttattagagcatttttactggggatcggttttcctgatcaacgtgccgattgtgctggtcgtcatggcttaaccgcccgctatgttcctcgccaggcgggccgtcgcgatcaaccgctcaatcttggccatgcggtgatgctgattgttgctattttgctgttagtctatagcgttaaaaccgcgctgaaagggcatctgtcgctgtgggtcatctcgcttaccctgcttaccggcgcgttgctcctgggactctttatccgcacacagcttgcgacatcgcgtccgatgattgatatgcgactatttacccatcgcattatcctgagcggcgtcgtgatggcgatgaccgcgatgatcacactggtgggttttgagctgctgatggcgcaagagctgcagtttgttcacggactatcgccttatgaggccggggtatttatgctgccggtgatggtcgccagtggattcagcgggccgattgcgggcgcgctggtctcgcgtctgggactacggctggtcgcgacgggcggcatggcgttaagcgcgctgagtttttatggcctggcgatgacggatttcagcacccaacaatggcaggcctgggggctgatggcgctgctgggatttagcgccgccagcgcattgctggcttccacgtcggcaattatggccgctgcgccggcagaaaaagcggcggcggccggcgcgactagaaacgatggcttatgaactgggcgcgggactgggcattgcattttcggtctgttgttaagccgtagcttctccgcgtctatccgtctgcctgccgggcttgaggcgcaagagattgccagagcgtcatcttcaatgggagaagccgtgcagttggcgaatagctgccgcccacgcaggggcaggcaatactggacgccgccagacatgcctttatctggtcgcataggtggcgttaagcagcgccgggagtatgcttcttttgctggcggtagggatgtggttcagcctggcaaaagcccaacgccgataacataacgcctggtgagataagcgc

SEQ ID NO: 37015 - DNA, 878 bp, Salmonella paratyphi A
atgacatcacaaaaagcaacgctaatagggcttgttgccatcgttctgtggagcacgatggttgggttgattcgcggcgtcagcgaaggtctcggaccggtagcggcgcagccatgatctattcattaagcggcctgctgctgatttttaccgtcggattacctgatatccgtcgtttcccggggcgttacctcatcgcaggcagcgtactgtttgtcagttatgaaatatgcctggcgctttctcttggttatgccgccactcgccatcaggctatcgaagtcggcatggttaactatttatggcccagcctgactattctgtttgccattctttttaatgggcaaaaaactaactggcttattgttcccggattgcttattgcacttactggcgtttgctgggttctggggggcgagaatggtcttaatgccgaagaaattatcaacaatgtcgccaccagtccgctaagttatttactggcatttcttggggcgtttatatgggcgacgtactgcacggtcaccaataaatatgcgcgtggttttaacggtatcaccgtctttgtgttactcaccgccctggcgctgtggttacactattttcttacgccgcaacctgccatgatatttagcctaccggtgattgctaaactttttaccgcggcattaacgttagggtttgcctacgccgcatggaatgtgggcatacttcatggcaatgtgactatcatggccgtagggtcttattttacccccgtcatgtcctctgctctggccgcgctgttactcagctcgccactgtcattctccttctggcaaggcgcagtcatggtttgcgtaggttcgctactttgttggctggcaacgcggcggcgc

SEQ ID NO: 37016 - DNA, 834 bp, Salmonella paratyphi A
atggaaatgctcgaagagccgatgttttggcggctggcagcagcgctggcgtcatcatgccgccacgctaaactgcgccatgacattcagcatttttcttccgccgactcaggataatgaaccgcctccggtactgtactggttgtccgggttgacctgcaatgatgagaactttaccaccaaagcaggcgcgcagtatcgcagcagaactgggcattgtattggtgatgccggataccagtccacgcggtgaacaggtcgccgacgatagcggatacgatttaggccacggcgccgggttttatctcaatgccacacagccgccctgggccagccattatcgcatgtacgattacctgcgcgatgagcttccggcgcttatccagacacagtttaacgtcagcgaccgttgcgccatcagcgggcactcgatgggcggccacggcgcgttaatcatggcgctgaaaaatccgggaaaatacaccagcgtctctgcttttgcgcccatcgtcaaccccagccgcgtgccgtggggaatcaaagcgcttaccgcttatctcggcgaagatgaatcagcctggactgagtgggatagctgcgaattaatgctggccagccagccgcaggacgccattcctgtgctcatcgatcagggtgacagcgatcaattcctcgccgatcagcttcagccgccgtactgcggaagccgcgcggcaaaccgcctggccgatgacgctacgaatccagcccggctacgatcatagctattattttattgcgtccttcattgaggaccatctgcgctttcatgcccggtatttacgggacgagcgt

SEQ ID NO: 37017 - DNA, 918 bp, Salmonella paratyphi A
atggaacttaaggattattacgccattatgggcgtgaaaccgacggacgatctcaagacgattaagaccgcctatcgccgactggcccgcaagtaccatccagatgtcagcaaagaacccgatgccgaagcccgtttcaaagaggttgctgaagcatgggaagtgctgagtgatgagcaacggcgcgccgagtatgaccagttatggcaacaccgtaacgatccacaatttaatcgccagttccagcaacacgaaggccagccgtataacgctgaagattttgatgatattttctcgtctatttttggtcagcacggtcgccattcgcatcaccgccacgccgcacgcggtcatgatatcgaaattgaagtggcggtattcctggaagaaacgctggaagagcaccagcgtacgattagctattccgtccccgtttataacgcgttcggcctggtggagcgggaaattcccaaaacattgaatgtgaaaatcccggctggcgtcagcaacgggcaacgaatcagactgaaaggccagggcacgccgggggaaaacggcggacctaatggcgatttatggctcgttatccatattgccccgcatccgctctttgatatcgtcaatcaggatctggaagtcgtccttccgcttgccccatgggaggcggcgctcggcgctaaggtgtctgtgccaacgcttaaagagcgtattttgctgaccattccccccggcagccaggctggtcagcggctgcgtatcaaaggaaaaggattagccagtaaaaagcacactggcgatctctatgccatcatcaaaatcgttatgccgccgaaacctgacgagaaaacagctgccctgtggcaacaactggcggacgcgcagtcgtcctttgacccacgccagcaatgggggaaagca

SEQ ID NO: 37018 - DNA, 614 bp, Salmonella paratyphi A
caaatgttcagggcgctggtcgctcgctgcttacgctcccggtgtggctttacgctgcgccgcgcgtcattaccctctctcccgccaatacggagcttgcttttgccgccgggattacgcccgttgggtcagcagctattccgactacccgcccgaagcgcaaaaaatagaacaggtctctacctggcagggaatgaatctggaacgcattgtggcgctgaagccggatctggtcgtcgcctggcgcggcggtaatgcggaacgcaggtaaaccaactgacgtcattaggtattaaggtcatgtgggtggacgcggtaacatcgaacagatcgccgacgcgctccgccaactggccgtctggagcccgcagccggaaaaggctcagcaggcagcgcagacattgctaaatgagtacgccgcgctcaaagtcgagtatgccggtaagctaaaaagcgcgtctttcttcagtttggcatgaatctttgtttaccagtggtaaagggtctattcaacatcaggtgtttgacacctgcggcggagagaacatctttgctgacagccgcgtgtcgtggccgcaagtctagcgtgagcaggtgctggtgagggattctca

SEQ ID NO: 37019 - DNA, 821 bp, Salmonella paratyphi A
atgcagcagttacagaacgttattgagaccgcttttgagcgccgcgccgatattacgccggctaatgtagataccgtgacccgagaggcggtaaaccaggtcatttctctacttgattccggcgcgctgcgtgtcgcagaaaaaatcgacggtcagtgggtcactcaccagtggttgaagaaagcggttctgctctctttccgtattaacgataaccaggttatcgacggtgcggaaagccgctacttcgataaagtcccgatgaaattcgctgattacgacgaagcgcgttttcagaaagaaggcttccgcgtcgttccgcctgcggccgttcgtcagggcgcatttatcgcccgcaacaccgtgttgatgccgtcttacgttaacatcggcgcctacgttgacgaaggcaccatggttgacacctgggcgactgtgggttcctgtgcgcagattggtaaaaatgttcacctttccggcggcgtgggtatcggcggcgtactggagccgctgcaggctaacccgaccatcattgaagacaactgctttattggcgcgcgttctgaagtcgtggaaggcgtcattgtcgaagaaggttccgtcatttccatgggggtatacctcggccagagcaccaaaatctacgatcgcgagaccggtgaagttcactatggcgcgtaccggcgggctccgtggtcgtattcggcaacctcgcgtcaaaagacggcaagtacagtctgtactgcgcggtgatcgtgaaaaaagtcgacgccaaaacgcgtggtaaagtgggcattaacgaattattgcgcactattcga

SEQ ID NO: 37020 - DNA, 1314 bp, Salmonella paratyphi A
ccttgagaggcggagtctatgtccggaacgtataatgctactattcgccgggtggtggtttccgcctggataggaaactccattgaatattatgattttctattatacggcctggcaagcgcgctggtatttggcccgcttttttttcctggcgccagcacattgactgaaacattatcttcttttaccagtatcggcgtgggatacatctcccgcaccctgggcgcgctattttatggcaacaggggagatacgcttgggcgtaaaaacacgttattaatcacgttaggggggatgggcgcggtcactttctcatcggttgcctgccttcttacgccagtattggcgcgtggcgcctgctttactggttattctgcgttttctacagggatttatggttggaggcgaatggggaggcgccatgttgatggtcgtggaatatgctgctggaaagcaccgggggcggttaagcgcgctatcgcaaacaggaggactcacgggacaattattggcgacaggcgtatttatagtcgtgaccccaattaccgaagaagcgttgttatcgtggggatggcgtattccttttctgctcagtgcgcctttggtgttgccgggattatatatgcgtcatcgtctggatgagacgcctgtcttccgtgcgtttaaaaagcagcaggccattaatcataggcagcaaagagaagaaaggccggtggtcaaagtagtacgagaacaatggcgtagcattttgctgattataattctgcgttttgcggaaagcgttcccttttttcttgctaccgtcttcgcggtttcctgggcgacgacgcagcttgggattgccagcctgactattctgtacattgtaatgttcacctgtctgctggcgtatcccatgcacgtgctatttggcatcatgtcggatcggcgtggctgccgtcaggtgtatattttcggcgcgctttttgtcgcggcaatggcttttccctttttctggctgctggaaagccgttcgctcatactgatgacaatgggctacgttctgcttattaacattggtcataattcactgaatgccgtgcaaccttcttttttcgccggactgtttcatccgcctgtatgctacagcggttcatcaattggcgctcagttgggggcggttgtggcagggggattcacgccgttctaatctaaagcgttaagcgcagtctatgataacagttggactttggttgccggttatgtcgttttgatgcgttggcttcggcgtttgcggcaaagattgcgccgaaaccgttttaccgcattcgccgt

SEQ ID NO: 37021 - DNA, 1130 bp, Salmonella paratyphi A
cttgataccaaaatggcgcaggatatcgtggcgcgcactatgcgcatcatcgataccaatatcaacgtaatggatgcccgcgggcgtattatcggcagcggcgatcgggaacgtattggtgaattgcacgaaggcgtgctgttagtgctgtcgcagggccgggttgtggatatcgacgacgccgtggcgcgacacctgcacggggtgcgtcaggggattaatcttcccttacgccttgagggcgaaattgtcggcgtgatcggcctcaccggcgaaccagagcatctgcgtaaatatggcgaactggtgtgtatgactgccgagatgatgctggaacagtcgcggttaatgcaccttttggcgcaggatagccgtttgcgcgaagagctggtgatgaacctgattcaggccgaagaaaatacccggcgctggtggaatgggcgcagcgtttggggatcgatttgaaccaccggcgtgtggcggcggtggtggaagtcgacagcggccagcttggcgtcgatagcgcaatggcggaacttcagcagttgcagaatgcgcttaccacgccggagcgtaacaacctgatagccattgtttctctcaccgagatggtggtactcaaacccgccttaaacccgtttggtcgttgggatgctgaagatcatcgtaagcgcgtagagcagcttatctcgcgcatgaaagagaatggtcagctacgttttcgcgtggcgctgggcaattactttaccgggccgggcagtattgcacgctcataccgcacggcgcgcaccacgatgatggtcggcaaacagcggatgccagaaagccgcagctatttttatcaggatttgatgctgccggttctgttagatagcctgcgtggcggctggcaggccaatgagctggcgcgcccgctggtaaaactcaaagcgatggataacaacgggttattacgtcggacgctgacggcgtggtttcgccataatgtccagccgctggcgacctctaaggcgctgtttattcatcgtaacacgctggaatatcggctaaatcgtatttcggaactgaccgggctggatttgggaaattttgacgatcggctgttgctgtatgtggcgctacaattggat

SEQ ID NO: 37022 - DNA, 1486 bp, Salmonella paratyphi A
atgaaaaaaaccacattagcaatgagtgcactggctctgagtttaggtttggcattgtcgcctctgtctgccacggcggctgaaacgtcctcttcagacaatgactgcccagcagatgccaagcctggaccgatgctcgaaaaagtgatgccatcggtggtcagtattaatgtagaaggtagcaccacggtgaatacgccgcgtatgccgcgtaatttccagcagttctttggcgatgactccccgttctgccaggacggtttctccgttccagaattctccgttctgccagggcggcggtaacggcggcaacggcggtcaacaacagaaattcatggcgctgggctccggcgtaattattgacgccgcgaagggctacgtcgtcaccaacaaccacgtggttgataacgccagcgtgattaaagtacagcttagcgatgggcgtaaattcgatgctaaagtagtgggcaaagatccgcgttctgatatcgcgctgattcaaattcagaatccgaagaacctgacggcgattaagctggcggactccgacgcgctgcctgggggattataccgtcgctattggtaacccgtttggtctgggcgaaacggtgacgtcaggtatcgtttcggcgctgggcgtagcggcctgaacgtagaaaattacgagaactttattcagaccgacgccgcgattaaccgtggtaactccggcggcgcgctggtgaacctgaacggtgagctgatcggtattaacaccgcgattctggcgccggacggcggtaacatcggtatcggcttcgctatccccagtaacatggtgaaaaacctgacgtcgcagatggtggaatacggccaggtgaaacgcggcgaactggggatcatggggactgagctgaattccgaattggcgaaagcgatgaaagtcgatgcccagcgtggcgcgttcgtcagccaggtgatgccgaattcgtccgcggcgaaagcgggtatcaaagccggggatgtcattacctcgctgaacggtaaaccgatcagcagctttgcgctgcgcgctcaggtcggcactatgccggtcggcagcaaaatcagcctcggtctgctgcgtgaaggtaaagcgattacggttaatctggaattgcagcagagcagccagagtcaggttgattccagcaccatcttcagcgggattgaaggcgctgaaatgagcaataaaggccaggataaaggcgttgtggtgagcagcgtgaaagcgaactcacccgccgcgcaaattggcctcaaaaaaggcgatgtcattatcggcgctaaccagcagccggtgaaaaatatcgccgagctgcgtaagattctcgacagcaaaccgtcggtgctggcgctgaatattcagcgtggtgatagttctatttatttgctgatgcagtaatcacctttgtcccccttccatcatggaagggggcaacacttttctgtgaaaccccccacaact

SEQ ID NO: 37023 - DNA, 698 bp, Salmonella paratyphi A
atgaaaatcggcatcattggcgcaatggaagaagaagttacgctgctgcgtgacaaaattgacaaccgtcagacgattacgctgggcggctgcgaaatttacactggccagttgaacggcaccgaagtggcgttgctgaaatccggtatcggtaaagtcgcggcgcgctgggcgcaacgttgcttctggggcactgcaagccggacgtgatcatcaataccggttccgcaggcggtctggcgtccacgctgaaggtcggcgatatcgtcgtctctgacgaagcacgttaccacgacgctgatgtgaccgctttcggctatgaatacgggcaattaccgggctgtccggccggatttaaggccgatgataagctgatcgccgccgcggaatcctgcatcagggagctgaatctgaacgcggtacgcggccttattgttagcggcgacgcgtttattaacggttccgtcgggctggcgaaaatccggcataacttccccgacgcggtcgccgtagagatggaagccaccgctatcgcccacgtctgccataacttcaacgtgccgttcgtggtggtacgcgctatttctgacgtggccgatcagcaatcgcacctcagctttgacgaattcctcgcggtggcggcgaaacagtcgactttgatggtcgaaacgctggtacagaaactggcgcatggctaa

SEQ ID NO: 37024 - DNA, 766 bp, Salmonella paratyphi A
atgaaattaaacatccgagcgcaatctgcacaaaacctgcacaataattcccccatcgttctcgttcatggcctgtttggcagcctggataacctcggcgtactggcgcgcgatctggtgaccgatcatgacattattcaggtcgatatgcgcaatcatggtttatcgccgcgcgatccggtcatggattatccggcaatggcccaggatcttctggatacgcttgacgcgcagcagattgaaaaagcgacgtttattggtcattccatgggcggaaaagcggtaatggcgctgacggcttggcgcccgatcgcatcgatcgtctggtcgcgattgatatcgcccccgtggattatcacgttcgccgccacgatcgtattttcgcggccattaacgccgtcagcgaatccgacgcgacatcccgccaacaggcggcagggattatgcgccaacacctcaacgaagaaggcgtgatccagtttctgttaaaatcctgggctgaaggcgaatggcgttttaatgttccggtattatgggagcagtatccgcatatcgtcggctgggaaaccattccgccctgggaacatccggcgctgtttattccaggcggtaactcgccgtacgtcaccgaagcgtaccgcgacgcgctgctggcgcaattccctttgcgcgcgcgcatgtgatcgccggcgcgggccactgggtacatgccgaaaaaccagaggcggttctgcgcgccatccgccgttatctgcacgataaacgc

SEQ ID NO: 37025 - DNA, 291 bp, Salmonella paratyphi A
atggccaaagaacaaacggaccgtacgacattagatctgttcgcgcacgagcgtcgcccgggacgacctaaaacgaatccgctttcgcgcgatgaacagttacgcatcaacaagcgcaaccagttaaaacgcgacaaagttcgtggcctcaagcgtgtcgaattaaaactcaacgcacaagcggttgacgcgctgaatgagctggccgaagcgcgcaacattagccgcagcgagctcattgaagaaatattaatgaagcagcttatggcgctgcgcgccacgggtttagtc

SEQ ID NO: 37026 - DNA, 402 bp, Salmonella paratyphi A
atggagttacgaaacaccgcgtttcatctgttacgccaactttttcagcaacataccgcacgctggcagcatgaactaccggagctcaccaaacctcaatatgcggtgatgcgcgttattgctgaacatccgggtattgaacaggtcgatctgaccgaagcggcggtcagcactaaagcgacgctggcggagatgttaagccggatggaaaatcgtgggctggtaaagcgagaaaacgatccgctggataaacgtcggcgttttgtctatctcacggctcagggccaaacgttgctcgccgccgcgataccactgggggatcgcgttgacgatgagtttttggggcgactgagcgctgaagaacgcgaacagtttacgcgactggtacgcaagatgatgacg

SEQ ID NO: 37027 - DNA, 1325 bp, Salmonella paratyphi A
agttcggcgctgaacggtatcgcgggtctggaccacgaagatatggcggaagacatgaccccgctgtatcaggcgatcgttgatcatgttccggcgccggacgttgacctcgatggtccgttgcagatgcagatctcccagctggactacaacaactacgttggcgttatcggcattggccgtatcaaacgcggcaaagtgaagccgaaccagcaggtcactatcatcgatagtgaagggaaaacccgtaacgcgaaagtaggtaaggctggacgcatctgggtctggagcgtatcgacagcgatatcgccgaagcgggcgatatcattgcgatcaccggtctgggcgagctgaacatttccgacaccatctgcgacccgcagaacgttgaagcgctgccggcgctgtccgttgatgagccgaccgtgtctatgttcttctgcgttaacacctcgccgttctgcggtaaagaaggtaagtttgtgacttctcgtcagattcttgaccgtctgaacaaagagctggtgcataacgtggcgctgcgcgttgaagaaaccgaagatgcggatgcgttccgtgtatccggtcgtggcgaactgcacctgtccgtgctgattgaaaacatgcgtcgtgaaggtttcgaactggcggtttcccgtccgaaagttatcttccgtgaaatcgacggtcgtaaacaagagccgtacgaaaacgtgacgctggacgtcgaagagcagcaccaggggtctgtcatgcaggcgctgggcgagcgtaaaggcgatctgaaaaacatgaatccggacggtaaaggccgcgtacgtctcgactacgtgatcccaagccgcgggctgattggtttccgttcagaattcatgaccatgacttccggtacgggtctgctgtactccaccttcagccattacgacgatattcgtccgggtgaagtgggccagcgtcagaacggcgtactgatctccaacggtcagggtaaagcggtggcgtttgcgctgttcggtttgcaggatcgcggtaagctgttcctgggtcacggcgcggaagtttacgaaggccagattattggtattcacagtcgctccaacgacctgacggtaaactgcctgaccggtaagaaactgaccaacatgcgtgcgtccggtacggatgaagcggtgattctggttccgccaattaaaatgagtcttgagcaagcgctggagttcattgatgacgacgaactggtagaagtcactccaacctctatccgtatccgtaaacgtcacctgacggaaaacgatcgccgccgtgcgaaccgtggtcagaaagaa

SEQ ID NO: 37028 - DNA, 947 bp, Salmonella paratyphi A
ctcatttttttatggccttgcggtcttgccattatcgcagcactaacgatgggctttttttataagctcaatgaacaacgtttcgcttttattatcgaggaaattgcccaacgaaagaaaacaggtaatcaaattgtcgcgactaataataaacaaagtatttctactgtaaataattaaacgacgcttgccgctttatccatcccgatggatggcggcttccctatatttgaaaaatggatttattatgaaatctctgaatactctagtgatattaacttcagtaatatccacctctgtttttgctggcgcttatgtagaaaaccgtgagcctataacctggcgtctgaccaaatggagtttatgctgcgcgtcggctataactccgatatgggggccggaattatgttgaccaatacctatacgctacagcggatgatgaattaaagcatggttataatgagattgagggctggtatccgttatttaaacctacagataaattaaccatccagcctggcgggttaataaacgacaaaagcattggttccggcggcgccgtctatctggatgttaactataaatttaccccgtggtttaatcttacggtacgtaaccgatataatcacaataattatagttcaaccgatttgaatggcgaactggataataatgacagctatgaaatcggtaactattggaatttcatcattaccgataaattttcttatacctttgaaccacactatttttataatattaatgattttaatagtagtaatggtacgaagcatcattgggaaatcaccaataccttccgttatcgtatcaatgaacactggttgccctattttgaattacgctggttagatcgtaacgtgggcccctaccatagagagcaaaaccagattcgtatcggtgcgaagtatttcttctgatattatcgc

SEQ ID NO: 37029 - DNA, 578 bp, Salmonella paratyphi A
cgtaataaaataatacttgccatggcggctgcggttatgatgtatggcgcttctgtatttgccgccgatactactcccacagcaggcccgttcggctcaggtaaaattcttttcactggtaccatcaccaacccaccctgtgatatcgcaccgggcgacgatgcgatcaccgttccgtttggacagatttcttaccgtaaactgaataccgccgacgcaactacggaatcaaaaccgttcaccattcatctgcagaactgtgctttcgatccgaatatcccggacacatctggctccgcaggaaaaatgtccaaagtgaccgtctctttctctggcgaaagccaatgtcgcgaaaaagcttacaccaccagcggcagcgcacagcatgttgtgtccagctactgaagagtgacaacaccgcaattatcgagcccaacacccagatgccggagggcgacgctcagcaactgcaggccggaaacaacgaactcaacttctatgcccggctaatagcactggataatggcgtcacgcccggtgacttcaccgcatctgtcacctacaccctgaaatacctg

SEQ ID NO: 37030 - DNA, 351 bp, Salmonella paratyphi A
atgcacgtgaaatatttagcagggatcgttggcgacgcgctgctgatggcgggttgtagctccagcaacgaactcaccgctgccggccaaaatgtacgctttgtcgaagataagccgggcgcggaatgccagcttattggtacggcaactggtaaacagagtaactggttttcaggccagcacggcgaagagggtggctcaatgcgtggcgcagcgaacgatctgcgtaatcaggcagccgcgatgggtggaaacgtgctgtatggcgtaagtagtccgtcacagggcatgttgtccagttttgtcccgacggccagcgagatgaacggccaggtttataaatgtccgaat

SEQ ID NO: 37031 - DNA, 1645 bp, Salmonella paratyphi A
atggcagctaaagacgtaaaattcggtaacgacgctcgtgtgaaaatgctgcgcggcgtaaacgtactggcagatgcagtgaaagtaaccctcggtccgaaaggccgtaacgtggttctggataaatctttcggtgcgccgactatcactaaagatggtgtttccgtagcgcgtgaaatcgaactggaagacaagtttgaaaacatgggcgcgcagatggtgaaagaagttgcctctaaagcgaacgacgctgcaggcgacggtaccaccaccgcgaccgtactggcgcagtccatcattaccgaaggcctgaaagccgttgctgcgggcatgaacccgatggacctgaaacgtggtatcgacaaagcggttgctgctgcggttgaagagctgaaggcgctgtccgtaccgtgctccgactctaaagcgattgctcaggtaggtactatctccgctaactccgacgaaaccgtaggtaaactgatcgcggaagcgatggataaagtcggtaaagaaggcgtcatcaccgttgaagacggtaccggtctgcaggatgaactggacgtggttgaaggtatgcagtttgaccgcggctacctgtctccttacttcatcaacaagccggaaactggcgcagtagaactggaaagcccgttcatcctgctggctgataagaaaatctccaacatccgcgaaatgctgccggttctggaagccgttgcaaaagcaggcaaaccgctgctgatcatcgctgaagatgttgaaggcgaagcgctggctaccctggtagtgaacaccatgcgtggcatcgtgaaagtggctgcggttaaagcaccgggcttcggcgatcgtcgtaaggcgatgctgcaggatatcgctaccctgaccggcggtaccgtaatctctgaagagatcggtatggagctggaaaaagcaaccctggaagacctgggtcaggcgaaacgtgttgtgatcaacaaagacaccaccaccatcattgatggcgtgggtgaagaagctgccatccagggccgtgttgctcagatccgtcagcagattgaagaagcgacctccgactacgatcgtgaaaaactgcaggagcgcgtagcgaaactggcaggcggcgttgcggtaatcaaagttggcgctgcgaccgaagttgaaatgaaagagaagaaagcccgcgttgaagatgccctgcacgcgacccgtgctgcggtagaagaaggcgtggttgctggtggtggcgttgcgctgatccgcgttgcttctaaaattgctgacctgaaaggccagaacgaagaccagaacgtgggtatcaaagttgcgctgcgcaatggaagctccgctgcgtcagatcgtgctgaactgcggcgaagagccgtctgttgtcgctaacaccgttaaaggcggcgacggtaactacggttacaacgcagcaactgaagaatacggcaacatgatcgatatgggtatcctggacccaaccaaagttacccgttctgcgctgcagtacgcggcttctgtggctggtctgatgatcactaccgagtgcatggtgaccgacctgccgaaaagcgatgctcctgatttaggcgctgctggcggcatgggtggtatgggtggtatgggcggcatgatgtaa

SEQ ID NO: 37032 - DNA, 972 bp, Salmonella paratyphi A
atgagcgaaacggcaacctggcagccgagcgcgtccatccccaatttattaaaacgtgcggcgattatgacggaaatccgtcgtttctttgccgatcgtggagtgcttgaggttgagacgccctgcatgagtcaggcgacggtcacagacattcatctgttcccgttcgaaacgcgtttcgtcggtcctggccattcccaggggatgaacctctatttaatgaccagtccggaataccatatgaaacgcctgctggcggcagggtgcggcccggttttccagctatgccgcagtttccgtaatgaagagatgggacgacatcataatccggaattcactatgctggagtggtatcgcccgcattacgatatgtaccgcctgatgaatgaagtggatgatttgcttcagcaagtgctggattgtcaacctgcggaaagtctctcctatcaacaggcgtttcagcgccatctggagattgacccgttatcagcagataaaacgcaactgcgtgaggcggcggcaaagcttgatttaagcaatatcgctgatacggaagaagaccgtgatacgttgctgcaactgctgttcacgatgggggttgagccgcatataggtaaagaaaagccgacctttatttatcactttccggcaagtcaggcatcgctggcacaaatcagtaccgaggatcatcgcgtcgccgagcgctttgaggtgtactacaaaggtattgagctggcgaatggtttccacgaactgacggacgcacgtgagcaacaacagcgctttgaacaggacaatcgtaagcgcgcgcgcggtctgccgcagcagccgattgaccaaaatctactggatgcgctggccgccggtctaccggattgttccggcgtggcgctgggtgttgatcgtctggtgatgctggcgctgggagcagaaagcctggcggacgtgattgcttttacggtcgatcgggcg

SEQ ID NO: 37033 - DNA, 1479 bp, Salmonella paratyphi A
atgagccttattgggcttatcctgatgatttttacttctgtttttggttttgcgaatagcccgtcggcgttttatttaatggggtatagcgcaatcccgtggtatatattttctgccttgctgttttttattccattcgccttaatgatggctgaaatgggttccgcttatcgcaaagaagagggcgggatctattcgtggatgaataatagcgtggggccgcgttacgcgtttatcggcacgtttatgtggttttcatcgtatgtcatatggatggtaagtacggcggcaaaaatttgggtaccgttttctacttttgtttttggcgccgatatgacgcagcactggcgtattgcggggcttgagcctacgcaggttgtcgggctgctcgccgttggctggatgattctggtgacgtgtgtcgccgccagagggatcaataaaattgcgcgaattacggcggtcggaggtattgccgtaatgtgtcttaatttggttttattgttagtgagtgtcgctattttgttattaaatggtgggcattttgcacaagagattaattttacctcgtcaccgaatccgggttatcactccggcctggcaatgttgtcatttgtggtatttgctatttttgcttacggcggtattgaggctgtcggcggactggtggataaaaccgaaaaaccggaaaagaattttgcgaaaggcattgtcttcgcggccattgtgatttcaattggttattctttggcgatctttttatggggcgtcagcactaactggcaacagatattaagtaatagcgccgttaacttagggaatatcacctacattctgatgtcgagtttaggcacgacattaggtaacgcgttaaacctttctccggaagctgcgatgacggtgggcgtctggtttgcgcgtatcaccggcctttctatgtttctggcttataccggcgcgttttttacgttgagctattcaccgctgaaagccattattcaggggacgccaaaagcgttgtggcccgcgccgatgacaacactgaacgctaacggtatgccggcgaccgctatgtggctacagtgcgtgctggtgagtctgtttattttgctggtctcttttggcggtgacaccgcatcggcgttttataacaaactcacgctgatggcgaacgtctcaatgaccttgccatacctgttccttgcgctggcatttcccttctttaaagcgcgtcaggatctggagcggccatttgttctctttaaaaccaaagcctctaccctggtcgcgacgggtgttgtggtgctggtggtgacgtttgccaacgtctttaccatcatccagccggtgattgaagctggggactgggacagcgccttgtggatgatcggcggcccgatcttcttctcgctgctggcgatggcaatttatcagaattacagcagccgcatgagcgctgatccggagtgggcggcggag

SEQ ID NO: 37034 - DNA, 318 bp, Salmonella paratyphi A
atgaatgatagttcgagagacccgattatcacggaagatgagattagggcactcaattttactccggaagatatccttgaaatagaaaaggttattctttcttccgttcatgttgcacgtcgaaaggttgcgatggtagtaggaatgactattggcacgttaagggatcgcgatgaggataagtggaaacatgtgtcggatatttattgcgcgtatgttgtaagatgcctcgtatttcgcggagaactggtgggttacggcgatttattccgaatgcgctatagcgaaattaacctgcctgttgccgatctggacgca

SEQ ID NO: 37035 - DNA, 908 bp, Salmonella paratyphi A
atgcgcaatcgtacgctggctgaccttgatcgtgtcgttgccctcggcggagggcatggattaggacgcgtcctctcctcgctttcttcattaggttcgcgcctgaccggcattgtgactaccacagataacggggggtcaactggccgtattcgccgctcggaaggcgggtatgcctggggcgatatgcgcaactgtctgaatcagttaattaccgaacccagcgtatcatccgctatgtttgagtaccgttttggcggtaatggcgaactttctggtcataacctcggaaatttgatgttaaaggcgttagatcacctgagcgtgcggcctctggaagcgattaatttaattcgtaatctgcttaaagtggacgcgcagctgatcccgatgtcggagctaccggtagatctgatggcgattgacgatcaggggcatgagatttatggcgaggtgaatatcgatcagttagcgacgccgccgcaggagatcatgttaacgccaaacgttccggcgacgcgggaagcggtacaggccattaatgacgcggatctgattctgattggccctggcagtttttataccagcctgatgccttgcctgctgctggatgaactggcgctagcgctgcgcgcaccccagcgccaatggtgtatatcggcaatctgggtcgcgaactgagtctgcccgccgccagtttaacgctggtcgataagctggcgatgatggagcaatatattggcaaaaaagtcattgacgcagtagtggttgggccgcgagttgacgtcagtgcggtgaacgatcggctggtgattcaggaagtgctggaggccagcgatatcccctatcgccacgatcgtcagttattacacaatgcgctggaaaaagcgctacaggcgttgggttaa

SEQ ID NO: 37036 - DNA, 989 bp, Salmonella paratyphi A
atggcttcacaacttaccgatgctttcgcgcgtaagttttactacttgcgtttgtcgattaccgatgtgtgtaactttcgttgcacctactgtctgccggatggctacaaacctggcggcgtcactaacaacggtttccttaccgtcgatgaaattcgtcgcgttacgcgcgcttttgccagtcttggcacggaaaaggtgcgtcttaccggcggcgagccttcattacgccgcgattttaccgacatcattgccgccgtgggtgaaaatgatgctattcgccagatcgcggtgaccactaacggttatcgactggcgcgcgatgccgcgaactggcgcgaagcggggctgacgggcgtcaatgttagcgtggatagtctggatgcgcgtcagttccatgcgattaccggtcaggacaaattccgccaggtgatggcgggcatcgatgccgcctttgacgccggtttcgaaaaggtgaaagtcaacaccgtgctgatgcgcgacgtgaatcaccatcagttggataccttccttgcctggattcagcctcgccccattcagtacgcttcattgaacttatggagacgggcgaggggagcgatctcttccgcaaacatcatatttcgggtcaggtattacgtgacgagctgattaagcgcggttggatccaccacgtccgccagcgtagcgatggtccggcgcaggttttttgtcaccccgattacgccggtgagatcggtctcattatgccgtacgaaaaagatttctgcgccacctgtaaccgcctgcgtgtttcgtccgtcggtaagctgcatttatgtctgtttggcgacggcggcgtgagtttacgcgacctgttacaggatgatgcgcagcaatacgcgcttgaggaacgtatttccgacgcgttgcgggagaaaaagcagacccatttccttcaccagagcaatactggtattacgcaaaatttatcttacattggcggttaa

SEQ ID NO: 37037 - DNA, 510 bp, Salmonella paratyphi A
atgagtcaggtcagcgctgaatttatcccgacccgcatcgctattcttactgtttccagccgacgcggcgaagaagacgacacctccggtcattatctgcgtgattcggcgcaggaggccgggcatgaagtggtggcgaaagccatcgttaaagagaaccgttacgcgattcgcgcccaggtttccgcctggatcgccagtgatgaggtgcaggtcgtattgataactggcgggaccggtttgaccgaaggcgatcaggcgccggaagcgctgttgccgctgttcgattgtgaagtggaaggatttggcgaagtgtttcgcatgctctcgtttgaagagatcggcaccgcaactctgcagtcgcgcgcggtagctggcgtggcgaataacaccttgattttcgccatgccgggctccacaaaagcgtgcagaaccgcatgggagaatatcattgcgccgcagctggatgcccgtacacgcccatgtaattttcaccctcatttaaagaaa

SEQ ID NO: 37038 - DNA, 1042 bp, Salmonella paratyphi A
ctgcctgatttagccagcgaatccgcgaaaaaagaagaacaggaaaataaaggaaagtcctttaaagaacagggcgctgactactttattaattccgccacccagggctttgataatctcaccccggaagcgctggaatcccaggcgcgtacgtatttgcaaaaccaaatcacttcatcagcacagtcatatcttgaaggcgtaatgtcaccttatggcaagatccgtaccagcctctccgtaggcgaaggcggcgatctggacggcagttcgctggattatttcgttccctggtatgataacgaaaaaaccttactttttagccaactctcagcccaacgtaaagaagaccgcaccattggtaactttgggcttggcgtgcgccagaacgtcggcaactggctgcttggcggcaacgcattctatgactacgattttacgcgcggtcaccgtcgactaggtctgggaaccgaagcctggacggattacctgaaattctccggcaactattaccatcctctttctgactggaaggattccgaagatttcgacttttatgaagaacgacctgcgcgcggttgggatatccgcatggaaagctggctgcccttttatccgcagcttggcgctaaattagtttacgaacagtactacggcgatgaagtggcgctgtttggcaccgataatctgcaaaaagatcctcatgccgttaccttggggctggaatatacgccggtactggcgataataacgattttagcgttaaagcgactgtgaactaccagataggaacgccgctggcgcaactcgatccggaaaacgttaaaatccagcactctttaatgggcagccgcaccgattttgtcgatcgtaacaatttcatcattctcgaataccgcgagaaagatccgctggacgtcacgttgtggctgaaggcgacgccaccgacgaacacccggaatgcgtgattgaagatacgcctgaggccgcggtggggctggagaaatgtaagtggacggtcaacgcgctgattaaccatcat

SEQ ID NO: 37039 - DNA, 1512 bp, Salmonella paratyphi A
cgttgtctgatgatttttttaatgaggctttaaacatggtacctgtggtcgcgcttgtcgggcgccctaacgtcggaaaatccacgctatttaaccgtctgacccgcacccgagatgcgctggttgcggatttcccgggtctgactcgtgaccgtaagtacggtcgtgcggaggttgaaggccgcgagtttatctgtatcgacaccggcggtattgacggcaccgaagacggcgtcgaaacgcggatggcggaacagtcgctgctggcgattgaagaagcggatgtggtgttattcatggttgatgcgcgcgctggcctgatgccggcggatgaagcgattgccaaacatctgcgttcccgtgaaaaaccgaccttcctggtggcgaataaaacggatggtctcgatcccgatcaggcggttgtcgatttttactcgctgggattaggcgaaatttaccctatcgccgcctcacatggtcgcggcgtattgagcctgctggaacatgtgcttctgccgtggatggatgatgtcgcgccgcaggaagaggtggatgaagacgcagaatactgggcgcagttcgaggcggaacaaaatggcgaagaagcgccggaagatgattttgacccgcaaagcctgccgataaagctggcgattgttggtcgcccgaacgtaggtaagtccacactcactaaccgtattctcggtgaagagcgcgtggtggtatacgacatgccgggcaccactcgcgacagtatttatatcccgatggaacgcgacgaacgggaatatgtgctgattgacacggcgggggtgcgtaagcgcggaaaaatcaccgatgcggtagaaaagttctcggtgattaaaacgttgcaggcgattgaagacgctaacgtcgtactgttggttatcgatgcgcgcgaggggatctctgaccaggatttgtctctgctgggctttatcctcaatagtgggcgctcactcgttatcgtagtcaacaaatgggatggcctgagcaggaagtcaaagagcaggtgaaagagacgctggatttccgtctgggctttattgattttgcccgcgtgcactttatctctgcgctgcacggcgtagatacgaggaacctgtttgagtccgtacgcgaggcttacgacagttccactcgccgggtgagcactgcgatgctgacccgtatcatgacgatggcggtggaagatcatcagccgtcgctggtgcgcggtcgccgtgtgaagctgaaatatgcccacgctggcgctataacccgccgattgtggttattcacggcaaccaggtaaaagatctgccagactcctataagcgctatctgatgaactacttccgcaagtcgttggaagtgatgggtacgccgattcgcattcagtttaaagaaggggagaacccgtatgcgaacaagcgtaacacactgacgccagcgcaaatgcgcaaacgtaagcgtctgatgaagcatatcaagaaaagcaagtaatgcttt

SEQ ID NO: 37040 - DNA, 1176 bp, Salmonella paratyphi A
atgcaattgcgtaaattacttctgccagggttgctttccgttaccctgctcagcggctgttcactgtttagcggtgaagaagatgtcgtcaagatgtctccattaccgcaggttgaaaaccagtttaccccgaccacggtctggagcacctctgtcggtaacggaattggtgaattttattctaaccttcatccggtaatggcagataacgtggtctatgcagccgatcgcgcgggcgtggtaaaagcgctcaatgcggatgatggcaaagagatctggtctgtgaatctgggcgagaaagacggctggttctctcgttcgtccgcgctgttgtccggcggcgtcactgtcgcgggcggtcacgtctatatcggcagtgaaaaggccgaggtttatgcgctgaataccagcgacggtaccacagcatggcagacgaaggtcgcaggcgaagcgttgtctcgtccggttgtcagtgatggaattgtccttatccataccagcaacggtcagttgcaggcgctaaatcaggcggatggcgcaattaaatggacggtgaacctggatatgccttcgctgtcgctgcgcggcgaatctgcgccggcaaccgcgttcggcgcggctatcgttggtggtgataatggccgcgtcagcgccgtgctgatgcaacaagggcagatgatttggcagcagcgtatctcccaggccactggcccaacggaaattgaccgtctgagcgacgttgataccacgccggttgtggtaaacggcgttgtttacgcgttggcgtataatggtaacttaacggcgctggatctgcgcagtggtcagattatgtggaaacgcgagctgggttcggtcaatgactttatcgtcgacggcgaccgtatctacctggtcgatcagaacgatcgcgtgctggcgctgaccactgacggcggcgtaacgctgtggacgcaaagcgatctgctgcaccgtttgctgacctccccggttctgtataatggtgatttagtcgtcggcgatagtgaaggttatctgcactggattaatgttgatgacgggcgttttgtggcccaacaaaaagtagacagttccggttttctgaccgaaccgacggtggcggatggtaaactgctcatccaggccaaagacggtacggtctcagcgattacgcgt

SEQ ID NO: 37041 - DNA, 549 bp, Salmonella paratyphi A
atgcaatttaatatccctacgttgtcacgctgtttcgcgtcatcctgattccattctttgtcgtggtgttttatttgccgttcgcctgggcgccgatggtcagcgcgctgattttctgtattgccgcgattaccgactggtttgacggctttctggcgcgacgctggaaccagagtacgcgtttcggcgctttcctcgaccccgtcgccgacaaggtgctggtagcgatcgccatggtgctggtcaccgagcattatcatagctggtgggtgacgttactgcggcgacgatgatagcccgcgaaattattatctctgctctgcgtgaatggatggcggagctgggcaaacgcagtagtgtagcggtctcctggatcggtaaagtcaaaactaccgcgcagatggtggcgctggcgtggctcttgtggcgtccgaatatctgggtagagtatgccgggatcgcgcttttctttgtcgcagcggtgctaacgttgtggtccatgttgcaatatttgaggctgcacgcggagatttgcttgatcagtgatcg

SEQ ID NO: 37042 - DNA, 724 bp, Salmonella paratyphi A
atgcaggaaaatgatttcttcacctggcgacgcgcaatgttgttacgctttcaggagatggcggcacagaggatgtttatactgaattgcaatatcagacacagcggctggaatttgattattatgccctgtgtgttcgtcatcccgttccctttacccggcctaaaatatcgcttcgtaccacttatcctcaggcgtgggtaacgcattatcagtccgaaaactatttcgcgatcgatccggtattaaagccggaaaatttcaggcagggtcatttacattgggatgacgtgctatttcatgaagcgcaggcattgtgggatgccgcccagcgtttcggattacgcagaggcgtaacccagtgtgtgatgttgccgaaccgggcgctgggctttttatctttctcccgtagcagtttacgctgctcctcgtttacctacgatgaagtggagctgaggttgcaactgctggcgcgggagagtctttcggcgctgacaagatttgaagacgacatggtgatggcgcctgagatgcgtttcagtaaacgtgagaaagagattctgaagtggacggcggaagggaagacctcatcggagatcgccattattctgtcgatttctgaaaataccgttaacttccatcagaaaaatatgcagaagaaattcaatgcgccaaataaaacacagattgcctgctacgctgcgggacaggtctgatatgacgt

SEQ ID NO: 37043 - DNA, 755 bp, Salmonella paratyphi A
atgagtgctatcgaagtcaccaacctggtcaaaaaatttcatggtcaaacggtgctgcacggtatcgaccttgaggtgaagcccggagaagtcgtcgccattatcggcccgagcggctcagggaagacaacgttattacgctgcattaacctgctggaacaaccggaagcgggtaccattaaagtgggcgatattatcatcgataccgcccgcccattcagccagcaaaaagggttgattcgccagctacgtcagcatgtcggctttgtctttcagagttttaacctgttcccgcatcgtaccgtgctggaaaatatcattgaaggtccggtgattgtaaagggagagccgaaagccgaggcgacggctggcgcgggaactgttagccaaagtcgggttggccggtaaagagacccgttatccgcgccgctgtcgggcgggcaacagcagcgcgtggcgattgcgcgcgcgcctgcgatgcgcccggaagtgattctgtttgatgagcccacgtcggcgcttgatcctgaattagtcggcgaggtgcttaatacgattcgccacgtggcgcaggaaaagcgcacgatggtgatcgtcactcacgaaatgggctttgcgcgtgacgtggctgaccgggcaatatttatggatcaggggcaaatcgtcgagcaggggccggcgaaaaccttgttcgccgatcctcagcatccggtacccgccagttccttgagaaatttttagtgaaataatacctt

SEQ ID NO: 37044 - DNA, 456 bp, Salmonella paratyphi A
atgttccggggggcaacgttagtcaatctcgacagtaaagggcgcctgaccgtgccgacccgttatcgggagcaactgatcgagagcgctaccggtcaaatggtatgtaccattgacatccatcgcccatgcctgctgctttaccccctgcctgaatgggaaattattgagcaaaagttatctcgtctgtcgagcatgaacccggtagaacgtcgcgtacagcgtttactgttgggccatgccagcgaatgtcagatggatggtgcaggtcgattactgatcgcgccagttctgcggcaacatgccggactgacgaaagaagtgatgctggttggacagttcaacaaatttgagctgtgggatgaaacgacctggtatcaacaggtcaaggaagatatcgacgctgaacagtcagctaccgaaacgttatcggagcggctgcaggacttgtctcta

SEQ ID NO: 37045 - DNA, 947 bp, Salmonella paratyphi A
atgatggaaaattttaaacacactacggtactgttggatgaagccgttaatgggctgaatattcgtccggatggtatctatattgatggcacatttggtcgcggcggccactcgcgcctgatcctctcgcaactgggcgaagaggggcgcttgctggcgatcgatcgcgatccgcaggcgatcgccgttgcgcaggccatcagtgatcctcgcttctccatcattcatggacctttttccgcgctggctgattatgtcgccgagcgcagcttaccggcaagattgacgggatccttctcgatcttggcgtctcttctccgcagcttgacgatcggagcgcggttttttcattttatgcgcgacggtcgctggatatgcgaatggacccgacgcgcggccagtctgccgccgagtggttacaaacggcggaggaggcggatatcgcctgggtgctgaaaacattcggcgaggagcgttttgccaaacgtattgctcgcgccattgttgagcgcaatcgcgaacagccgatgacccgcaccaaagagctggcggaagtggttgcggcggcgaccccggtaaaagacaaattcaaacatcccgcgacccgtaccttccaggcggtgcgcatctgggtaaacagtgaactggaggagatagagcaggcgctaaaaagctcgctcagcgtactggccccaggcgggcggctttcaatcatcagtttccactcgctggaagaccgtattgtgaaacgctttatgcgtgagcaaagccgcggtccgcaggtaccggcgggattaccgatgacggaagcgcagctcaaaaaactgggcggtcgtgagttacgagcgttaggcaagttgatgccgggtgaaaaagaggtagctgaaaatcctcgggcccgtagttcagttctgcgtatcgcagagaggacgaacgcatgatcagca

SEQ ID NO: 37046 - DNA, 1750 bp, Salmonella paratyphi A
  misc_feature (1564)..(1564): n=g, a, t or c
  misc_feature (1566)..(1566): n=g, a, t or c
atgaaagcagcggcaaaaacgcaaaaatcgaaacgccaggaagaacagaccaacttcatcagttggcgttttgcgttgctgtgcggctgtattttactggcgctggtttttttacttggacgcgcggcgtggctacagattatcgccccggatatgctggtgcgtcagggtgatatgcgttcgctgcgtgttcaggaagtctctacctcacgcggtatgattaccgaccgttccgggcgtccactggcggtcagcgtaccggttaaggcgatctgggccgacccgaaagaagttcatgacgccggcggcatcagcgttggcgatcgctggaaagcgctttctactgcgctcaatatctcgctcgatcagctctccgcccgtatcaacgccaacccgaaagggcgttttatttatctggcgcgccaggtaaatcctgacatggcggactacatcaaaaaactcaaactgccgggcattcatttgcgtgaagagtcccgccgctactacccgtcaggagaagtaaccgctcacctcatcggttttaccaacgtcgacagtcaggggattgaaggcgttgaaaagagctttgataagtggcttaccggctcagcctggcgagcgaatcgtgcgtaaagaccgctatggccgcgtgattgaagatatctcctccactgatagtcaggcagcgcacaacctggcgttaagcattgatgaacgcttacaggcgctggtttaccgcgaactgaacaacgcggtggcgtttaacaaggcggaatccggtagcgcggtgctggtcgatgtcaataccggtgaagtactggcgatggcgaatagcccttcctataaccccaacaaccttgccggtacgccgaaagacgcgatgcgtaaccgtaccatcaccgacgtgtttgaaccaggttctacggttaagccgatggtggtgatgactgcgcttcagcgcggtatcgtcaacgaaaatacggtgttgaataccgttccataccgaattaacggccacgaaattaaagacgtggcgcgctacagcgaattaaccctgaccggggttctacagaagtcgagtaacgtcggtgtatccaaactggcgttagcgatgccgtcctcagcgttagtagatacttactcacgttttgggctaggaaaggcgaccaatttggggttggtcggagaacgcagtggcttatatcctcaaaaacaacggtggtccgacatagagagggccaccttctctttcggctacgggctaatggtaacgccgttacagttagcgcgagcctatgcaacgatcggcagctatggcatttatcgcccgctgtcgattaccaaagttgatccgcctgtacccggcgaacgcatcttccctgaatccaccgtacgcaccgtggtgcatatgatggaaagcgtggcgctgcgggcggcggcggcgtgaaggcggcaattaaaggctaccgtatcgcgattaaaaccggtacggcgaaaaaagtggggccggacggtcgctacatcaacaaatacattgcttacaccgcagcgtcgcgccgtcagntncagccgcgcttcgctgaggtggttgtcatcaacgatccgcagcgggtaaatactacggcggcgcttgtccgcgcggtatttggtgccatcatgggcggcgttctgcgcaccatgaacatcgaaccggacgcgctggcaacgggcgaaaaaaatgaattcgtaattaatcaaggcgagggaacag

SEQ ID NO: 37047 - DNA, 1474 bp, Salmonella paratyphi A
gtggcagatcgtaatttgcgcgaccttcttgctccgtgggtggctggactacccgcgcgagaactgcgagagatgacgctcgacagccgtgtggctcggcgggcgatctctttgtggcagtggtgggtcatcaggcggacgggcgtcgatatatcccgcagcgatacgcaaggcgtactgccattattgtagaggcgaaagacgaggcgaccgacgtgagattcgcgaaatgcacggcgtaccggttgtctatctcagccagctcaatgagcgtttatctgcgctggcgggccgcttttaccatgagccatctgaaaacatgcgtctggtggcggtgaccggcaccaatggcaagaccaccaccacccaactactgggcgcagtggagccagttgctcggcgaaaccagcgcagtgatgggaacggtaggcaacggactgttgggtaaagtgatcccgacggagaacacaaccggttccgctgtggatgttcagcatgtgctggccagtctggttgcgcagggcgagccttcggcgcgatggaagtctcttctcacggcctggtgcagcatcgcgtggggcgctgaaatttgccgcctccgtgtttactaatttgagccgcgaccatctcgactatcatggcgatatggcgcattacgaggcggcaaaatggatgctttattccacccaccatcacggtcaggcaatcgtcaacgccgatgatgaagttggacgccgctgctggcatcgctacccgatgcggtcgcggtatcaatggaagggcatatcaaccctaactgtcacggtcgttggctgaaagcggaggcgttaggagtaccacgaccgcggagcacgattcgttttgcttcaagttggggtgaaggcgaaatcgaaagccgcctgatgggccgtttaacgtcagcaacttactgctggcattggcgacgctgctggcgctgggctatccgttaacggatttgctgaaaaccgctgcgcgtttgcagccggtttgcgggcgtatggaagtgttcactgcgccaggcaaaccgacggtggtggtggattacgcgcacacgccggatgcgctggaaaaagcgttgcaggcggcgcgcatgctgcgccggaaaattgtggtgcgtctttggctgtggcggggatcgtgacaaaggtaagcgcccactcatgggggccattgccgaagaattcgcggatatcgtcgtggtgactgacgataacccgcgtaccgaggagccgcgcgccattatcaacgatattctggccggaatgctggacgccgggcaggtcagggtaatggaaggccgcgctgaggcggtaaccaatgccattatgcaggcaaaagacaatgacgtcgtgctgattgcaggtaaagggcacgaggattaccagattgtcggcacgcagcgtcttgattattcagaccgcgtgaccgcagcgcgtttgctgggggtgatcgc

SEQ ID NO: 37048 - DNA, 1364 bp, Salmonella paratyphi A
atgattagcgtaacgctcagcaaaattgccgatgtccttggcgccgaacaccgcggggcggatctcacgctcgatacggtcattaccgacacacggaaagtgacgccgggatgcctgttcgtggcgctgaaaggggaacgctttgatgcgcatgattttgctgataaagcaaaagcgaacggcgctggcgccctgctggtcagtcgtcctctggatatcgatcttccgcaggtgattgtaaaagacacgcgtcaggcatttgccaactggccgcctgggtacgtatgcaggtaccggcgcgggtggtggcgttgaccggttcgtccggcaaaacctcggtcaaagagatgaccgccgcgattcttagccagtgcggaaatactttgtataccgcaggtaattttaacaacgacatcggcgtgccgataacgctgctgcgcttaaaccatgattatgactatgcggtaatcgagttaggcgctaatcaccagggagaaatcgcctggaccgttagcctgtacgcccggaagcggcgctggtcaataactggcggcggcgcatctggaaggtttcggctcgttggccggcgtggcgaaagcgaaaggcgaaatctataccggtttgcctgagaacggtattgcgattatgaatgccgataataatgactggctgaactggcaaagcattattggcgatcgtcaggtgtggcgcttttcgccgaatgcggcaaacagcgactttaccgctgcgaatatccacgtgacgtcacacggtaccgaatttaccctgcaaacgccgatgggcagcattgatgtgctgctgccgttgccggggcggcacaatattgccaacgcgctggcggccgctgctttatcaatggcggtgggggcgacgctgacggcgattaaagcagggctggcggcgttaaaagccgtacccgggcgtctgttcccgattcagctaagtgaaaaccaactggtactggatgacgcttataacgccaacgtcggttcgatgaccgccgcagtgcaggtcctttctgaaatgcccgcgtaccgcgtgctggtggtaggcgatatggccgagctgggcgcagaaagcgaagcgtgccacatccaggttggcgagcgcaaaagcggcgggtattgatcgcgtgttaagcaccggaaaactcagtcaggctatcagccgaccagcggcgtcggcgaacattttgccgataaaggcgcctcattgcgtttactagtctgcttcaggagcaaccaatgatgactattttagtgaaaggatcacgcagcgccgcgatggaagatgtggttcatgcgttacaggagaaaggttcatgttagtttggctggccgagc

SEQ ID NO: 37049 - DNA, 1060 bp, Salmonella paratyphi A
ttggtcaaatattattccggctttaacgtcttttcttatctgacgtttcgcgccatcgtcagcctgttgaccgcgctgttcatctctttatggatgggcccgcgtatgatcgctcgtctgcaaaaactctcttttggccaggtggtacgtaacgatggcccggaatcgcacttcagtaaacgcggtacgccgacgatgggcggcatcatgatcctgacggcgattgtgatttccgttctgttatgggcttacccgtctaacccgtacgtctggtgcgtgctggtggtattgattggctacggcattatcggttttgtcgatgactaccacaaagtggtgcggaaagataccaaagggctgattgcgcgctggaaatatttctggatgtcggttatcgcgctcgggtggcctttgcgctttatctcgtcgggaaagacacgcccgcgacccaactggtggtgccgttctttaaagatgttatgccgcaattggggctgttttacattctgctgtcctactttgtcatcgtcggtacgggtaacgccgtaaacctgaccgacgggcttgatggtctggcgattatgccgactgttttcgttgccgccggctttgcgctggtggcctgggcgaccgggaacatgaacttcgccaattacctgcatattccgtatttacgctatgcgggcgagctggtgattgtctgtacggcgattgtcggcgcgggattaggattcttgtggtttaacacctatccggcgcaggtttttatgggcgacgtcggatcgctggcgttgggcggcgcgttgggcattatcgccgtgctgctgcgtcaggagttcctgctggtgatcatgggcggcgtctttgtggtggaaactctgtcggtcatcctgcaggtgggttcctttaaactacgcggacagctattttccgtatggcgcctatccatcaccactatgaactgaaaggctggccggaaccgcgcgtgattgtgcgcttctggattatttcgctgatgctggtgctgattggcctggcaacgctgaaggtacgttaatca

SEQ ID NO: 37050 - DNA, 1071 bp, Salmonella paratyphi A
  misc_feature (298)..(298): n=g, a, t or c
  misc_feature (840)..(840): n=g, a, t or c
  misc_feature (1055)..(1055): n=g, a, t or c
gctgattaccaggacaaaaacgtcgtcattattggtctgggcttaaccggactctcttgcgtggacttttttctcgcccgcgggctgacgctgagttgagatactctgcgtgacgccgccgggtctggataagctgccgcaagaggttgagcgtcacgttggcggcctgaacgacgagtggctcttagcggcggatttaaatcgatcccagccctagcagtcctctgcgcatccctctcattagctggcccagcgctggcagtggaaattgtcggcgatatcgaactgttattggccncggacgaagcgccgattgtggccatcaccggctcgaatggcaaaagcaccgtgaccaccttagtggcgagatggcgaaggcggcgggcgtcaatgtcggcgttggcggcaatatcggtcttccggcgctgatgctgctggatgccgatcgcgaattgtacgtgctggaattatccagtttccaactggaaaccacgtcaagtttgcaagcggcggcggcaacggtgctcaacgtcactgaagatcatatggaccggtatccgtttggtttgcaacagtaccgggcggcgaaactgcgcgtctacgagaaggcgaaagtgtgcgtagtgaatgccgatgatgcgttgacgatgccggttcgtggggccgatgagcgctgcgtcagctttggcgtcaatatgggtgattatcaccttaatcgtcagcagggcgaaacctggctgcgagtcaaaggcgagaaggtgctgaacgtgaaagagatgaagctttccgggcagcataactataccaatgcgttacggcgctggcgtggcggatgcgtangtctgccgcgcccacagtttgaaggcgttgacgacatttaccggtctggcgcatccttccagctggcgttggagcataacggcgtacgttggatcaacgactcgaaagcgaccaacgtcggcagtagcgaagcggcgctaaacgggttgcatgtggactgtacgctgcatctgctgctgtgcggcgacggtaagtcgcagacttttctccgctgngcgctatctgaccggc

SEQ ID NO: 37051 - DNA, 549 bp, Salmonella paratyphi A
atgacaaagcagcccgaagactggctcgacgacgttcccggtgatgacatagaagacgaagacgatgaaattatctgggtcagtaaaagtgaaattaaacgcgatgccgaggaattaaaacgcctgggcgcggaactggtggatctggggaaaaacgcgctggataagatcccgctggacaccgatctgcgcgacgccattgaactggcccagcgtatcaaaatggaaggacgccgccgccagttgcagcttatcggaaaaatgctgcgccaacgcgacgttgaacctattcgccaggcgctggacaagctgaaaaaccgccataatcagcaggtggtgctgtttcacaagcttgagcatctgcgcgatcgtctgatcgtcgaaggcgatgacgcggtagccgaagtactgaccctgtggccgcacgccgatcgtcaacagcttcgttcattgatccgcaatgcgaagaaagagaaagaaggcaacaaaccgccgaaatcagcgcgtcagatcttccagtatctgcgcgagctggcggaaaacgaaggg

SEQ ID NO: 37052 - DNA, 1659 bp, Salmonella paratyphi A
ctgtgcgcgaccggaatgaccgacagtgattttggcaaaccgattatcgccgtggtgaactcattcactcagtttgtgccgggtcacgttcatctgcgcgatctcggtaagctggtcgccgaacagattgaagcttccggcggtgtggcgaaagagttcaacactattgccgtggatgacgggatcgccatggggcacgggggtatgctctattcactgccgtcgcgcgagctgatcgccgactccgtggagtacatggtgaacgctcactgcgctgacgcgatggtgtgtatctccaactgcgacaaaatcaccccagggatgctcatggcctcgctgcgcctgaatattccggtgatctttgtctccggcggcccgatggaagccgggaaaaccaaactgtccgatcagatcatcaagctcgatctggttgatgccatgattcagggagcggacccgaaagtctctgacgatcaaagtaaccaggttgaacgctccgcctgtccaacctgcggctcctgctccggcatgtttaccgctaactccatgaattgcctgaccgaagcgctgggcctgtcgcagccgggcaacggctcgctgctggcgacccatgctgaccggaagcagttgttcctcaatgctggtaagcggattgttgaactgactaaacgctattacgagcaggatgacgaaagcgcactgccgcgtaacatccccaacaaggcggcgtttgagaatgcgatgacgctggatattgcgatgggcggttcgaccaataccgttctgcatctactggcggcggcgcaggaagcggaaatcgacttcaccatgagtgatatcgacaagctgtcccgcaaggtgccgcagctgtgtaaagtggcgccaagtacccagaaataccatatggaagatgttcaccgtgccggcggtgtgctgggtattttaggcgagctggatcgcgccgggctgctgaaccgcaacgtgaaaaacgtattaggcctgacgctgccgcaaacgctggaacagtacgacatcacggttacgcaggacgaagcggttaaaaaaatgttccgtgctggccctgccggtatccgtactacccaggcgttctctcaggattgtcgctgggattcgctggatgacgaccgcgcagcttgcatccgctcgctggaatatgcctatagcaaagacggcggtctggcggtgctgtatggcaacttcgccgaaaacggctgcatcgtaaaaaccgcgggcgtggatgacagcatccttaaatttaccggtcctgccaaagtttacgaaagccaggacgatgcggtagaggcgattctcggcggcaaagtagtggaaggcgatgtggtcgtaatccgctacgaagggccgaaaggcgggccgggaatgcaggaaatgctctatccgaccagtttcctgaagtcgatggggctgggcaaagctgcgcgctcatcaccgatggcgtttctccggcggtacttcgggtctttccatcggccacgtctcgccggaagcgccagcggcggcactattgcgctgattgaagatggcgacaccattgcgattgatatcccgaaccgcagcattcagttgcagttgagcgaggctgaaatcgccgcacgccgcgagcgacggaagctcgcggca

SEQ ID NO: 37053 - DNA, 925 bp, Salmonella paratyphi A
atgacgacgaaaaaagctgattacatttggttcaatggcgagatggtgcgctgggaagacgcgaaggttcacgtaatgtctcacgcgctgcactacggtacgtcggtatttgaagggattcggtgctacgactctcacaaaggcccggtagtgtttcgtcatcgtgaacatatgcagcgcctgcgcgactcagcaaaaatttatcgttttccggtttcccagagcattgatgagctgatggaagcctgccgcgacgtaattcgtaaaaataatctgaccagcgcctatatccgtccgttggtatttgtaggcgatgtcggtatgggcgttaacccgcccccgggatacaccactgacgtcatcatcgccgcgttcccgtggggggcatacctgggcgccgaagcgtggatcaggggatcgatgcgatggtttcttcctggaaccgcgctgcgccgaacaccattccgaccgccgccaaagcgggcgggaactatctttcctcactgctggtgggtagcgaagcgcgccgccacggctatcaggaaggcatcgccctggatgtaaacggctatatatccgaaggcgcaggcgaaaacctgtttgaggtaaaagatggcgtgctgtttactccgccgtttacctcttccgcgctgccaggcattactcgcgacgcgatcatcaaactggcgaaagagctgggtattgaagtgcgtgagcaggtgctgtcccgtgaatcgctgtatctggccgacgaagtgtttatgtccggaactgcggcagaaattactccggtacgcagcgttgatggtatccaggtaggcgaaggcgttgcggccctgttaccaagcgtatccaacaagccttctttggtctcttcactggagaaaccgaggataaatggggctggttggatccggtaatttca

SEQ ID NO: 37054 - DNA, 1650 bp, Salmonella paratyphi A
  misc_feature (979)..(979): n=g, a, t or c
atgaacggggcacagtgggtggtacatgctttgcgagcgcagggggtgaaaaccgtatttggttatcctggcggcgcaattatgccggtttacgacgcgttgtatgacggtggtgtggagcatttgttgtgccgacacgagcagggtgccgcaatggcggcaatcggttatgcccgttctactggcaaaaccggtgtttgtatcgccacctcgggccctggcgccactaacctgatcactggcctggcggatgcgttgttagattcggtccccgttgtcgcgatcacgggtcaggtttccgccccgttcatcggtaccgatgcgttccaggaggtggatgtgttagggctgtcgctggcctgtaccaaacacagcttcctggtgcagtcgctggcagagttgccgcgcatcatggcggaggcttttgaagtcgccaacgctggcgtcccggacccgttctggtggatatcccgaaagatatccagttggccagcggtgagctggaaccctggtttactaccgtcgataacgaagcgactttcccgcaggctgatgtggaacaggcgcgccagatgctggaacaggcgaaaaaacccatgctgtacgtcggcggtggtgttggtatggcgaaggcggttccggcgctgcgtaaatttatcgaggtaacgcaaatgccagttacctgcacgctgaaaggtctgggggctgttgaagctgattatccgtactatctgggcatgctgggaatgcacggtactaaagcggctaatttcgcggtgcaagagtgtgatttactgatcgcagtgtgtgcacgttttgatgaccgggtgaccggtaagctgaatacgtttgcgcctaacgccagcgtaatccatatggatatcgacccggcggaaatgaacaaactgcgtcaggcacacgtcgcgttgcagggcgatttaaattcgctgttgccggcattacagcaaccgctgaagantcagcatggcgtcagtcttgtgcagagctgcgcgcagaacacgcctggcgctatgaccatcctggcgagactatctatgcgccgttgttgttgaagcaattgtcggaacgcaaacccgcagacagtgtggtgacgacggatgtggggcagcatcagatgtggtcagcccagcatatgacttacacccgcccggagaacttcatcacttccagcggtctggggacgatgggattcggcttaccggcggccgttggggcgcaggtagcgcgaccgaatgataccgttatctgtatctccggtgacggctccttcatgatgaatgttcaggagttgggcaccgtaaaacgcaagcagttaccgttgaagatagtcttactcgacaaccagcggttagggatggttcgacaatggcagcaactgtttttccaggagcgatatagcgaaaccaccctgaccgataaccccgatttcctcatgctggccagcacttcggcattccaggccagcacattactcgtaaagaccaggttgaagcggcactcgacacgatgttggcaagcgaagggccgtacctgcttcacgtctcaatcgacgaacttgaaaatgtctggccgttggtgccgcctggcgccagtaactctgaaatgctggagaaattatcatgatgcaac

SEQ ID NO: 37055 - DNA, 1913 bp, Salmonella paratyphi A
  misc_feature (455)..(455): n=g, a, t or c
caaatgacacaggaagcattcgccgtttactggtcatcagcggcgatgcggcgtggtgccgggagcgggccgaggcgatacgcgctgcattgcccggtgactggctgtggggtccgcctgacgcgcccgcccagccgtgctgtgaccacaggcgttacaaacgctgctgggccgtgaattccgtcatgcgatatttgatgcctggcagggctttgacgctgcagcgtttgccgcctgagcgggaccttgcaggccggaagttggctgcttctgctgatgccgccgtacgagacgtgggaaagcaggcctgatatcgattcactggctggaggactgcgcgcagcctatccccacaccgcagtttgcacagcatcttaaacggactctttcccgcgatccgcaaacgctgctttggcgacagcgccagccgttttgctggccatcttatccttccncgtgaacgtctgcgacagccaccagcgagccgcagccggagcaggcggctatcttatcgcgtttatgtgaaatgcccgcccggcgtggcgacggtgattgcccccgtgggcgcggcaaatcggcgctggccgggcaattcatctcccggatggcggacacggctatcgtgaccgcaccggcgaaaacggcaacggatatcctggcagcgtttgccggtgagcggttctgctttatggcgccggatgcgctgctggcgagcggggcaagagccgactggctggtggttgacgaggcggcggcaatccccgcgccgctgctgctgcaactggtttcgcgctttccccgcatactactcaccaccaccgttcagggctacgaaggcaccggacgcggttttttacttaagttttgcgcccgtttttcgcagcttcaccgctttacgcttcgtcagcctgtccgctgggcgccagaatgcccgctggaaaatatcgtcagcgaggcgctgatattcgacgatgaagcatttgcgcaggcgccacatggcgcgatagcaatctcggcgttttaccaacaggcctggggggagacgcccgcgttgccgagggctgtgtatcaattactgtcgggggcgcactatcgtacttcgccgctggatctgcgccgaatgatggatgcgccaggacagcatttcttgcaggccacggcgaataaccgtgtggcgggcgccctctggctggtcgaagagggcgggttatccgcagaactcagtcaggctgtatggtgcggtttccgggtccgcgtggaaatctggtggcgcagtcgctggcggcgcacggtagcgacccttctagcgcgacgctggtcgggcgtcgcgtaagccgtatcgcggtgcaccccgccgccagcgcgaaggcatcggtcagcagttgattgcctgcgcgtgcatgcaggcggcgcagtgtgattatctttccgtcagcttcggctatacgccggagctgtggcgtttctggcaacgctgcggttttgtgctggtacgaatgggcaaccatcgggaggcgagcagcggttgctatacggcgatggcgttattgccgctgagcgacgcgggaaaacggctggcgcagcaggaacaccgacgtttgcgccgcgatgcggatatcctgacgcagtggaacggcgaggcgataccgctggcggcgttagatgaacaggcgcttaatgatgaagactggcgtgagctggtcggttttgcgttcgcgcaccgcccgctactgacatcgttaggttgcctgcatcgtttactgcaatacagcgcattgccattaccagcgctgagagggcggctggaagaaaaagccagcgatgccgaactgtgcgcccggctacgcatttcaggccgtaaagctctgctggcgttgcagcgtgcgcaggcgcgcaggcgctgattgcgttgg

SEQ ID NO: 37056 - DNA, 2121 bp, Salmonella paratyphi A
atggctcgtacaacacccatcgcacgctaccgtaatatcggtatcagtgcgcacatcgacgccggtaaaaccactactaccgaacgtattctgttctacaccggtgtaaaccacaaaatcggtgaagttcatgacggcgcagctaccatggactggatggagcaggagcaggagcgtggtattactatcacctccgcagcgactactgcattctggtctggtatggctaagcagtatgaaccgcatcgcatcaacatcatcgacaccccggggcacgttgacttcactatcgaagtagaacgttccatgcgtgttctcgatggtgcggtaatggtttactgcgcagttggtggtgttcagccgcagtctgaaaccgtatggcgtcaggcaaacaaatacaaagttccgcgcattgcgttcgttaacaaaatggaccgcatgggcgcgaacttcctgaaagttgttggtcagatcaaaacccgtctgggcgcgaacccggttccgctgcagctggcaattggtgctgaagaaggtttcaccggcgttgttgacctggtgaaaatgaaagccatcaactggaacgatgccgaccagggcgttaccttcgaatacgaagatatcccggctgacatgcaggacctggctaacgaatggcaccagaacctgatcgagtccgccgcagaagcttctgaagagctgatggaaaaatacctgggtggtgaagaactgactgaagaagagatcaaacaagctctgcgtcagcgcgttctgaacaacgaaatcatcctggtaacctgtggttctgcatttaagaacaaaggtgttcaggcgatgctggatgcggtaattgattacctgccatccccggtagacgtacctgcgatcaacggtattctggacgacggtaaagatactccggctgagcgtcacgcaagcgacgacgagccgttctctgcgctggcgttcaaaatcgctaccgacccgtttgtgggtaacctgaccttcttccgtgtgtactccggtgtggttaactctggtgataccgtactgaactccgtgaaaaccgcacgtgagcgtttcggtcgtatcgttcagatgcacgctaacaaacgtgaagagatcaaagaagttcgcgcgggcacatcgcggctgctatcggcctgaaagacgtgactaccggtgacaccctgtgtgatccggaaaacccgatcattctggaacgtatggaattccctgagccggtaatctccatcgcggtagaaccgaaaaccaaagctgaccaggaaaaaatgggtctggctctgggccgtctgggaaagaagacccgtcattccgcgtatggactgatgaagaatctaaccagaccatcatcgctggtatgggtgaacttcacctggatatcatcgttgaccgtatgaagcgtgaattcaacgttgaagcgaacgtgggtaaacctcaggttgcttaccgcgacgattcgcgcgaaagttaccgacatcgaaggtaaacacgcgaaacagtctggtggtcgcggtcagtatggtcatgttgttatcgacatgtacccgctggagccgggctctaacccgaaacgttacgagttcatcacgacatcaaaggtggtgtaattctggcgagtacatcccggccgttgataaaggcatccaggagcagctgaaatctggcccgctggcgggttatccggtagttgatctcggtgtgcgtctgcacttcggttcttaccatgacgttgactcctctgagctggcgtttaaactggctgcgtctatcgcctttaaagaaggctttaagaaagcaaaaccagttctgcttgagccgatcatgaaggttgaagtagaaacacctgaagagaataccggtgacgttatcggcgaccttagccgccgtcgtggtatgctcaaaggtcaggaatctgaagttacaggcgttaagatccacgctgaagtaccgctgtctgaaatgttcggatatgcaactcagctgcgttctctgaccaaaggtcgcgcatcgtacactatggaattcctgaagtatgatgatgcgccgaacaacgttgctcaggccgtaatcgaagcccgtggtaaataagccgcagggtta

SEQ ID NO: 37057 - DNA, 1960 bp, Salmonella paratyphi A
tttaccaacgatctggaccacggcccgtacatttctgaaacggtacgcgtcgatccaactaacgatcgtctgagcgcgctggtagaaatctaccgcatgatgcgccctggtgagccgccgacacgcgagagcgctgaaagcctgtttgagaacctgttcttctccgaagaccgctatgacctgtctgcggtgggtcgtatgaagttcaaccgttctctgctgcgcgacgaaatcgaaggttccggtatcctgagcaaagacgacatcattgatgtcatgaagaagctcatcgatatccgtaacggtaaaggcgaagtggatgatatcgaccacctcggcaaccgtcgtatccgttccgtcggcgaaatggcggaaaaccagttccgcgttggcctggtgcgtgtagagcgtgcgttgaaagagcgtctgtctctgggcgatctggataccctgatgcctcaggatatgatcaacgccaagccgatttccgccgcagtgaaagagttctttggttccagccagctgtctcagtttatggaccagaacaacccgctgtctgagattacgcacaaacgtcgtatctccgcactcggcccaggcggtctgacccgcgaacgcgcaggcttcgaagttcgagacgtacacccgacgcactacggtcgcgtatgtcctatcgaaacgccggaaggtccgaacatcggtctgatcaactccctgtccgtgtacgcacagactaacgaatatggcttccttgagacgccgtaccgtcgtgtggttgatggcgtggttactgacgaaattcattacctgtctgctatcgaagaaggcaactacgttatcgctcaggcgaactccaacctggatgacgaaggccactttgtagaagatctggtgacctgccgtagcaaaggcgaatccagcttgttcagccgcgaccaggttgactacatggacgtttccacccagcaggtggtctccgtcggtgcgtccctgatcccgttcctggaacacgatgacgccaaccgtgcattgatgggtgcgaacatgcaacgtcaggcggttccgactctgcgtgctgataagccgctggtgggtaccggtatggaacgtgtgtcgccgtcgactccggtgttactgcagtagctaaacgtggcggtactgttcagtacgtggatgcatcccgtatcgttatcaaagttaacgaagacgagatgtacccgggtgaagcaggtatcgacatctataacctgaccaaatacacccgctctaaccagaacacctgtatcaaccagatgccatgtgtgtctctgggcgagccggttgaacgcggcgacgtgctggcagacggtccgtccaccgacctcggtgaactggcgctcggtcagaacatgcgcgtggcgttcatgccgtggaacgtaacaacttcgaagactccatcctcgtttccgagcgtgttgtccaggaagaccgtttcaccaccatccacattcaggaactggcgtgcgtgtcccgtgacaccaagctggggccggaagagatcaccgctgacatcccgaacgtgggtgaagctgcgctctccaaactggatgaatccggtatcgtttacatcggcgcggaagtgactggcggcgacattctggtcggtaaggtaacgccgaaaggtgaaacccagctgacgccggaagagaaactgctgcgtgcgatcttcggtgagaaagcgtctgacgttaaagactcttctctgcgcggtactaacggtgtctccggtacggttatcgacgttcaggtctttactcgcgatggcgtagaaaaagacaaacgtgctctggaaatcgaagagatgcagctcaagcaggcgaaaaaagacctgtctgaagaactgcagatcctcgaagcgggcctgtttagccgtatccgtgcggtgttggtgtccggcggcgttgaagctgagaagctcgac

SEQ ID NO: 37058 - DNA, 495 bp, Salmonella paratyphi A
  misc_feature (306)..(306): n=g, a, t or c
  misc_feature (308)..(308): n=g, a, t or c
atggctttaaatcttcaagacaaacaagcgattgttgctgaagtcagcgaagtagccaaaggcgcgctgtctgcagtagttgcggattcccgtggcgtaactgtagataaaatgactgaactgcgtaaagcaggccgtgaagctggcgtatacatgcgtgttgttcgtaacaccctgctgcgccgcgtcgttgaaggtactcagttcgagtgcctgaaagacacgtttgttggtccgaccctgattgcatactctatggaacacccgggcgctgctgctcgtctgttcaaagagttcgcgaaagantngcacaaatttgaggtcaaagctgcagcctttgaaggtgagctgatcccggcgtctcagatcgaccgcctggcaactctgccgacctacgaagaagcaattgcacgcctgatggcaaccatgaaagaagcttcggctggcaaactggttcgcacactggctgctgtacgcgatgcaaaagaagctgcg

SEQ ID NO: 37059 - DNA, 706 bp, Salmonella paratyphi A
  misc_feature (254)..(254): n=g, a, t or c
atggctaaactgaccaagcgtatgcgcgtgatccgtgaaaaagttgatgcgaccaaacagtacgacatcaacgaagctattgccctgctgaaagagctggccactgctaaattcaacgaaagcgttgacgttgccgttaacctcggcatcgacgctcgtaaatctgaccagaacgttcgtggcgcgactgtactgccgcacggtactggccgttctgttcgcgttgccgtatttacccagggcccgaacgctgnaaagctaaagctctggcgctgagctggtaggtatggaagatctggctgaccagatcaagaaaggcgaaatgaacttcgacgttgttatcgcatccccggatgcaatgcgcgttgttggccagctgggccaggttctgggtccgcgcggcctgatgccaaacccgaaagtcggtaccgtaacgccgaacgttgctgaagcggttaagaacgctaaagcaggtcaggttcgttaccgtaacgacaaaaacggcatcatccacaccaccatcggtaaagtggactttgacgctgacaaactgaaagaaaacctggaagctctgctggttgcgctgaaaaaagcaaaaccgagccaggcgaaaggcgtgtacatcaagaaagttagcatctccaccaccatgggtgctggcgttgccgttgatcaggctggtctgagcgcatctgcgaactaagat

SEQ ID NO: 37060 - DNA, 545 bp, Salmonella paratyphi A
atgtctgaagcacctaaaaagcgctggtacgtcgttcaggcgttttccggttttgaaggccgcgtagccacatcgctgcgcgagcatatcaaattacacaatatggaagagctgtttggcgaagtcatggtgccgactgaagaagtcgttgagatccgtggcggccagcgtcgcaaaagcgaacgcaaattcttcccgggttacgttctggtccagatggtcatgaacgacgcaagctggcacctggtgcgcacgtgccgcgtgtgatgggctttatcggcggtacctctgaccgtccggcgccgatcagcgacaaagaagtcgatgcgatcatgaactgcctgcagcaggttggcgataagccgcggccgaaaacgttgtttgaaccgggtgaaatggttcgtgttaacgacggtccgttcgcagactttaacggcgttgtcgaagaagtcgattatgagaagtctcgcctgaaagtgtctgtttctatcttcggtcgtgcgaccccggtagagctggacttcagccaggttgagaaagcgtaa

SEQ ID NO: 37061 - DNA, 1184 bp, Salmonella paratyphi A
gtgtctaaagaaaaatttgaacgtacaaaaccgcacgttaacgtcggcaccatcggccacgttgaccacggtaaaactaccctgaccgctgcaatcaccaccgtactggctaaaacctacggcggtgctgctcgtgcattcgaccagatcgataacgctccggaagaaaaagcgcgtggtatcaccatcaacacttctcacgttgaatacgataccccgacccgccactacgcacacgtagactgcccggggcacgccgactatgtaaaaaacatgatcaccggtgctgcgcagatggacggcgcgatcctggttgttgctgcgactgacggcccgatgccgcagacccgtgagcacatcctgctgggtcgtcaggtaggcgttccgtacatcatcgtgttcctgaacaaatgcgacatggttgatgacgaagagctgctggaactggttgaaatggaagttcgtgaacttctgtctcagtacgacttcccgggcgacgacacgccgatcgttcgtggttctgctctgaaagcgctggaaggcgacgcagagtgggaagcgaaaatcatcgaactggctggcttcctggattcttacatcccggaaccagagcgtgcgattgacaagccgttcctgctgccgatcgaagacgtattctccatctccggtcgtggtaccgttgttaccggtcgtgtagaacgcggtatcatcaaagtgggcgaagaagttgaaatcgttggtatcaaagagactcagaagtctacctgtactggcgttgaaatgttccgcaaactgctggacgaaggcgtgccggtgagaacgtaggtgttctgctgcgtggtatcaaacgtgaagaaatcgaacgtggtcaggtactggctaagccgggcaccatcaagccgcacaccaagttcgaatctgaagtgtacattctgtccaaagatgaaggcggccgtcatactccgttcttcaaaggctaccgtccgcagttctacttccgtactactgacgtgactggtaccatcgaactgccggaaggcgtagagatggtaatgccgggcgacaatatcaaaatggttgttaccctgatccacccgatcgcaatggacgacggtctgcgtttcgcaatccgtgaaggcggccgtactgttggcgcgggcgttgttgctaaagttctcggctaa

SEQ ID NO: 37062 - DNA, 1205 bp, Salmonella paratyphi A
atgtatcaacctgtcgctctattcatcggcctgcgttacatgcgcggggtgcagcagatcgcttcggtcgcttcgtttcctggctttccactatcggcattaccctgggggtgatggcgctggtcacggtattgtcggtgatgaacggttttgagcgcgaactgcaaaataacattcttggtttgatgcctcaggcatcctctctgctgaacatggttctcttaacccgagtcagatgccggaaaaagcggtgaatctgcaaggcgttaaccgtattgcgccgctgacgacgggcgatgtcgtactgcaaagcgcgcgtagcgttgcggttggcgtgatgttgggtatcgatccggcgcaaaaagatccgttaacgccgtatctggtcaatgtgaagcaaagcgaattacagccgggtaagtataatgtcatcctcggcgagcagctcgccggacagttaggggtcaaccgcggcgatcagattcggctaatggtgccatctgccagccagtttacgccaatgggacgcctgcccagtcagcgtctgtttacggtgattggcacatttgccgccaatagcgaggtcgatggctatgaaatgctggtcaatattcaggacgcgtcgcgtttaatgcgctatccggcaggcaatattaccggctggcgtctgtggctggatgaaccgctgcaagtcgataccctcagccaacagacgctgccgcaaggcacgaagtggcaggactggcgcgaacgcaaaggcgagttgttccaggctgtgcgcatggaaaagaacatgatgggattgttgctgagcctcatcgtggcggtcgcggcttttaacattattacttcgttgggcctgatggttatggagaagcagggtgaagtggcgattttacaaactcaagggctgacgccgcgacaaattatgatggtctttatggtgcagggcgcacgcgccgggattatcggcgcgctgttgggcgtgcgctgggcgcattgcttgccagtcaactgaataacctgatgccgatcatcggcgcgtttctggatggcgctgcgttgcccgtggcgatagagccgttacaggtgatcgttatcgcgctggtggcaatggccatagcgctgctttctacgctttatccttcctggcgcgtgccgccactcaacccgctgaggctttacgttatgaataagatcctgtt

SEQ ID NO: 37063 - DNA, 3428 bp, Salmonella paratyphi A
  misc_feature (2441)..(2442): n=g, a, t or c
  misc_feature (2444)..(2444): n=g, a, t or c
  misc_feature (2446)..(2446): n=g, a, t or c
  misc_feature (3166)..(3166): n=g, a, t or c
acgctgccgacaaaagcgggcgatcagtgccagttgggcgaacttaccggtgccgcctgcgctacgctggtggcggagatagccgaacgccatgccggtccggtggtactcatagcgcctgacatgcaaaatgctctgcgattgcatgatgaaatccgccagtttaccgatcagatggtgatgaacctggcggactgggaaacgctaccgtatgacagcttttccccgcatcaggaaattatctcttcgcgcctgtccacgctctaccagttgccgtcgatgcagcgcggcgtcttgattgtaccggtaaacaccctgatgcagcgcgtttgtccgcatagctatctgcatggtcatgcgctggtgatgaaaaaaggccagcggctgtcccgcgacgctctgccgcgcagcttgacagcgccggttatcggcatgtcgatcaggtgatggagcatggcgaatacgcgacgcgcggcgcgctgttggatctctttccgatgggcagcgaacagccttatcgcctcgacttttttgatgatgaaatcgacagcctgcgtctgtttgacgcggatacccagcgtacgctggaggaggtcgaggccatcaatttgttgcccgcgcacgaatttcctaccgacaaagccgctattgagcttttccgtagccagtggcgcgatacctttgaggtaaaacgcgacgccgagcacatctatcagcaggtcagcaaaggcactctgcccgccgggatcgaatactggcagccgctctttttcagcgaaccgttaccgccattatttagctatttccccgccaatactctggtggtgaataccggctcgctggaaaccagcgccgaacgctttcaggccgatacgctggcgcgttttgaaaatcgtggcgtcgatcctatgcgcccgcttttgccgccggaagccctctggctacgggtggatgagctcttttccgagcttaaacgctggcctcgcctccagcttaaaaccgaccatctgccggaaaaagccgccaataccaatctcggtttccagaaattaccggatttgtctatccaggcacagcagaaagcgcgctggacgcgctgcgtaagttcctcgaatctttcagcggtccggtgattttttcggtggaaagcgaaggacgccgcgaagctctgggagagctcctggctcgcataaaaatcgcgccgaagcggatattacgcctggacgaggcgcaggatgcgggacgctatctgatgattggcgccgcagaacatggctttatcgacacccaacgcaatctggcgctgatttgtgaaagcgatcttttgggtgagcgggtggcgcgtcgccgcctggattcccgccgcacgatcaacccggatacgttgattcgtaacctggcggagctccacgtcggtcaaccggtagtgcatctggagcacggcgtcggacgctatgccggcatgaccactctggaggctggcggcatcaagggtgagtatctgatgctcacctacgccaatgacgccaaactgtatgtgccggtctcctcattgcatctgattagccgctatgccggcggcgcggaagaaagtgcgccgtgcataaactgggcggcgacctcggatcgcgcgcccggcagaaagcggcggaaaaagtgcgcgatgtcgcagcggaactgttggatatttatgcgcaacgggcggcaaaagaggggtttgcctttaagcatgatcgtgagcagtatcagttattctgcgacagcttcccgtttgaaacgacgcccgatcaggcacaggcgattaacgccgtattgagcgatatgtgccaaccgctggcgatggacaggctggtgtgcggcgacgtcggcttcggcaaaaccgaagtggcgatgcgcgccgcgttcctggcggtggaaaaccataaacaggtagcggtactggtgccgaccacgctgctggcgcagcaacactatgacaacttccgcgaccgtttcgccaactggccggtacgcattgagatgctgtcccgctttcgcagcgccaaagagcagacgcaaatctggcggaagccgccgagggtaagatcgatattctgatcggtacgcataaactgctacaaagcgatgtgaagctgcgcgacctgggcctgctgattgtcgatgaagagcaccgtttcggcgtgcgcacaaagagcgaattaaggcgatgcgcgcgactgtcgatattctgacgctcacggcgacgctttcccgcggacgctgaatatggcgatgagcggtatgcgcgatctctccattatcgccactccccctgcccgtcgtctggcggtaaaacctttgtccgcgagtatgatagcctggtagtaagggaagcgattctgcgtgaaatcctgcgcggcggtcaggtatactatttgtacaatgacgtcgaacatattcanngnanacgagagcggctggcggaactggtgccggaagccgaatcgctataagccacgggcagatgcgcgaacgtgagctggaacgggtcatgaacgatttccaccatcaacgttttaacgtgctggtgtgtactaccattatcgaaacggggatcgacattcccaccgctaacacgatcatcattgaacgcgcggatcatttcggcctcgcgcagttgcaccagactcgtggacgcgttgggcgctcgcaaccatcagcctaacgcctggctgttgacgccacatcctaaggccatgaccaccgatgcgcaaaaacggctggaggcgattgcgtcgctggaggatttaggcgccgggtttgcgctggcgacccacgatctggaaaaatccggcgcgggcgagctgcttggcgaagagcaaagcggctcaatggaaaccattggcttctcactctacatggaactgttggaaaacgccgttgatgcgctgaaagcaggccgcgaaccctcgctggaagatctcaccagtcagcaaacggaagtcgagctgcgaatgccgtcgttactgccggatgattttattccggatgttaatacccggctgtcattctataaacgcattgccagcgcgaagaacgaaaacgagctggaagagatcaaagtggaattgatcgatcgcttcgcctgctgcccgatccggcgcgtaatctgctggatatcgcccgntcgcgaacaggcgcaaaagctcggcatccgaaaactggagggtaacgagaaaggcggaacgattgagttcgccgagaaaaaccacgttgaccccgcctggcttatcgggttgctgcaaaaacagccgcagcatttccgtctggatggcccgacgcgcctcaagtttattcaggatttaagcgaacgtaaaacgcgtatagactgggtacgccagttcatgcagcaactggaagaaaacgctattgcataagcgtcaggccgg

SEQ ID NO: 37064 - DNA, 982 bp, Salmonella paratyphi A
atgttcaacaatacgcgactctctcgctggtgggcgttgcttgcgcttaccgcgaccatcatgcttgcccttcccgcgcaggcgaatacgtggcctcttccgccccccggcagtcaactggtgggagaaaataaattccatgtcgttgaagacgacggcggctcgctggaggcgactcgccaaaaaatataacgtgggctttttagcctgcttacaggccaaccccggcattgatccttacgtaccacgcgcaggcagcgtgctgacgattccgctgcaaacgctgctaccggacgcgccacgtgaaggtatcgtcattaacctcgcggaattacggctttactattatcaaccggggaaaaatacggtcacggtctaccctcactcggacttggccaactgggcggcgataccctgacgcaacgatggtgacgacatttcggataaacgcgccaatccaacctggacgccgaccgccaatattcgcgcccgttataaagcgcaaggcatcgatctccccgccgtggtgcctgccggtcccgataacccaatggggcatcacgcgattcgtttagcggcctacggggtcgctatctgttacatggcacgaatgcgattttggcattggtatgcgcgtcagttccggctgtatccgtctgcgcgacggtgatatagagacattgttccgtcagtcacgccgggaaccaaagtgaatataatcaatacgccgattaaagcctcggtggagccaggcggcgtgcgactggtggaagttcatcagccgctgtctaaaaatataggcgacgatccacaggtgctgccgattgtgctgaatggcccgatgcaggcctttaagaacgcgccgcagaccgatgctgcggtgatggaacatgttatggaagtgcgttccggaatgccggtggatgtaacccgtcaatcagaggcgaaaccgcagtcgctgtaagcgtgaatagctgaccga

SEQ ID NO: 37065 - DNA, 633 bp, Salmonella paratyphi A
atgacaacggataccacgagttgcgcgaagaaaagccgtggccgaccaaaagtgttcgacagggaagccgcgcttgataaggccatgactctcttctggcagcacggctatgaagcaacttcgcttgccgatctcgtagaggctaccggggcgaaagcgcctactctctatgcggaattcactaacaaagaaggattatttcgcgctgccctggatcgctacatcactcgctttgcctcaaaacacgaagcccagctcttttgtgaagagaaaagcgtagaatcggcgctggaagattacttcacagaaattgccgcctgctttaccagtacagacacgccggctggctgctttatgattaatacgtccgccaccctggccgcctcctcgcgcgatatcgcccgcacggtaaaatcacgccacgccatgcaggaacagacgctcatccagtttctgcgccaacgtcaggagcgcggtgaaattccggcgcactgtaacccgcaggcgctcgcagaatatataaactgtattttacagggaatgtcgatcagcgcccgtgaaggtgccaccttcgaacaactgatgcaaattacgcgtacgactctgcgcatctggcctgaactgatcaagtcc

SEQ ID NO: 37066 - DNA, 1311 bp, Salmonella paratyphi A
ttgactacaccattaaaaaagatcgtgattgtcggcggcggcgctggcggactggaaatggcgacgcagttaggccataaactggggcgcaagaaaaaagcgaaaatcacgctggtagacagaaatcacagccatctgtggaaaccattgctgcacgaagtggcgactggctctctggacgaaggcgtggatgcgctgagctatctggctcatgcgcgtaatcatggtttccagttccaactggggtcggtgatggatatcgatcgcgaagcgaaaaccatcaccattgccgagttgcgtgatgaaaagggcgaactgctggtgccggagcgcaaaatcgcgtatgacacgctggtgatggcgctgggcagtacctctaatgatttcaacacgccgggcgtgaaagagcactgtatcttcctcgataacccgcatcaggcgcgccgttttcaccaggagatgctgaacctgttcctcaagtattcggctaacctgggcgcgaacggtaaggtcaatatcgccatcgttggcggcggtgcgacgggggttgagctgtcggctgaactgcataatgcggtaaaacagctgcatagctatggttataaggggctgaccaacgacgcgctgaacgtgacgttggttgaggctggcgagcgtattctgcctgcgttgccgccgcgtatctccagcgccgcgcataatgaactgaccaaactgggcgttcgcgtgtgacgcaaactatggtcaccagcgccgacgaaggcggtctgcatacgaaagaaggtgaatatattcaggccgatctgatggtgtgggcggcgggtatcaaagcgccagattttatgaaagagattggtggtctggaaacgaaccgcattaaccaactggtggtggaaccgacgctgcaaaccacgcgcgatcctgatatttatgcgattggcgaccgcttcttgcgcacgtccggagggaggttattgatcccctccgctcaggcggcgcatcagatggctacctgcgcgatgaataacattctggcgcagatgaatggcaaatccgctgaaagcttaccagtataaagatcatggttcgctggtctctctgtccaacttctctaccgtgggtagtctgatggggaacctgacccgcggttcaatgatgattgaaggacgtatcgcccgcttcttgtatatctcgctataccgtatgcaccagatagcgctgcatggatactttaaaaccggcctgatgatgctggtgggcagtattaaccgcgtcattcgtccgcgcctgaaactgcattaatttctctgc

SEQ ID NO: 37067 - DNA, 753 bp, Salmonella paratyphi A
atggtggaagattcacaagaaacgacgcactttggctttcagaccgtcgctaaagagcagaaagctgacatggtggcccacgtttttcattctgtggcgtcaaagtacgatgtgatgaatgatttaatgtcatttggcattcatcgtttgtggaagcgcttcaccattgattgcagtggcgtgcgtcgtggacaaaccgttctcgatttagcgggcggtacgggcgatcttaccgcgaaattttcacgtatggtcggggagactggcaaagttatcctggcggatattaatgattccatgctcaaaatggggcgtgagaagctgcgtaatatcggcgtgatcggcaacgtagagtatgtgcaggcgaatgccgaagctctgcctttccctgataatacgtttgattgcattaccatttcgtttggtttgcgcaatgtaacggaaaaagaaaaagcgctgcggtcaatgttccgtgtgttgaaacccggcggacgtttactggtgcttgaattttctaagcctatcattgagccgctgagtaaagcgtatgacgcctattctttccatattttaccgcgtattggctcgatggttgcgaacgatgcggatagctatcggtatctcgcggaatccatccgtatgcatcccgatcaggataccttaaaagccatgatgcaggacgccggatttgagagcgtggattattacaatctgacggcgggcgttgtggcattgcaccgtggttataaattc

SEQ ID NO: 37068 - DNA, 1008 bp, Salmonella paratyphi A
atgtctgaaggctggaacattgccattctgggcgcaacgggccgtagcgaagccctgcttgaaacactggctgaacgtcagttcccggtcggtgaaatttatgcgttggcgcgtcatgaaagcgcgggcgagcacctccgttttggtggcaagtcggtcattgtccaggatgcggcggactttgactggacgcaggcgcagttggcgtttttcgttgccggcgcagaggcatcggctgcctggatagacgacgcgaccaatgcaggttgcctggtgatagattccagcggtctgttcgcgctggagcctgatgtgccgctggtcgtgccggaagttaacccgtatgtactggcggattaccgcaaccgtaacgtgattgcggtcgccgatagtctgaccagtcaactgctggcggcgctcaagccgttaatcgatcaggggggactgtcgcgcatcgccgtcaccagtatgttatcagcgtccgcacaggggaaaaaagcggtcgatgcgctggccggacagagtgcgaagctgcttaacggcataccgattgatgaagatgatttctttggccgccagttggcgttcaatatgctgccgctgctgccggatcgtgaaggcagcgtgcgccaggaacgtcgtatcgtcgatgaagtgcgtaaaattttgcaggacgatggcgtgatgatctccgccagtgtcgtgcagtcgccggtgttctatggccatgcgcagatggtgagctttgaagcgctccgtccgctggcggcggaagaggcgcgcgaggcgttttcccgcggtgaagatatcgtactgtcagaagagacggattacccgacgcaggtgggcgacgcttccggcaatccacagctctctattggctgtgtgcataatgattacggtatgccggaacaaattcagttctggtcagtggcggacaacgtgcgtttcggcggtgcgctgatggccgttaaaattgcggagaagctggtgcaggagtatctgtac

SEQ ID NO: 37069 - DNA, 1139 bp, Salmonella paratyphi A
gtgaaaattctcgttgatgaaaatatgccttacgcccgcgaattatttagccgcctgggtgaggtaaaggcagtgccgggtcgcccgatccccgttgaagaattgaaccatgccgatgcgttaatggtgcgttcggtcacgaaagtgaatgaatcgctgctgagcgcacgccgattaacttcgttggtactgctacggcaggcaccgatcatgtggatgaggcatggctgaagcaggcgggcatcggtttttcagccgcgcccggctgtaatgctatcgccgtggtggagtatgtgttttccgcgctgttgatgctggccgaacgtgacggcttttcgttacgcgatcgcactatagggattgtcggcgtgggtaacgtcggaagccggctacagaccaggcttgaagcgttgggtatccgcacgttgctgtgcgatccgccacgcccgcacgcggggacgagggtgattttcgtacgctggatgagctggtgcaggaagcggatgtcctgactttccatacgccgctctataaagacggaccgtacaaaacgctgcatctggccgatgagacgctgatccgtcgactgaaacccggcgtcattctcattaacgcctgccgcggcccggtggtggataacgccgcattgctggcgcgactcaatgccgggcagccgctgagcgtggtgcttgatgtgtgggagggcgaaccggatcttaacgtcgcgctactggaagccgtggatatcggcacgtcgcatattgccggctatacgctggaaggcaaagcgcgcggcaccacccaggtctttgaggcgtatagcgcgtttatcggtcgcgagcacgtgtcgcgctggagacattactgcctgcgcctgagtttgatcgtattacgcttcacggcccgctggatcaaccgacgctgaaaagactggcgcatttggtgtatgatgtgcgcgcgacgatcgcccgctgcgtaaagtcgctggaattccgggtgaatttgataaattgcgtaaaaattatcttgagcgccgtgaatggtcgtctttatacgtgatgtgtgacgacgaaggggcagacgccttgctgtgtaagctaggttttaacgctgttcatcacccggcacattaatgtctt

SEQ ID NO: 37070 - DNA, 1213 bp, Salmonella paratyphi A
gctctgttctctgcggcgatgttcttcgttctggctggcgtctttatgggcgtacaactggagctggacggcaccaaactggtggtggataccgccgccgacatccgctggcagtggatctttatcggtacggcagtggtttttttctttcagttgctgcgtccgatgttccagaaagcggtgaagcacgtctccggaccgaagtttattctgccggcgatcgatggctctaccgttaagcaaaagctgtttctgatggcgctgttggttatcgccgtggcgtggccgtttatggtgtcgcgcggtagcgtcgatatcgccactatgaccatgatttatatcatcctcggtctggggctgaacgtggtggtggggctgtccggcctgctggtattgggctacggcggcttttacgccatcggcgcttatacctttgcgctgctcaaccactattatggtttgggtttctggacctgcctgccgctggcgggattggtctccgccgctgctggtttcctgctcggcttcccggtactgcgtctgcgcggcgactatctggcgattgtgacgctcggcttcggcgaaatcgtccgtatcctgctgctcaacaacacggaaattaccggcggcccgaacggtatcagccagatccccaaaccgacgctatttggtctggagtttagccgcaacacccgcgaaggcggctgggataccttcagcaatttctttggcgtgaagtacgacccatccgaccgggtcattttcctctatctggtggccctgttgctggtggtcctgtcgctgtttgtcattaaccgcctgctgcgtatgccgctgggccgggcgtgggaagcgttgcgtgaagatgagatcgcctgtcgctcattaggtttaagcccgacgcgcatcaagctgaccgcttttactatcagcgccgcgtttgccggtttcgccgggacgttgtttgccgcccgccacgtttgtcagcccggaatccttcactttcgccgaatccgccttcgtgctggcgattgtggtgctgggcggaatgggctcgcagtttgcggtgatcctggcggcggttctgctggtggtgtcgcgcgacttcaacgaatacagcatgttgatgctcggcggtttgatggtgttgatgatgatctggcgcccgcagggattgctgccgatgacgcgtccgcagttgaagctgaaaagt

SEQ ID NO: 37071 - DNA, 1275 bp, Salmonella paratyphi A
ttacgacatacagctttaggactggcgctgagtctggcatttacgggtcaggcgttggcgtcaccactattccattctggcattcaatggaaggggagttaggcaaagaagttgattcactggcgcaacgtttcaaccaggccaatccggattacaaaatcgttccggtctataaggggaactatgaacagaacctgagcgccgggatcgcgcattccgtaccggcaacgcgccgggaatattgcaggtttatgaggttgggacggcgaccatgatggcctcgaaagccattaagccggtttatgaagtgtttaaagacgccggtattaactttgacgagtcccagtttgtaccgaccgttgcaggctactacaccgatgctaaaagcgggcatctgctctcccagccctttaacagctccacgccggtactgtactacaacaaagacgcctttaagaaagccggtttagatccggaacagccgccgaaaacctggcaggagctggctgactataccgcgaaactgagagcggcaggcatgaaatgcggttacgccagcggctggcaaggctggatccaactggaaaacttcagcgcctggaacggtctcccctttgccagtaaaaacaatggctttgacggtacagacgcggtgctggagtttaataagccagagcaggtgaaacatatcgcgctgctggaagagatgaataaaaaaggcgattttagctatgttgggcgtaaggacgagtctaccgagaagttttataacggtgactgcgcgatgacaaccgcgtcctccggctcgctcgccaatatccgccagtatgccaaatttaactatggcgtgggtatgatgccgtacgacgctgatatcaagggcgcgccgcaaaacgccattatcgcggagccagcctatgggtcatgcagggtaaatataaagaaacctataccggcgtcgccaaattcctcgacttcctggcaaaaccggaaaacgctgctgaatggcatcaaaaaactggctacctgccgattaccaccgccgcctacgagctgacccgcgagcagggttattacgataaaaaccccggtgcggatatcgccactcgccagatgttgaataagccgccgttacccttcaccaaaggcttgcgtctgggcaatatgccgcagattcgtaccatcgtggacgaagagctggaaagcgtctggaccgggaagaagaccccacaacaggcgttggataccgcagtggagcgcgggaatcagttgctg

SEQ ID NO: 37072 - DNA, 1831 bp, Salmonella paratyphi A
  misc_feature (1390)..(1390): n=g, a, t or c
  misc_feature (1663)..(1663): n=g, a, t or c
  misc_feature (1767)..(1767): n=g, a, t or c
aaagtcccgagcctggtgagagatacacgcgtggaaggcactcagggcgctgcgtgacgaatccgacaaagacgggatgcgcatcgtgattgaagtgaaagccgatgcggtgcgcgaggtggtgcttaataatctctactcccagacccagctacaggtcttcttcggtattaacatggtggcgctgcatcacggccagccgaagatcatgaacctgaaagacatcatttcagcgttcgtgcccaccgccgtgaagtggtgacgcgtcgtactatttttgaatgcgtaaagcccgtgaccgcgcgcatatccttgaagctctggcgattgcgctggccaacatcgacccgattatcgaactgattcgccgcgccaacgccggcagaagcaaaagcggcgctgatttcgcgtccgtgggatctgggcaacgttgctgcgatgctggagcgcgccggtgatgacgctgcgtccggaatgctggagccagaatttggcgtgcgtgacggtcagtattacctgactgagcagcaggcgcaggcgattctggatctgcggttgcagaaactgaccggcctggagcatgaaaaactgctcgacgaatacaaagagttgctggagcagattgctgaactgctgcacattctggcagcgccgatcgcctgatggaagtgatccgtgaagagatggagttaattcgcgatcagttcggcgatgagcgtcgtaccgaaatcaccgccaacagcgccgatattaatatcgaagatctgattagccaggaagatgttgtcgtgacgctgtctcaccagggttacgtcaagtatcaaccgctgacggattacgaagcgcaacgtcgtggtgggaaaggtaaatctgccgcgcgtattaaagaagaagactttatcgaccgcctgctggtggccaacacccatgacaccatcctctgcttctccagccggggccgtctgtactggatgaaggtctatcagttgccggaagccagccgtgggcgcgcggtcgtccgatcgttaacctgctgccgctggaagccaacgaacgtatcaccgcgattctgccggttcgtgagtacgaagaaggcgtcaacgtctttatggcgaccgcagcggtaccgtgaagaaaacggcgctgaccgaattcagccgtccgcgttcgcccggtattatcgcggtaaacctcaacgacggcgacgagctgattggcgttgacctgacttctggttctgacgaagtcatgctgttctcggccgcgggcaaagtggtgcgcttcaaagaagacgccgtccgtgcgatggggcgtacgcgaccggtgtgcgcggtattaagctggcgggagacgataaagtcgtctctctgatcatcccacgcggcgaagngcgctattctgaccgtaacgcaaaacggctacgggaacgtaccgcagcggacgagtatccgaccaagtctcgtgcgaccagggcgttatctctatcaaagtgaccgagcgcacggttcgtgtcggtgcggtacaggtagacgattgcgaccagatcatgatgatcacggatgccggtactctggtgcgtacccgtgtgtccgagatcagcgtagtgggacgtaatacccagggcgttatccttatccccacgggagaggatgaaaacgtatgngtctgcaacgcgttgctgaaccggtagatgacgaagaactcgacgctatcgacggcagcgtggcggaaggggatgaggatatcgccccggaagcggaaagcgantgacgacgttgcggatgacgctgacgagtaatgttattgctgtgcgagggccggatatccggcc

SEQ ID NO: 37073 - DNA, 648 bp, Salmonella paratyphi A
atgaacaatatgaacgtaattattgccgatgaccacccgattgtactgttcggtattcgcaaatcacttgaacaaatcgagtgggtgaatgttgtcggcgaatttgaagattccacagcattgatcaacaacctgccgaaattagatgcgcatgtgttgatcactgacctctccatgccgggagataaatacggcgatgggatcaccttgatcaagtacatcaagcgtcattttccgagcctgtctattatcgttctgaccatgaacaacaatccggcgatcctgagcgccgtgttggatcttgatattgaagggatcgtactcaaacagggtgcgccaaccgatctgcctaaggcgctggccgcgctgcaaaaaggcaaaaaattcaccccagaaagcgtttctcgtctgctggagaaaatcagcgcaggcggttacggcgataagcgcctgtcgccaaaagagagcgaagtattacgcctgttcgccgagggcttcctggtcaccgaaatcgccaagaagctcaaccgcagcattaagaccatcagcagccagaagaaatcggcgatgatgaaactgggcgtagagaatgatatcgcgctgctcaactatctctcttccgtcaccctgagtccgacagacaaagaa

SEQ ID NO: 37074 - DNA, 2677 bp, Salmonella paratyphi A
atgagtcagtctgacacaacggtctctacccgattctcccttctaccgggaagcattacccgtttcttcttattgctgatcattgtgctgctggtaacgatgggcgttatggtacagagcgccgtcaacgcctggttgaaagacaaaagctatcaaattgtcgatatcacccacgctattcataaacgcgtggatacctggcggtatgttacctggcaaatttatgacaacatcgccgcgaccactacgccatcgacaggtgaaggacttcaggaaacgcgtctgaagcaggatgtgtattatcttgaaaagccgcgacgtaaaactgaagcgctgattttcggttcccatgacagcgccacgctggaaatgacgcagcgtatgtcaacctatctggatacgctgtggggcgcggaaaacgtgccgtggtcaatgtattatctcaacggacaggataacagcctgattcttatctctaccctaccgttgaaagatctctcatccggctttaaagagtccactattggcaatatcgtcgattcccgccgggcagagatgttgcagcaggcgaatgcgctggatgagcgcgaaagtttctcctcattgcgaaaactggcctggcaaaacggtcactattttacgctgcgcacgaccttcaatcagccaggacatctggcaaccgtggtggcgtttgatctgcccattaatgatttaatcccgccgggaatgccgctggacagttttcggatagagcctgacgcaacccaggcgacggggcgaagcagtgaaaaggaagcgcctgatagcgtcacgattagctttaacggttcaaaaattgagatctcctcagcgcttaactctaccgggatgcgcctgatctggcaggtacgttcggtacgcttttgcttgatacgttgcaaaatattctgctgcctttactgctgaacatcgggctgctggcgttggcgttatttgtacgccacgttccgtcatcagccgggaaggacgacggaatcgacatctggcaacgcggcgaataacgagttgcgtcttacgcgccattaatgaagagatcgtttctctgtgccgctgggtctgctggtctacgatcaggaaggcaaccgcaccgtgatcagcaataaaatcgccgatcatctgttgccgcatcttaacctgcaaaatattaccagcatggcggaacagcatcagggcgtgattcaggcgacaattaacaacgaactgtatgagatccgtctgtttcgcagccagatcgccccccgtacgcagatctttattattcgcgatcaggaccgggaagtgctggtgaataagaagcttaaacaggctcagcgtttgtatgagaagaatcagcagggccgcgccgcctttatgcaaaatatcagcaacacgcttaaagagcccgtacgccaactggcggttaacgccgcggcagtcaccacgccggaaagcctgaaactggcggatcaggcggatgtattggtacgtatgatcgatgaaatccaactggcgaatatgctggaaaatgacgcatggaaaagcgaagcaacgctgttctcccttcaggatcttattgacgaagtcgtgccggaagtgctgcccgccattaagcgtaaagggctgcaactgctgattaataaccatcttagcggcaacgatgaacgctggggcgatcgcgacgccctgcgccggattttgctgctgttgattcagtatgccgtcacgacgaccgctatgggtaaaattacgcttgaagtcgagcaggatgaatctatgcggagcgtctgactttccgtattctggatacgggcgaaggcgtaacgttaaacgagattgataatctgcatttcccatatatgaatgaaacgcagggcgaccgttacggcaaagcgaatccgctcaccttctggctgtgcaatcaactggcgcgcaaactgggcggtcatctcaacattaaagcgcgagaaacgctgggcacgcgctataccgttcatgtcaaaatgcttcctcacgatcagcatactcaggtcgaagagcgcctgctggacgacgtgagcgtgatggtcgatgtgacgtccaacgaggttcgcgcgattgtgctgcgtcagttagaaaactggggcgccacctgcatcacgccggatgaaaggcagataagtcaagaatatgatctctttttaacggataatccgtctaatcttactgcctcgggcttgcttttaagcgatgatgagtcaggcgtgcggaaaattggcccgggtcagttgcgcgtcaactttaatatgagcaatgctatgcaggaagctgtactacaacttatcgaagagcagtggcgcaggaagagattcccgcctccccgctcggcggagatgaaaatgccgagcttcatgccagcggctattatgcgctatttgtagacacagtaccggatgatgttaagaggttgtatactgaggcggcaaccagcgatttcgctgcgttggcccaaacggcccaccgcctgaaaggggtgtttgccatgcttaatctggtacccggcaagcagttatgtgaaacgctggaacatctgattcgtgagaaagatgctccaggtatagaaaaatatatcagcgacattgacgcctacgtcaaaagcttgctgtagcaaggtagcccaata

SEQ ID NO: 37075 - DNA, 958 bp, Salmonella paratyphi A
atgttgcagttcattctccgacgtttgggactcgtcatccccacgtttatcggtatacccttctcacctttgcctttgtccacatgatccccggcgatccggtgatgatcatggcgggtgagcgaggtatttcccctgagcgtcatgctcaactgctggctgaactcggtcttgataaaccgatgtggcagcagtacctccattatatctggggggtgatgcatggcgatttaggcatctcgctgaaaagccgaatccctgtatgggacgagtttgtgcctcgctttaaagcgacgctggaacttggcgtctgcgccatgatttttgccgtcgccgtggggattccggtgggcgtgctggccgcagtgaagcgcggttctatcttcgatcacactgccgttggcctggcgctgaccggttactctatgcctattttctggtggggcatgatgctgatcatgctggtctccgtccactggaacctgacgccggtttccgggcgcgtgagcgatatggtgttccttgatgataccaatccgttgactggctttatgctgatcgacaccgctatctggggcgaagagggtaactttattgatgcgctggcgcatatgatcctgcctgcgatggtgctcggcacaatcccgctggccgtcattgtgcgtatgacccgttcgtcgatgctggaagtgctgggggaggattatatccgtaccgcacgcgccaaagggttgaccaggatgcgcgtcattatcgtccatgctctgcgtaacgccatgctgccagtcgtcaccgtgatccgcctgcaggtgggtacgcttgtggcgggcgcgattctgacagaaactatctctcgtggccccgtctggggcgcttgctgatcgatgcgctgcaaagccgcgattatccggtagtgcaaggctgcgtgttaactgtagcgacgatgaatatcccgtca

SEQ ID NO: 37076 - DNA, 1555 bp, Salmonella paratyphi A
gccatgaccgttgcagcaagcgtgcaggccaaaaccctggtttattgttcagaaggctcgccggaaggctttaacccacagctctttacgtctggcaccacctatgatgccagctccgtacctatctataaccgtctggttgaattcaaaaccggcaccacggaagtgatcccgggtcttgctgagaagtgggatatcagcgaagacggtaaaacctatacgttccacctacgtaaaggggtgaaatggcaatccagcaaggatttcaaacccacgcgcgagctgaacgccgatgatgtcgtgttctcttttgaccggcagaaaaacgagcagaacccgtaccataaagtgtctggcgacagctatgaatactttgaaggcatggggctgccggatctgattagcgaagtgaagaaggtagacgatcacacggtgcagtttgtgctgacgcgtccggaagcgccgttccttgccgatttagccatggacttcgcctctattctttccaaagaatatgctgacaacatgctgaaagccggtacgccggaaaaagtggatctgaatccggtcggcactggcccattccaactggtgcaatatcagaaagattcccgcattctctacaaagcctttgacggctactggggcacgaagccgaaaattgaccgcctggttttctccattacgcctgacgcctctgtgcgttacgccaaactgcagaagaacgaatgtcaggtgatgccgtatccgaacccggcggatattgcgcgcatgaaagaagataaaaacatcaacctgatggagcaggccggtctgaacgtgggttatctctcctataacgtgcagaaaaaaccgctggatgacgtcaaagttcgccaggcgttgacctatgccgtgaataaagaggccatcatcaaagccgtttatcagggcgcaggcgttgcggcgaaaaacctgatcccgccgacgatgtggggctacaacgacgatattaaagactacggctacgatccggaaaaagcgaaggcgctgctgaaagaagccggtctggaaaaaggcttcaccatcgatctatggcgatgccggtacagcgtccctataacccgaatgcgcgtcgtatggcggaaatgatccaggcggactgggcgaagattggcgttcaggccaaaattgtcacctatgaatggggcgaatacctcaagcgcgctaaagatggcgagcaccagacggtgatgatgggctggaccggcgataatggcgatccggataacttcttcgccacgctgttcagctgcgatgccgcccagcaaggctccaactattcaaaatggtgctacaagccgtttgaagacctgattcagcctgcgcgtgcgaccgatgaccacaacaagcgtattgagctctataaacaggcccaggttgtgatgcatgaccagcgccagcgctgatcatcgctcactccacggtttatgagccagtgcgtaaagaagttaaaggctatgtggttgatccattaggcaaacatcacttcgaaaacgtctctgtcgaataatta

SEQ ID NO: 37077 - DNA, 1758 bp, Salmonella paratyphi A
ccagggtttgtttgcatgagatacattaaatcgatgacgcagcagaaacttagtttcttgcttggcgctctatatcggtctgtttatgaattgcgccgtgttttaccgccgtttcggcagttatgcacaagaatttaccatttggaaaggcctctccgcagttgtcgaactgggcgccacggtgctggtcactttcttcttacttcgtcttctttcactgtttggccgacgcgtctggcgtgtgttggcacgctggtggtgctgttttccgctggcgccagttattacatgaccttcctgaacgtggtgattggctacggcattattgcgtctgttatgaccaccgatatcgatctctcgaaagaggtggtggggctgcactttgtattgtggttgattgccgtgagcgtgttccgctcatctttatctggagtaaccactgtcgctacacgttgttgcgccagctacgtacgccggggtagcgttttcgcagcgccgctgtagtgatactcgcaggtgtaatggtgtgggcgcctatccgcctgctggatgtacagcagaaaaagtttgaacgggcgacaggcatcgacttacccagctatggcggcgtggtggcgaactcctacctgccctcaaactggttatctgcgttagggctgtatgcctgggcgcaggtagatgagtcgtcagacaataattcgttaataaacccggccaggaaatttacctatgttgcgccgaaagatggggatgacacctacgtcgttttcattatcggtgagcacgaccgttgggatcacatggggattttcggctacgagcgtaataccacgccgaagtggcgcaggaaaaaaatctggcggcattccgcggctattcctgcgataccgcgacgaagctttctttacgctgtatgtttgtacgggaaggtggggcggataataacccgcagcgtaccttaaaagagcagaatgtttttgccgtactcaaacagctcggattcagttccgatctgtacgccatgcagagcgagatgtggttctatagcaataccatggcggataatatctcttaccgcgagcagattggcgccgagccgcgtaaccgcggtaaaacggtggatgacatgctgttgattgatgagatgcagaactcgcttgcccagaatccggagggtaagcatctgattatcctgcataccaagggatcgcattttaactatacgcagcgttatccgcgcactacgctcaatggaagcccgaatgtattggggtcgatagcggctgcacgaaagcgcagatgatcaactcttacgataactccgtgacctatgttgatcactttattaccagtgtgttcgatcagctacgtgataaaaaagcgattgtgttctacgcggctgaccacggcgagtcgattaacgaacgcgaacatttgcacggtacgccgcgcaatatggcgccgccggagcaattccgtgttccgatgctggtatggatgtcggataaatatcttgccagtccgcaacatgcgcagatgttcgctcacctgaaacagcaggcggagatcaaagtgccgcgtcgtcatgtggaactgtacgatacgataatgggctgcctgggatatacatcgccgaatggcggcattaaccagaacaacaactggtgccatattcccgatgcgcagaaagtcgccgcgaagtaggttgctgccgactttctcgccgattgaattgtattttgcgactaaggagattgc

SEQ ID NO: 37078 - DNA, 738 bp, Salmonella paratyphi A
atgaccaataatgccgctgcgcccctttactcgctgcgcgggttacctctgattggctggcgcgacatgtcacacgcgctgaattatctgtttgccgatggtcaactgaagcaaggcacgttggtggcgatcaacgccgaaaagctgctgacggcggaagataatccggaagtccgcgcgttgataggggcggcggaatttaaatatgccgatggcatcagcgtggtgcgttcaatacgtaaaaaatttccgcaggcgcaggtttctcgtgtggctggcgccgacctttgggaagcgttaatggcgcgcgcggggaaagaaggcacaccggtatttcttgtcggcggcaagcctgaggtgctggcgcagacggaagcaaaactgcggacgcagtggaacgtcaatattgtgggtagccaggatggttactttacgccggagcagcgtcaggcgctatttgcgcgtatccatgccagcggcgcgaaaattgtcaccgtcgcgatgggatcgccaaaacaggaattactcatgcgcgattgtcgggaagtgcatccccatgcgttatatatgggggtgggcgggacctatgatgtgtttaccggtcacgtcaaacgcgccccaaaaatatggcagaacctggggctggagtggttgtatcgtctgctttcgcaaccgaagcgtattacccgccagatgcgtctgctgcgctaccttcgctggcactatactggcgatctc

SEQ ID NO: 37079 - DNA, 666 bp, Salmonella paratyphi A
atggcttatcgcgatcaacctttaggcgaactggcgctctctattccccgcgcatcggcgctgtttcgccagtacgatatggattactgctgcggcggaaaacagacgctggcgcgcgccgccgctcgtcacgacgtcgatattgacattattgaagcgcaactcgccagttggctgaacagccatcgaaaaagactggcgcgccgttccgctggcgacattattgaccatatcgttgtgcgctatcatgaccgacaccgcgaacaactgccggagcttatcctgcaggcaaccaaagtggaacgcgttcacgggactaagccaaacgtcccacgcggcctgacaaaatatctcaccgcgctgcatgaagagctttccagccatatgatgaaagaagaacagatcctgttccccatgatcaaacagggtatgggtcgccaggcaacgggcccgataagcgtaatggaaagcgagcatgacgaggcgggagagctggtagacgtcatcaaacacgtcacccaaaatgtaacgccgccgccagaagcctgcaccacttggaaagcgatgtataacggcattaatgagatgattgatgatctgatggagcacatcagcctggagaataacgtgctgttcccacgcgcgctggccggggaataatccacc

SEQ ID NO: 37080 - DNA, 2857 bp, Salmonella paratyphi A
  misc_feature (144)..(145): n=g, a, t or c
  misc_feature (241)..(241): n=g, a, t or c
gataagatcgaagttcggggcgccgcacccataatctcaaaaatattaacctcgtcatcccccgcgacaaactgattgtcgtgaccgggctttcgggttcaggcaaatcctcactggctttcgacactctgtatgccgaagagnncgtcgttacgttgaatcgctctccgcttacgccggcagtttttgtcgctcatggaaaaaccggatgtcgaccatattgaggggctatcgcccgatnctcaattgaacagaaatcgacatcgcacaacccgcgctctacggtgggtaccattaccgagatccacgactacctgcgcctgctgttttgcccgcgtgcgggagccgcgttgtccgaaccatgacgtgccgctgggcaagaaccgttagccagatggtcgataacgtgctgtcgcagccggaacagaacgcctggatgctgctggcgccgattattaaagagcgtaaaggcgaacacaccaaaacgctggaaaatctggcaagccagggttacattcgcgcccgtattgacggcgaagtctgcgatctctccgatccgccgaagctggagctacaaaagaaacataccattgaggtggtgatcgatcgcttcaaagttcgcaacgatctttcccaacgcctggcggagtcgttcgaaacggcgctggaattatccggcggcacgcggttgttgccgatatggacgatgagaaagcggaggtgcttctgttctccgccaattttgcctgtccgatttgcggctacagtatgcgcgagcttgaaccgcgtctgttctcgttcaacaacccggcagcgcctgcccgacctgtgacggctcggcgttcatcaatatttcgatccggaccgcgtgatccagaatcccgacctgtcgctggcaggcggcgcgattcgtggttgggatcgtcgcaatttttactactttcaaatgctcaagtcgctggcggaacactataagttcgacgtggatgcgccgtgggcaagcctcagcgccaacgtacacaaagtcgtgctgtacggttccggcaaagagaacatcgaatttaaatatatgaacgattcggcgatacctccgtcgccgccatccgttcgaaggcgtgctgcataatatggagcgccgttataaagagacggaatccagcggtgcgcgaagagctggcgaagttcatcagtaatcgcccctgcgccagctgtgaaggaatgcgactgaatgcgaagcgcgccatgtatttgtggaaaatacgcgctgcctgctatttccgatatgagcattggccatgcgatggattttttcactaatctcaagctttccgggcaacgagcgaaaatcgccgaaaaagtgctaaaagagagatgcgatcgcctcaagtttctggtgaacgtcggcctgaactatctcacgctctcccgctcggcagaaacgctttccggcgcgaagcccagcgtattcgtctggcgagccagataggcgccgggttagtcggcgtgatgtatgtgctggatgaaccttccatcggtctgcaccagcgtgataacgaacggctgctgggtacgctgattcatctgcgcaatcttggcaataccgtgattgtggtggaacacgatgaagacgccatccgcgccgccgaccatgtgattgatattggccccggcgcgggcgttcacggcggcgaggtggtggcggaaggcccgctggaagccattatggcggtaccggaatcgctgaccggccagtacatgagcggtaaacgcaaaattgaagtgccgaaacaacgcgtgccggcaaatccagaaaaagtgctcaaactcaccggcgcgcgcggcaacaacctgaaagatgtgacccttacgctaccggtagggctgtttacctgtatcaccggcgtctcgggttccggtaaatcgacgctgattaacgatacgctgttccccatcgcccagcgtcagttaaacggggcgactatcgccgaaccggcatcgtatcgggatattcaggggctggaacatttcgataaagtgatcgatatcgaccagagcccgatccgatctcccgcgttccaaccggcgacctatacggtgtctttaccccggttcgtgagctttttgctggcgtgcggatgtctcgctcgccggctacacgcaggggcattcagcttcaacgtgcgcggcggttccgcaagcgtgccagtgcgatggcgtcattaaagtcgaaatgcactttctgccggatatttacgtgccgtgcgaccagtgcaaaggcaagcgctataaccgggaaacgctggagattaagtacaaaggcaagaccatccacgaagtctggatatgaccattgaagaagcgcgtgagttctttgatgcggttccggcgctggcgtaagtgcagacgctgatggacgtggggctgacctatatccgtcttggtcagtcggcgacgacgctttccggcggcgaggcccagcgcgtgaagctggcgcgcgaactgtcgaaacgtggcaccgggcagacgctgtatattctcgacgagccgaccaccggcctgcactttgccgatattcagcagttgcttgacgtgctgcatcagttgcgcgatcagggcaacaccatcgtggtgatcgaacacaacctggacgtcattaaaacggcggactggattgtcgacctcggcccggaagcggcacggcggcggcgaaattctcgtcgccggtacgccggaaaccgtggcggagtgcgaggcgtcgcataccgcccgcttccttaaacctatgctcaaataaccttcacgccgctttccgattcgccgggaagcggcatcatttttcctcatcccacctcattgt

SEQ ID NO: 37081 - DNA, 1415 bp, Salmonella paratyphi A
atggcaggaaataaacccttcaacaaaccacagactgatgcccgcgaccgcgatccgcaggttgccgggataaaagtgccgccgcactcgattgaagcggaacagtcggtgttgggcggtttaatgctggataacgagcgctgggacgatgtggccgagcgcgtggtggcggaagatttctatacccgtccgcatcgccatatctttacggagatggggcgcttgcaggaaagcggcagtcctatcgacctgatcacgctcgcggaatcgctggagcggcagggccaactggacagcgtcggcggtttcgcctatctggcggaactgtctaaaaacacgccaagcgcggcgaacatcagtgcttatgcggacattgtgcgcgaacgcgccgtggtccgcgatatgatcgcggtggcgcatgaaattgcggacgccggttacgatccacaggggcgcaatagcgacgaactgctggatctggcggagtcgcgcgtcttccagatcgcggaaaaccgggccaacaaagacgaaggtccgaaaagcatcgaccagattctcgacgctaccgtggcgcgtattgagcagttgttccagcaaccgcacgatggcgttacaggcgtggataccggctatcaggatctcaataaaaagacggcagggttacagcgttcggatttgattatcgtcgcggcgcgcccctccatgggtaaaaccacttttgcgatgaacctctgcgaaaacgcggcgatgttgcaggataaaccggtactgatctttagtctggagatgcccggcgaacagatcatgatgcgtatgctggcctcgctgtcccgcgtcgatcagacacgtattcgtaccggtcaacttgatgatgaagactgggcgcgaatctccggcacgatgggcattctgctggagaaacgcaatatgtatattgacgactcctcaggtctacgccgacagaagtccgttcgcgcgcgcggcgtattttccgcgaacatggcgggttaagtctgattatgatcgactacctgcaattgatgcgcgtgccgtcgctttctgataaccgtactctggaaatcgccgaaatttctcgctcgttgaaagcgctggcgaaggaactccaggtgccggtcgtggcgctatcgcagcttaaccgctccctggaacaacgcgcggataaacgtccggtgaactccgacctgcgtgaatccggctctattgaacaggatgccgacttaattatgtttatctaccgtgatgaggtttatcacgagaacagcgacttaaaaggcattgctgaaattattattggtaagcaacgtaacggtcctatcggtacggttcgtctgacgttcaatggtcagtggtcgcgcttcgataactatgcgggaccgcaatacgatgatgagtaa

SEQ ID NO: 37082 - DNA, 2161 bp, Salmonella paratyphi A
atgagttttgtatccacgggtaataaaactgtcgggagcgatcggccagctatcactacgccgccaattgtcggagaaaataagggtgttagttcagatgccgtcgtagccagtgttactgacgcagccgaacaaatggcagaacaggcagtggaatcgttgtttggcgacttaccggaaccatcaggactggtaaaagcagcagtggcagcagcgcaggctaccgctgtggcgcagggatatcggatatagctggtgccgcacaggacgtaatgtcatcccttatctccggaccggagtgcataacgttacggtaagcggcagtgccgtgccgccgcagatgttgttgtttgccagccttaatggctcggaagcactgggaaccttgtttacttatgtggtacagctaaaaacgcccgacaccctgaatctgggctatgtctccccggcggccaacctgccgctcaaaccgatggtgggcaaagatctgtgcgtcaacatcgaactggatggtggcggtaaacgacatatcagcgggctggtcacggcggcgcgggtggtgggccatgaagggcgttcggttacctatgagctgcgtatggagccgtggctgaaactgctgacccataccagcgactacaaagcattccagaataaaaccgtggtggatattctggatgaggttctggcggaatatccctacccggtggaaaagcggctggtggaaagctacccggtacgcacctggcaggtgcagtacggtgaaactgattttgattttcttcagcgactgatgcaggagtggggcatctactggtggtttgagcacagcgaggacagccacacgctggtgctggcggatgccatcagcgcccacaaagcatgtccggactcgccgctggtcgagtggcaccaggaagggctgaagctggacaaggagtttatccacactatcacggcaaacgagagtctgcggactggccagtgggtgctggatgatttcgattttacgaagccacgttcattgctggcaaacaccgtggcaaacccgcgtgaaaccggtcatgccacctacgagcattatgagtggccgggagactacttcgacaagagtgaaggcgagatgctgacgcgcattcgtatggaagcgcagcgcagccccggcagtcgggtgctggggggagggaatatccgcacactcatgaccggttataccttcacgctggaaaactatcccactgccgaagtcaatcaggaatacctgctgatgcagaccttgctgtttgtgcaggacaacgcgcagcacagcgggcagaaccagcactttaccttttccacccgttttgaactgcaccccacccgcgaggtgtaccgcccgcagcgaaccatcagcaaaccccacaccaaagggccgcagagcgccatcgtcaccggcccggcgggccaggaaatctggacggatcagtacgggcgggtaaaggtacagtttggctgggatcgctacggcaaaatggatgaaaacagctcctgctggatacgcgtcagctacccgtgggcgggcaaaggcttcgggatgatccagatcccgcgtatcggccaggaagtgctggtggatttcaaaaacggcgatccggatctgccgatcatcgtggggcgtacctacaaccaggacaccatgccgccgtggggactgccgggcgcggcaacacagagcgggatatacagccacactatcggcggcggaccgaccaatgccaaggccctgcgttttgaagataaacccggtagtgaagaggtctggctacatgctgaaaaagatcagcgtattgaagttaataataatgaaagtcactgggtggggaataatcgggttaaggtcattgatcagtcagaaatagccactattggtgctgtccgcgaccataaagttcagtatgacgatacctctctggccggaggaaataaaaccattcagacggtaaaagagttatatctggcagcgggtgattctattactctgagttgtggtgacaccgttctgtacatgagcagtaagggggaattttacgtaacctgtaaaacgttcaatattactgcaacagatgccgatggtcagattaatactataaaagggcagctggatttaaatatggataaaaga

SEQ ID NO: 37083 - DNA, 1323 bp, Salmonella paratyphi A
aagcatcctaacttagtcattattctggcggatgatttagggtatggcgatctcgcacactacgggcaccgcatcgttaaaacacctaacatagacaaattggcgcaggagggggtgaagtttaccgactattatgcgccacgcctctgtgttctccttcccgcgcgggcctgttaaccggtcgtatgccgttccgtaccggaatccgttcctggataccggaagcaaagatgttgcgctggggcgtaatgaactgactatcgccaatctgctaaaacagcagggctacgatacggcgatgatggggaaattacacctgaatgcgggcggcgatcgcaccgatcagccgcaggcgaaagacatgggctttgactatacgttggttaatccggcgggatttgtcaccgatgctacgctggataacgccaaggagcgcccgcgctatggcgtggtgcatcctacggggtggattcgtaatggccaacatattggccgcgcagataagatgagcggcgagtttgtgagctctgaagtggtgaactggctggataataagaaagacgataatccgttcttcttatatgtcgcctttaccgaagtccatagcccgctggcgtcgccgaaaaaataccttgatatgtattcgcagtacatgaccgactaccagaagcagcatccggatctgttctacggcgactgggcagacaaaccgtggcgcggcaccggcgaatattacgccaatatcagctacatggatgagcaggtcggtaaagtgctggataaaattaaggcgatgggcgaggaagataacaccatcgtcatctttaccagcgacaacggccctgtcacgcgaagcgcgtaaggtatacgagctgaacctggccggggaaaccgacggtctgcgcgggcgtaaagacaacctgtgggaaggcggcattcgcgtaccggcaatcatcaaatacggcaagcacattccacaggggatggtaacggacacgccggtatatggtcttgactggttgccgacgctggccaacatgatggactttaaactcccgaccgatcgtacctacgacggtcagtctttagttccgctcctgaaggacaagacgttaaaacgccagaaaccgctgatcttcggtatcgatatgccgttccaggacgatccgcgacggcgactggaagatgatcatcgatcgccagaataaacctaaatatctctataacctgaaaaccgatcgtttcgagacgctcaatcaaattggtaaacagccgcagattgagaaacagctttacggtaagttcctgaagtataaaaggata

SEQ ID NO: 37084 - DNA, 680 bp, Salmonella paratyphi A
atgatacagtacctgaacgtctttttttacgacatctacccctatatttgcgccacggtattcttcctcggcagttgctgcgctatgactacggacaatatacctggcgcgcgtcgtccagccagatgctggacaagcgtgggatggtgatatggtcgaatctgttccatattggcattctggggatcttctttggccatctgtttgggatgctagcgccacactggatgtatgcctggttcctgccgattgcggtaaagcagcagatggcgatgatcctcggcggcgtgtgcggcgtattaacgttgatcggcggcgcgggattactgtggcgtcgtctgaccaatcagcgtgtgcgggcgacatccactacaccagatattatcatcatgagcattttgctgattcagtgcctgcttggcctgagcaccattccgttttcggcgcaatatccggatggcagcgaaatgatgaagttggtgggctgggcgcaaagtattgtcaccttccgcggcgggtcttcggaaatgctgagcggtgtggcgtttgttttccgcgttcatctggtgctgggaatgaccattttcctgctcttcccgttcacccgtctggttcatgtctggagcgcgccgtttgagtatttcacccgtcgctaccagattgttcgtacccgccgctaa

SEQ ID NO: 37085 - DNA, 1533 bp, Salmonella paratyphi A
  misc_feature (1100)..(1100): n=g, a, t or c
atgaaaatacgctcacaggttgggatggtactgaatctcgataaatgtattggctgtcacacctgctccgtcacctgtaaaaacgtctggaccggacgtgaagggatggaatacgcatggttcaataacgtcgaaactaaaccgggcatcggctatcccaaaaactgggaagaccagcaggagtggcaaggcggttgggttcgtgatgttaatggcaagataaggcccgtctgggcggcaaaatgggggtaattagcaaaattttcgccaacccggtgattccgcaaatcgatgattactatgaaccctttaccttcgattatcagcatttacatactgcgccggagagtaagcatcagcccactgcccgccctcgctcactgattgacggaaaacggatggacaaggtgatctgggggccaaactgggaagagctgctcggcggcgagtttgaaaaacgcgcccgcgaccgcaacttcgacaacatacaaaaaagagatgtacggtcagttcgaaaacaccttcatgatgtacctgccgcgcctgtgcgaacactgcctgaaccccagttgtgtcgccacctgcccaagtggcgctatttataagcgtgaagaagacggcatcgtgctaatcgaccaggataaatgccggggctggcgtttgtgtatcagcggctgcccgtacaaaaaaatctactttaactggaagagcggtaagtctgagaagtgcatattttgctatccgcgtattgaatccggccagccgaccgtttgttcggaaacctgcgtcgggcgcattcgttatcttggcgttctgctctacgacgctgacaggattgaagaagcggccagtaccgaacacgagacggatttgtatgaacgtcagtgcgatgtgtttctcgatccgcacgatccggcggtcatcgaagaggcgcttaaacagggcatcccgcaaaacgtcatcgacgccgcccaacggtcgccggtgtacaaaatggcgatggactggaagctggcgcttccgctgcacccggaataccgtacccttccgatggtctggtacgtaccgccgctatcgcccatccagtcatacgccgacgncgggcgggttgccgcacaatggcaatattctgccggcggtggaaacgctgcgtattccagttcagtacctggccaatatgctcagcgcgggcgataccggcccggtcattcgggcgctaaagcggatgatggcgatgcgccactacatgcgctcgcagacggttgaaggcgtgacggatacccgcgcgattgacgaatgggtctgagcgtacaacaggttgaagagatgtatcgctacctggcgattgccaattatgaagatcgttttgtcattccaccagccgacgggaaatatggcgcgaagctcttccggagagcaaacggctgcggctttaattttggcgacggttgccacgggtcggataccaaattcaacctgttcaacagtagccgtattgagccatcaataatcacggagtgcgtgattaagcgg

SEQ ID NO: 37086 - DNA, 1956 bp, Salmonella paratyphi A
tcgccaatgacctggggcgagcagactgacgtgccggagtccgccgactggtataactcagcctacattattgcctggggctctaacgtgccgcagacgcgtaccccggacgcccacttctttaccgaagtgcgctacaaaggcaccaagacaatcgccatcaccccggactattccgaagtcgctaaactgtgcgatcagtggctggcgccaaagcaaggtaccgacagcgcgctggcgatggccatgggtcacgtcattttgaaagagtttcatctcgataatcccagcgactattttcttaactattgccgccgttataccgacatgccgatgctggtcctgttggatgagcgcgcagacggcagttatgtaccggggcgtatgatgcgcgcgtcggatctgatggatgggctgggagaagccaacaatccggaatggaaaaccgtcgcgctcaacagtacgggcgaactggtcgcgcccaacggttctatcggttttcgctggggtgaaaagggaaaatggaacctggaaccggtggcggcgggcgtcgaaactgaactgtcgctctctttactcggccagcatgatgatgtggcgggtgtcgccttcccctattttggcggtaacgaaaacccacatttcgctagcgtgcggcaggaaccggtgctggttcgtcagttaccggtgaaacgcctgactctggcggacggtagcgagcggatggtcgtcagcgtttacgatctggtgctggcgaattatgggctggatcgtggtctggatgacggccatagcgccaataattataacgacgtaaaagcctacacgccggcctggggcgaacagattaccggcgtgccgcgtcgacatatcgaaactattgcgcgtgaatttgccgagaccgcccataaaactcacggtcgttcgatgatcatcctcggcgcgggagtgaatcactggtatcacatggatatgaattaccgtgggatgattaacatgctggtgttctgcggctgtgttggacaaaccggcggcggctgggcgcactatgtcggccaggagaagctgcgccgcaaaccggctggctgccgctggccttcgcgctggactggaatcgcccgccgcgtcagatgaacagtacctcgtttttctacaaccatgccagccagtggcgctatgaaaaactgactgcgcaagagttcgtgtcgccgctggcgatccggctaaattttccggacacctgatcgatttcaacgtgcacgcggaacgtatgggctggctaccctcggcgccgcagcttaatcttaacccgctcagcgtgaaagcgagcgccgataaagccgggctgtctgcggcggattataccgtgcaggcgttgaaatcaggcgctatccgttttgcctgcgaacagcctgacagtggtcataatcacccgcgaaatttatttgtctggcgctctaacctgctcggctctccgggaaaggtcatgagtacatgctcaaatatctgctgggcaccgacagcggtatccagggcgaagcgctgggttccagcgaaggaattaagcctgaagaggtggaatggcagtccgccgcgattgagggcaagctcgatctgttggtcacgcttgatttccgtatgtccagtacctgtctgttttccgatatcgttttgccgaccgccacctggtatgaaaaagacgatatgaatacctcggatatgcatccgtttatccaccccctttccgccgcggtcgatcctgcctgggaatccaaaagcgactgggagatctacaaaggtatcgccagcgtcttttctgaagtgtgtgtcggacatctcggacaggaaaccgatgtggtgttacacccgctccagcatgattccccggcggaactggcgcagccatttgatattctcgactggcgtaaaggcgagtgcgaacttattccgggcaaa

SEQ ID NO: 37087 - DNA, 3208 bp, Salmonella paratyphi A
acgaatggcgacctgccgtcaaaagcggatgtgcaaaaccagctggatacgctgaataagcaaaaagatctctccgcccaggataagctcgtccagcaggaccttattgatacgttagctacgctggagaaaatcgagcgggtaaaagaggaaaccgtacagctacggcagaaggtggcgcaggcgcctgaaaaaatgcgtcaggcgacggctgcgttgaatgcgctgagcgatgtcgataatgatgatgaaatgcgaaaaacgctgagtgcgctttcgctacgtcagcttgagctgcgtgtggcacaggtactggatgatttgcaaaattcgcaaaacgatcttgccgcttataacagccagcttgtttcgctacagacccagcctgagcgcgtgcagaacgccatgtatagcgcctcacagcaaatacagcaaatccgtaatcgtctggacgtccataacgtcgcgcgaagcgcttccgccatgcgaacaggtgttattacacgcacaacaggcgctgcttaatgtggagatgcgataggaacgtaagagtcttgaagggacgaccgcttttcaggacaccctgcaaagacagcgggattacgtgacggccagcagtaatcgccttgaacagcagcttcagcttttacaggaggcggtcggccagtaagacgacttacgctaacggacaaaacggcccaggagctcatttcgccggacgaaacggcgcgtatccaggcaaacccgctggtaaaacaggaactggatattaaccatcaactcagccagcgtctgattgtcgcgaccgaaaacggcaatatgttgatgcagcaaaacattaaagtaaaaaactggctcgatcgcgcgctgcagtcggaaagaaatatcaaagaacagattgccgtcttaaaaggcagcctgttgctgtcgcgtattctttatcaacagcagcaaaccctgccctccgccgacgaactcgaagatatgaccaaccgcattgcggatttgcgtctggagcagtttgaaatcaaccagcagcgtgatgccttattccaaagcgatgcctttgtcgacaagctggaggaggggcataccagcgaggtgaatgatgaagttcatgatgcgttgcttcaggtggtggagatgcgccgtgagctattggatcagctaaataaacagttgggtaaccagctgatgatggcgattaacctgcaagttaaccagcagcagctgatgagcgtctcgaaaaatctgaaagccattctgacgcagcagattttttgggtgaacagtaaccgccctatggactgggactggcttaaagcgttcccccaaacgttaaaagagcaattcagcgccatgaaaatcacggtgaactggcaaaaagcctggcccgcggtatttattgcttttttggccgggttgccgctcttgctcatcgccggtttaatccgctggcgtctgaaatggttaaaagcgtatcaacagaagctggccgccgccgtgggatcgctgcgtaacgatagtcagctcaatacgccaaaagctattctgatcgatcttatccgcgcgctgccggtgtgcctgattatcctcgcgattggattgatcttgctgaccatgcagctaaatatcagcgatctgctctgggcctttagtaaaaagctcgcgatgttctggctggtctttgggctgtgctggaaggtgctggaaaaagagggcgtggcgatacgccattttggtatgccggcgcagttgaccagccactggcgtcgccagattgtacgcattagcctcgcattgctgccgctgcacttttggtctgtggtggcggagttgtcgccgctgaatctgatggatgacgtgctggggcaggcggttattttcctcaatctgctggtcataacattgctggtgtggccactgtgccgggaaagctggcgcgataaagaatctcacggcattcgactggtgaccgtgacgattctttccattattccggtggcgttaatggtattaacggcgaccggctatttctataccaccctgcgcctggcggggcgtggattgaaaccgtctatctggtcattatctggaacctgctttatcaaacggtgctgcgcgggttaagtgtagcggcgcgccggattgcctggcgacgcgcgctggctcgtcgtcagaacctggtaaaagagggggcggaaggcgcggagccacaggaagaacccaccatcgcgttggagcagattaaccagcaaacattacgtatcacgatgctgctaatgcttgccctgttcggcgttatgttctgggcgatttggtccgatttgatcaccgtattcagctatcttgatagcatcacgctgtggcactacaacggctccgaagctggcgctgcggtggtgaaaagcgtgacgatgggcagcttgctatttgccattattgccgcgatggtggcctgggcgctcatccgcaacttacccggcctgctggaagtgctggtgctttcacgcctgaatatgcgccagggggcttcgtatgcgatcaccacgatccttaactacgtcattatcgctgttggcgcgatgacagtattcggatcgctcggcgtctcgtgggataaactccagtggctggcggcggcgttgtcggtgggtctcggttttgggctacaggagatcttcggtaactttgtctcgggtttaatcatcctcttcgaacgtccggtacgcattggcgatacggtaacgatcggcacctactccggcacggtcagtaagattcgtattcgcgccaccactattaccgattttgatcgtaaagaagtgatcattccgaacaaagcgttcgtgacggagcggctgattaactggtccctctccgataccacgacacgtctggtgatccggcttggcgtggcctatggctcggatctggagaaagtgaaaagagtcctgctacaggcggcgatggagcatccgaagtgatgcacgatccggaacctgccgtattcttcaccacctttggcgccagcactctggatcatgaactgcgtctgtacgtgcgtgaattgcgcgatcgtagccatacggtggatgaactgaaccgcgcgatcgatcgactgtgccgtgaaaatgatatcaatatcgcctttaaccagcttgaggtgcatctgcataacgcgaagggcgacgaagtcactgaagtg

SEQ ID NO: 37088 - DNA, 165 bp, Salmonella paratyphi A
atgtcgcttgaaaatgcccctgatgaagtcaaactggccgtggatttaattgtgctgcttgaagagaatcgcttaccggcacgaacggtgctacgcgcgctggaaatagttatgcgagattatgaaaacaagttaaaaagtacggaagacgactcgcaaacagag

SEQ ID NO: 37089 - DNA, 513 bp, Salmonella paratyphi A
atgctgttacagacgctggaagagaggctggcgacgctacgccaacgctgcgcgccgctggcgcaacatgcgacgttaagcgcgcgctttgaccgacatcttttccgtacccgcagtactctgttgcagggatatctggaagaggctgacgccaatctcgccgcgttgcgtcaggcggtaaaacatgagcaactgccgcaagtcgcctggctggcggaacatctggcttcgcaactggaggcgatatcgcgtgaaaccgccacctggtcgctgcgccagtgggacgccgccgcgccagggcttggccgttggcagcgcagacgaatacagcatcaggagtttgaacgtcgactactggcgatgacacaggagcgcaaaattcgtctggcgcaggcgaccggccttgtcgaacaacaaacgctgcaaaaggaagtcgagatctatgaaggacggctggcgcgctgccgacatgcgctggagaaaatagaaaacgtactggcgcgtttaacccgt

SEQ ID NO: 37090 - DNA, 201 bp, Salmonella paratyphi A
atgatgaattgtccaaagtgtggacactcagcgcacactaggagcagctttcaggttacggacagcacaaaagagcgttactgccagtgccagaacattaactgtggtagcacctttgtcacccatgaaacggtagtgcgctttatagttacgccagcattggtaaataacgctcctccacatccaacagtgagtgggcaa

SEQ ID NO: 37091 - DNA, 464 bp, Salmonella paratyphi A
tttcgaccagaaatcccccgaataccgcaacatcatcgtctttgcgccactacggcttcgtctgcacatcatcgaaccgatggggtttacctgggatgataagcgttacgccgcgcagggctggactatcacgaattcgccgcggttcagcgccatcacgattatgccgcctttgtcgccgccgaaaacccgcagcgcctgtttgcgttgacgacaaagggtacggccgcccatagcgccgtaagctatcaggatggcgattatttgatgtttggcccggaaacgcgcgcctgcccgccagcattctcgatgcgttgcctaaagagcagaagattcgcattccgatgatgccggatagccgtagcatgaacctgtcgaatgcggtgtcggtggtggtgtatgaagcgtggcgccagttaggatatcccggcgcggtattgcggtcgtaatatattcaatgccgg

SEQ ID NO: 37092 - DNA, 433 bp, Salmonella paratyphi A
  misc_feature (262)..(262): n=g, a, t or c
atgcaagaaattatgcaatttgttggccgtcatcccatactgagtatcgcctggattgcgttactggtggcggttttatttaccacgttcaagggtctgacttcaaaagttaaggtgattacacgcggcgaacgacgcgccttatcaacaaagaggacgccgttgttgtggatttacgtcaacgtgacgatttccgtaaaggccatatcgctggcgcgaccaatttgctgccgagcgaaatcaaagccaacaatgttgcganactggaaaagcacaaagacaagccgattatcgtggtcgacggttctggtatgcagtgccaggaatccgctaacgcgctgacaaaagccggctttgaaaaggtctttgtgttgaaagaaggcgtcagggctggagcggcgagaatctgcctctggtgcgcggtaagtgatta

SEQ ID NO: 37093 - DNA, 250 bp, Salmonella paratyphi A
atggccaatattgaaatctacaccaaagcaacctgcccgttttgccatcgtgcaaaggcgctgttaaacagcaagggcgtgagtttccaggaaattgcgattgacggcgacgctgaagcgtgaagagatgatcaaacgtagtggccgaacgacggttccgcaaatttttattgatgcacagcacattggcggttgtgacgacttgtatgcgctggatgcgcgtggtggactggatccgctgttgcgttaa

SEQ ID NO: 37094 - DNA, 1023 bp, Salmonella paratyphi A
atgaaccaaagtaatgcgtcaatgacagtcatcggtgccggctcgtacggcaccctctcgccatcactctggcgagaaacggccaccaggttgtcctgtggggccacgacccaaaacatatcgcgaccctggagcacgatcgctgcaacgtcgcgttccttcccgatgtgccttttcccgatacgttacacctggaaagcgacttagcaaccgcgctggcggccagtcgtaacattctggtggtggtgccaagccatgttttcagcgacgtgctgcggcagattaaaccgctgatgcgtccggatgcgcgtctggtatgggcgaccaaaggcctggaagcggaaacggggcgcctgttgcaggatgtcgctcgcgaagcgttaggcgatcaaatcccgctggcggtgatttctggcccgacgttcgctaaagaattggcggcgggtttgcgacggcaatctctctggcctcaaccgatgagacctttgccgacgatctccagcaactgttgcactgcggaaaaagttttcgcgtctatatcaatgcggattttatcggcgtgcagcttggcggcgcggtgaaaaacgtgattgcgattggcgcggggatgtctgacggcatcggcttcggcgcgaacgcccgcacggcgctaatcacgcgtggactgaccgaaatgtcgcggcttggcgcacgcttggcgccgatcccgccacctttatggggatggcgggtttaggcgatctggtgctgacctgtaccgacaaccagtcgcgcaaccgtcgttttggcatgatgcttggccagggcatggacgttaaaggcgcgcaggataagattggccaggtggtcgaaggctatcgcaatacgaaagaagttcgtgaattggcgcaccgttttggtgttgaaatgccaataaccgaggaaatttatcaagttttgtattgcggaaaaaacgcgcgcgaggcagcattaacgttattaggtcgcgcccgcaaggaagagctgagtcgccactagccgtaa

SEQ ID NO: 37095 - DNA, 819 bp, Salmonella paratyphi A
atgccgtgtgaagaactggaaatcgtctggaagaatattaaagctgaagcccgcgctttagctgactgtgagcctatgttggccagtttttatcacgccacgctactcaagcatgaaaatctgggcagtgcgctgagctatatgctggcaaataaactggcatcgcccatcatgcccgctatcgctatccgtgaagtagttgaagaagcctatgccgccgacccggaaatgatcgcgtcggcagcctgcgatattcaggccgtgcgcactcgcgatccggcggtggataaatactccacgccgctgttatatctgaaaggctttcatgcgctacaggcctaccgcattggtcactggttgtggaatgaaggtcgccgcgcgctggccatcttcctgcaaaatcaggtttcggtctcgtttcaggtggatattcacccggcagcgaaaattggccgtgggattatgctcgaccatgccaccggtattgtggtgggggagacggcggttattgaggatgatgtgtcgatcctgcaatccgtcaccctgggcggtaccgggaaaacgagcggcgatcgccatcctaaaatccgcgaaggcgtgatgattggcgcgggcgcgaaaattctcggcaatatcgaggtggggcgcggcgcgaaaattggcgcaggttccgtcgttttacagcctgtcccgccgcacactaccgccgcaggcgttccggcgcgtattgtcggcaagccgggcagcgataagccgtcgatggatatggaccagcatttcaacgggatacaccatacgtttgagtatggcgacggcatc

SEQ ID NO: 37096 - DNA, 714 bp, Salmonella paratyphi A
gtgggacgtaaatgggcaaatattgttgctaaaaaaacggctaaagacggtgcaacgtctaaagtatatgcaaaatttggtgtagaaatctatgctgcggctaaacaaggtgaaccagacccggaatcaaattcagctttaaaattcgttattgaacgtgcgaaacaagcacaggttccaaaacatgttattgataaagccattgataaagccaaaggtggcggagatgaaacgttcgtgcaagggcgttatgaaggctttggacccaatggttcaatggttatcgctgaaacgttgacgtctaatgttaaccgtacgattgctaatattcgcacaatttttaataaaaagggcgggaatatcggagcggcaggtgctgtcagctatatgtttgacaatactggagtgattgtatttaaaggaacagaccctgaccatatttttgaaattttgcttgatgctgaagttgatgttcgtgatgtaaccgaagaagaaggaaacatcgttatttatactgaagcgacagacctgcacaaaggaattgcagcgctaaaagcagctggaattactgaattctcaacaacagaattagaaatgattgctcaatcagaagttgaactttcaccagaagatttagaaatctttgaaggacttgttgatgcccttgaagatgatgatgatgtgcaaaaagtatatcataacgttgcaaacctc

SEQ ID NO: 37097 - DNA, 772 bp, Salmonella paratyphi A
atgaaatcaaacacttctcagcaaagaccttaccaggaagtgggcgcaatgatacgggatctgattgtgcagacgccgtaccgccccggggagcgcttgccgccggaaagagagatcgctgagaggctcaatgtgacgcgtaccgtcgtgcgtgaagcgctgatcatgctggaaattaaaggtctggttgaagtccgccgcggcgccgggatctacgtgctcgacagcgcggataataacgagatggaaggcgctgacgtcaatcactgtaatgacgccgggccgtttgaactgttacaggcgcgtcagttgctggaaagtaatatcgctgaatttgccgctctgcaggccacccgcgaggacatcattaaaatgcgccaggcgttacaactggaagagcgagaactcgcctccagcgcgccgggcggctcagaaagcggcgatatgcagtttcatctggccattgccgaagcgacccataacagtatgttggtcgagctcttccgtcagtcctggcaatggcgtgaaaataatccgatgtggctccagcttcatagccatctgggcgatacgctttaccgtaagagttggctgggcgatcataagcagatcctcgcggcgttaattaagaaagacgcccgcgcagtagctggtgatgtggcagcacctggaaaacgtgaagcagcgtctgctggagttttccaatgttgatgacatctactttgatggctatctgtttgagtcatggccgctggacaacgttgatgcctga

SEQ ID NO: 37098 - DNA, 1696 bp, Salmonella paratyphi A
  misc_feature (1350)..(1350): n=g, a, t or c
ccgttattacgctgcacggtctgacgaaggctttgcgggaatggataaacccgccgcgcgccgctcgactgtaccattcattccggttatgtcaccgggctggtagggccggacagcgcaggaaaaaccacgctgatgcgtatgctggcgggcctgctcaaagccgatggcggcagcgcgtccgtattgggcttcgacccgatacaaaacgacagcgagctgcacgcggttctgggctatatgccgcagaaattcggtctgtatgaagatcttaccgtcatggagaaccttaatctctatgccgatttacgcagcgttaccggcgagatacgggaaaagacctttgcccgtttgttggagtttaccgccctcggccctttcactggccgtctggcaggaaaattgtccggcgggatgaagcaaaaactggggctggcctgtacgctggtcggcgaaccgaaagtgctgctgttggatgaaccgggcgttggcgttgacccgatttcacggcgcgagttgtggcagatggtccacgagctggcgggcgacgggatgctaatcctctggagcacctcctacctcgacgaagccgaacagtgccgcgatgtgctgctgatgaatgaaggcgagctgctctatcagggcgaacctaaagcgctgacgcaaacgatggccggtcgtagctttctgatgagcagtccacaggaaaacaaccgtaagttgctacagagagcgctcagactgccgcaggtgagcgacggcatgattcagggacgttcggtacgcctgatcctgaaaaaagaggcgaccgcagcagatattcgtcaggccgaaggaatgccggaaatcaccctcaatgagaccgcgccgcgcttcgaagatgcgtttatcgatctgcttggcggagcgggaacctcggagtctccgctgggttcaatcctgcatacggttgaaggcactgccggcgaaacggtgattgaagcgcaggaactgacgaaaaaatttggcgatttcgcggccacggaccatgttaatttcgtcgtacagcgcggcgagatttttggcctgctcggcccgaacggcgcgggtaaatcaaccacctttaaaatgatgtgcggcctgctggtgccgacgtccggcaaggcgctggtgctggatatggatctgaaagtcagctccggcaaagccgtcagcatctgggctatatggcgcaaaaattttcgctttacggcaacctgacggttgagcagaacctgcgttttttctccggcgtctacggtttgcggggccgcgcgcaaaatgaaaaaattcagcgcatgagtgaagcgtttggtctgaaaagcatcgctncgcatcccaccgatgcgctgccgctgggctttaaacagcgactggcgctggcctgctcgctgatgcacgaaccggatattttattccttgatgaaccaacgtccggggttgatccctcacccgccgtgaattttggctgcacattaatagcatggtggaaaaaggggtcacggtaatggtgacgacccactttatggatgaggcggaatattgcgatcgcatcggactggtttatcgtgggaagcttatcgccagcggtacgacggacgatctcaaagcgcaggccgccgatgagcaacaggccgatccgacgatggagcaggcctttatcactctcatcaatgac

SEQ ID NO: 37099 - DNA, 264 bp, Salmonella paratyphi A
atggatattcacaataaagcacgtattcactgggcatgtcgtcgcggtatgcgcgaacttgatatttccatcatgccgttttttgaacatgagtacgatagtttaagtgatgaagaaaagcgtatttttgtccgtttgttgcagagtgacgacccggatttatttaactggttaatgaatcacggtaaaccggctgacgctgaactggaacagatggtccgactcattcagacacggaatcgggaacgtggtcctgtggcaatc

SEQ ID NO: 37100 - DNA, 982 bp, Salmonella paratyphi A
atggcttttatctcctttccaccacgtcatccttcatcgtcagcccgcctgccgctgacgctgatcgcgcttgacgactgggcgctgtcgaccattaccggcgtagacagtgaaaagtatattcagggccaggtcaccgctgacgtaagccagatgactgaacagcaacaccttctcgccgcccactgcgatgctaaaggtaagatgtggagcactctgcgcctgttccgtgagcgcgacggtttcgcctggattgaacgccgtagcgtgcgtgaagcgcaattaacggagctgaaaaagtacgccgtattttccaaagtggtcatcgcgccggatgacgaacgcgtattgcttggcgtggcaggttttcaggcccgcgcggcgctggctaatgtctttagcgaactgcccaatagcgaaaatcaggtggtcagagacggcgcctccacgctgctatggtttgaacatctgcggaacgattcctgcttgtcaccgatgtcgcgacggccaacatgttaacggagaagttgcatgcgaagccgaactgaataacagtcaacagtggctggcgttggatattgaagcaggcattccggtgattgacgcggcgaacagcggtcagtttatcccccaggcgactaacctacaggcgttgggaggcatcagcttcaagaaaggctgctacaccggacaggagatggtcgcacgggcaaaattccgcggcgccaataaacgcgcgctttggttgctggcgggcaaagccagccgggtaccggaagcaggagaagatctggagctacagatgggcgagaactggcgtcgtaccggcgctattctggcggcgacgcagttggacgatggtcagttactggttcaggccgtcatgaataacgatttagaagccgaaagcgtcttccgcgttcgcgacgatgccaacaccctgcatatcgtcccgctaccctactcgctggaagagtgatat

SEQ ID NO: 37101 - DNA, 1523 bp, Salmonella paratyphi A
atgtctgaacaaaacgcacagggcgctgacgaggtagtcgatcttaacaatgaaatgaaggcacgtcgcgagaagctggctgcactgcgtgagcagggtatcccgttcccgaacgatttccgtcgtgaccgtacctcagaccaactgcacgcagagtttgacgcgaaagaagctgaagaactggaagcgctgaatattgaagtgtccgtcgcgggccgtatgatgactcgccgtattatgggtaaagcctcttttgttaccctgcaagacgtaggcggccgcattcagctgtatgtggcgcgcgatgatctgccggaaggcgtttacaacgagcagttcaagaagtgggatcttggcgatatcctcggcgcgaaaggtaagctgttcaaaaccaaaaccggcgagctgtctatccactgcaccgaactgcgcctgctgacgaaagcgctgcgtcgttgccggataaattccacggcctgcaggaccaggaagcgcgctatcgccagcgttatctggatctcatctctaacgatgaatcccgtaacaccttcaaaacccgttcgaagatcctggccggtattcgccagtttatggttgctcgcggctttatggaagtcgaaacgccgatgatgcaggtgatcccaggcggcgcgtctgcccgtccgtttatcacccatcacaacgcgctggatctggatatgtacctgcgtatcgcgccggaactgtacctgaagcgtctggtggttggcggcttcgaacgcgtattcgaaattaaccgtaacttccgtaacgaaggcatctccgtgcgccataatcctgagttcaccatgatggaactctatatggcgtatgcggactacaaagacctgatcgagctgacggagtctctgttccgtacgtggcgcaggatgttctgggcaccacccaggttccgtacggtgatgaagtgtttgacttcggtaagccgttcgaaaaactgaccatgcgtgaagcgatcaagaaatatcgtccggaaacggatatggctgatctggacaacttcgactccgcgaaggcgattgctgaaagcatcggcattcacgtcgagaagagctggggtctgggccgtatcgtcaccgagatctttgacgaagtcgctgaagcgcatctaattcagccgaccttcatcaccgaatatccggctgaagtgtctccgtggcgcgtcgtaatgatgtgaacccggaaatcactgaccgcttcgagttctttatcggcggccgtgaaatcggcaatggctttagcgagttgaacgatgcggaagaccaggcgcagcgtttcctggatcaggttaatgcaaaagcggcgggcgacgacgaagccatgttctacgacgaagactacgtgacggcgctggaacacggtttaccgccgacagcgggtctgggaattggtatcgaccgtatggtgatgctgtttactaacagcacacgattcgcgacgttattctgttcccggcgatgcgtccggtgaaataagatgtaaat

SEQ ID NO: 37102 - DNA, 1103 bp, Salmonella paratyphi A
atgtttgaaattaacccggtgaataaccgcattcaggactcacggaacgcaccaacgttcttagggggtatctttgactacgatgctaagaaagagcgtctggaagaagtaaacgccgagctggaacagccggatgtctggaacgaacctgagcgccgcaggcgctgggaaaagagcgttcatcgctcgaagcgatcgtcgatacgcttgatcaaatgactcaggggctggacgacgtttccgggctgctggaactggcggtagaagctgacgacgaagagacgtttaacgaagccgtcgcggaactgaatacgctggaagagaaactggcgcagttggaattccgtcggatgttctccggcgagtacgatagcgccgattgctatctcgatattcaggccggttctggtggtactgaagcgcaggactgggccagcatgttgctgcgtatgtatctgcgttgggcggaagcgcgcggcttcaagacagaagtcattgaagagtcggaaggggaagtcgccggcattaagtccgcgactatcaaaatctccggcgaatatgcctatggctggctgcgcactgaaactggcgtacatcgtctggtgcgtaaaagcccgttcgactccggcggtcgccgtcatacctcgtttagctccgcatttgtgtatccggaagtggacgacgatatcgatatcgacattaacccggcggatctgcgtatcgacgtctatcgcgcgtctggcgcaggcggtcagcacgttaaccgtacggagtccgccgtgcgtatcacccatattcccaccgggatcgtgacgcagtgccagaacgaccgttcgcagcacaaaaacaaagaccaagccatgaagcagatgaaagcgaagctttatgaactggagatgcagaaaaagaacgctgaaaaacaggcgatggaagacactaagtccgatatcggctggggaagccagattcgttcctatgtcctggacgattcccgcattaaagacctgcgtactggggtggaaacccgcaatacacaggcggtactggacggtagtctggatcaatttatcgaagcaagtttgaaagcagggctatgaggaatc

SEQ ID NO: 37103 - DNA, 1748 bp, Salmonella paratyphi A
gtgaaacaacagagacaacttcgtcggcgcgaggctgatgagacggcggaactccccgccgatcttcctccattactacgacgtctatatgccagccggggcgttcgtagcgcccgcgaactggagcgcagcgtgaaaggaatgctgccctggcaacagcttagcggcatagataacgcggtggagatcctctacaacgcctttcgcgaaggtacccgcattattgttgttggcgattttgagccgacggcgcgaccagtactgcctaagcgtattgggaatgcgtgcgttgggatgtgacaacatcagttatctggtgcctaatcgctttgaggacggctacggtttaagcccggaagtggtcgatcaggcgaaggcgcggcgcgcagcttatcgtcaccgtagacaacggcatttcatcccacgccggcgtagcgcatgcaaagacgttggggattccgtagatcgtgaccgatcaccacctgcctggcgacacgttgccggatgccgaagcgattattaatcctaatctggcgactgcgaattcccgtctaagtcgctggcgggcgtcggtgtggcgttttatctgatgctggcgttgcgaacatttttgcgcgacaaaggatggttcgacgagcaacattgcgcgccgaatctggcggagttactggatttagtggcgttgggaacggtcgcagacgttgtcgactggacgctaataaccgtattctgacctggcaaggactaagtcgtattcgtgccgggaacatgacgtccgggaattaaagcgttgctggagatatcgaatcgcgatccgcagccagcttgccgccagtgatttaggcttcgcgttggggcctcgcctgcaatgccggcaggctggatgatatgtccgttggcgtggcgttactgttgtgcgacaacctcggcgaagcgcgtgttctggccagcgagctggatgcgcttaaccagacgcgcaaagaaatagagcaggggatgcaggcggaagcgcttatcctgtgcgaaaagcttgagcgcagtagtgaaacgcttccgggcggtctggcgatgtaccatcctgaatggcatcagggcgtggtcggaattctggcgtcgcgcattaaagagcgttttcaccgcccggtgatcgcctttgcgcctgcgggcgacggcacgttaaaaggctcaggccgatcgattcaggggttgcatatgcgcgatgcgctggaacggctggataccctttaccctgatctgatgatcaagttcggcggtcatgcgatggcggcgggattgtcgctggaagagcataaattcgagcagtttcagcaacgttttggcgagctggtgacggaatggctcgatcctgccctgttgcaaggcgaggtgatctccgatggtccattaagcgcggcggagatgtctatggaagtggcgcaactgttgcgggatgccggaccgtgggggcaaatgttcccggaaccgttattcgatggtcgtttccgtctgctacaacagcgtctggtgggcgagcgccacctcaaggtgatggtggagcctgtcggcgcggcccgctgttggatggcatcgcatttaatattgatacgacctgttggccggataacggcgtgcgggaggtagaactggcttataaactggacattaacgagtttcgcggcaaccgtagtttacagattattatcgatgatatttggccgctatgatcggggcgatttaacaacactttc

SEQ ID NO: 37104 - DNA, 716 bp, Salmonella paratyphi A
atgaaaaagcgttttatgatgttcactttactggcggcggcgttttcaggcgtggccatgcggatgatgcggctatccgtcagtcgctggctaagctgggcgttcagagtacggaaattcaggcctcgccagtggcagggatgaaaaccgtcctcactcacagcggcgtactgtacgtcactgatgaggcaaacatattattcaagggccgatgtatgacgtgagcggcgcgcatccggtaaacgtgacgaataaactgctgatgagccagctaaatgcgctggaaaaagagatgatcgtctataaagcgccggatgagaaacatgtcattactgtttttaccgatatcacctgcggctattgtcataagctacatgaagagatgaaagattataacgcgctggggatcacggttcgttatctggcttttccgcgccagggctggaaagccaggcggagcaggatatgaaatctatctggtgcgccaaagacaaaaacaaagcgtttgatgacgccatggcaggtaagggcgtgaaaccggcaagctgtgacgtgaacattgctgatcattatgcgttgggcgtgcagttgggcgttagcggtacgccagccattgtattgagtaacggctatgtggtgcctggctatcagggaccgaaagagatgaaagcgtttcttgatgagcatcaaaaacagaccagtggtaaataatacgc

SEQ ID NO: 37105 - DNA, 896 bp, Salmonella paratyphi A
atggaacaggatttagcgcgtattgagcagtttctggatgccctgtggctggaacgagatctggcggaaaatacattaagcgcgtatcgtcgcgatttatcgatggtcgttgcgtggttgcatcatcgcggaaaaacgcttgcgacggcgcaggctgatgatttacaaacgctgctggctgaacgggtggagggcggatacaaagcgaccagctccgcacgcctgttaagcgctatgcgcgcttcttccagcatctgtaccgtgaaaagtatcgtgaggatgatccgagcgcgcagttggcctcgcctaagcttccgcagcgtttaccgaaagatcttagcgaggtgcaggttgagcggctcttgcaggcgccgcttattgatcaacctttggagttgcgcgataaagctatgttggaagtgctgtatgccaccggtttgcgcgtgtcggaactggtggggctgacaatgagcgatatcagtctgcggcagggcgtggtgcgggttatcggtaaaggcaataaagagcggttggtgccgttaggcgaagaggcggtatattggctggaaacgtatctggagcatgggcgtccctggttactcaatggcgtatcgattgacgtattgttccccagccagcgtgcgcagcagatgacgcggcagaccttctggcaccgtattaaacattatgcggtactggctggaatcgatagcgaaaaactatcgccgcatgttttacgtcacgctttcgccacgcatttgctgaatcacggcgccgacttgcgcgttgtacaaatgctacttgggcatagcgatctttcgacgacacaaatttatacgcatgtcgcaacggagcgtttgcgtcaacttcatcaacagcaccatccgcgggcatga

SEQ ID NO: 37106 - DNA, 411 bp, Salmonella paratyphi A
gtggtcctgtggcaatctgatttacgcgtctcatggcgcgctcagtggatctcattgctcattcatgggctggttgccgcggtgattttattgatgccctggccgctgagttataccccgttatggatgatactactgtcgctggtcgtgtttgactgtgtacgtagccagcgcaggattaatacctgccagggagagatcaagctactcatggacgggcgcttacgctggcaggggcaggactggacgctcttgcatccgccctggttactgaagagcgggatggtgttgcgtttacgcgcagagtctggacgtcatcagcatttatggctggcggcggatagcatggaagaagcggaatggcgtgagttgcgtcggatactgttacagcagccgatatcaggccaacac

SEQ ID NO: 37107 - DNA, 1110 bp, Salmonella paratyphi A
atgcaaatctatatgataaattttatcatgtactgtgttgctctctctgggagaaaatatatgcagcgttcactcgatagtctggctggtatggctacatctgcttttggcgcggggacttctgctgctatgcggcaagctacctcgcccaaaaccattctggaatatatcattaacttttttacctgtggtgggatacgtcggagaaatgaaacacaatatcaggaattgatagagactatggctgagacattgaaaagtacaatgcctgacagaggtgctccgttgccagaaaacatcatcctggatgatatggatgggtgtcgtgtcgaatttaatcttcctggtgagaataacgaagctggacaagttattgtacgagtcagtaaaggcgaccattctgagacaagagaaattccgcttgtctcttttgaaaaaatatgtcgagctttactattcagatgcgaattttctctccctcaggattctgtaatattaactgcccagggaggcatgaatcttaaaggcgctgtccttaccggagcaaatctgacggcagaaaatttatgtgacgcagacttaagcggcgcaaatttagagggggcagtgctgtttatggcggattgtgaaggtgcaaattttaagggcgcaaatctatcgggaacatcactaggcgacagtaatttcaagaacgcctgtctggaagatggcattatgtgtggcgctaccctcgatcacgctaatcttactggcgccaatttacaacacgcgagtctgttaggctgtagcatgatagaatgtaattgctccggtgcaaatatggatcacactaatctttcaggcgcaacccttatacgtgctgatatgagcggtgcgacattacagggtgctactataatggctgcaattatggaagacgctgtcttaacccgggcaaatctgcgaaaggcgagtttcatttctacgaacctggacggggctgatttggctgaggctaatttaaacaatacctgttttaaagattgtacactaacccatttgcgtaccgaagacgccacaatgtctacaagtacacaaacactctttaacgaattttatagtgaaaatatt

SEQ ID NO: 37108 - DNA, 396 bp, Salmonella paratyphi A
atgcaaacacaaatcaaagttcgtggatatcatcttgatgtttatcaacatgttaataatgcccgctatctggagtttctggaagaggcccgttgggatgggctggaaaacagcgacactcttcagtggatgacggcccgcaatattgcctttgtggtggtaaacatcaatataaattaccgtcgcccggcggtattgagcgatctactgaccgtgaccagccaggtacaacagcttaacggtaaaagcggcgtattaagccagacgattacgctggagccagaagggcaggtggtggccgatgcgctcatcacgtttgtttgtattgatttaaaaacgcaaaaagcgctgccgctggaaggcgaattgcgtgaaaagctggaacagatggtgcaa

SEQ ID NO: 37109 - DNA, 270 bp, Salmonella paratyphi A
gtgaataaatctcaactgatcgaaaaaattgctgcaggggctgatatctctaaggctgcggctggacgtgcgttagatgcgattattgcttctgttaccgaatctctgaaagaaggggatgacgttgcactggtaggctttggtacttttgctgttaaagagcgtgctgcccgtactggtcgcaacccgcaaacaggtaaagagatcaccatcgccgctgccaaagtgccgagtttccgtgcaggtaaagcgctgaaagacgcggtaaac

SEQ ID NO: 37110 - DNA, 2392 bp, Salmonella paratyphi A
tctgattacctggcggacactaaactaagagagagctctatgaatcctgagcgttctgaacgcattgaaatccccgtattgccgttgcgcgatgtggtggtttatccgcacatggtcatacccttatttgtagggcgggaaaaatctatccgttgtctggaagcggctatggaccatgataaaaaaatcatgctggtcgcccagaaggaagcatcaacggatgagccgggtgtaaacgatcttttcaccgtcgggaccgtggcctctattttgcagatgctgaaactgcctgacggcaccgtaaaagtgctggtcgaggggttacagcgcgcgcgtatttccgcgctgtctgacaacggcgaacatttctccgcgaaggcggagtaccttgattcgccagccattgatgagcgtgaacaagaagtgctggtgcgtaccgctatcagccagttcgaaggctacatcaagctgaacaaaaaaattccgccggaagtgctgacgtcactcaatagcattgacgaccctgcacgtctggctgacaccatcgccgcgcatatgccgctgaaactggcggataaacagtccgtactggagatgtccgacgttaacgaacgtctggaatatctgatggcgatgatggaatctgaaatcgatctgctgcaggttgagaaacgcattcgcaaccgcgtgaaaaagcagatggagaaatcccagcgcgagtactatctgaacgagcaaatgaaagcgattcagaaagaacttggcgagatggacgacgcgccggacgaaaacgaagcgctgaagcgtaagatcgacgcggcgaaaatgccgaaagaggcgaaagagaaagcggaagcggaactgcagaagctgaaaatgatgtctccgatgtcggcggaagcgaccgtggtgcgcggctacatcgactggatggtgcaggtgccgtggaatgcgcgtagcaaggtcaaaaaagacctgcgtcaggcacaggaaatcctcgatactgaccattatggtctggagcgtgtgaaagaccgcatccttgagtatctcgcggtacaaagccgtgtaaataaaatcaaggggccgatcctgtgtctggtggggccgccgggggtaggtaaaacctcgttgggccagtccatcgctaaagccacagggcgtaaatacgtccgtatggcgctgggcggcgtgcgtgatgaagcggaaatccgcggtcatcgccggacttacattggctctatgccgggtaaactgatccaaaaaatggccaaagtgggggttaaaaacccactattcctgctcgatgagatcgacaaaatgtcctcggacatgcgcggcgatccggcttccgcactgcttgaggtgctggacccggagcagaacgtggcgttcagcgatcattacctggaagtggattacgatctcagcgatgtgatgttcgtcgccacctccaactccatgaacattccggcgccgctgctggatcgtatggaagtgatccgtctgtccggttataccgaagacgagaagctgaatattgctaaacgtcacctgctgccgaagcagatcgagcgtaacgcgctgaagaaaggcgaactgacggtcgacgatagcgcgattatcggtattatccgctattacacgcgtgaagcgggcgttcgtagtctggagcgtgaaatctccaaactgtgccgtaaagcggttaaacaactgttgctcgataagtcgttaaaacatattgaaattaacggcgataatctgcacgactacctcggtgtgcagcgctttgattatggccgcgcggatagcgaaaaccgcgtaggtcaggtgacgggcctggcgtggacggaagtgggcggcgatctgttgaccatcgaaaccgcctgcgtaccgggcaaaggcaagctgacctacaccggctcgctcggtgaagtgatgcaggaatctattcaggcggcgctgaccgtggtgcgcgcgcggaaaaactgggtattaatccggacttttacgaaaaacgcgatatccacgttcacgtgccggaaggcgcaacgccgaaagacggtccaagcgccggtatcgcgatgtgtaccgcgctggtttcctgcctgaccggtaatccggtgcgcgcagatgtggcaatgaccggtgagatcaccctgcgtggtcaggtgttgccgatcggcggcctgaaagaaaagctgttggcgggcatcgcggcgggattaaaacggtcttaattccgttcgaaaataaacgtgacctggaggaaattccggacaacgtgattgccgatctggatattcatcctgtgaagcgcattgaggaagttctgacgcttgctctgcaaaacgaaccgtctggaatgcaggttgtaaccgcaaaatagtga

SEQ ID NO: 37111 - DNA, 1266 bp, Salmonella paratyphi A
atgacagataaacgcaaagatggctcgggcaaattgttgtactgctctttttgcggcaaaagcagcatgaagtgcgcaacggattgccggtccatccgtgtatatctgcgacgaatgcgtcgatttatgtaacgacattattcgcgaagaaattaaagaagttgctccgcaccgtgaacgtagtgcgctgccgacgccgcatgaaattcgtacccacctggacgattacgttatcggccaggagcaggcgaaaaaagtgctggcggtggcggtctataaccactacaagcgtctgcgtaacggtgataccagcaatggcgtcgagttaggcaaaagcaacattctgctgattggaccgaccggttccggtaaaacgctgctggcggaaacgctggcgcgcttgctggatgtgccgttcactatggcggatgcgaccacgctgaccgaagcgggttacgtgggtgaagacgtcgagaatatcattcagaaactgttgcagaaatgcgactacgacgtgcaaaaagcgcagcgtgggattgtctacattgatgaaatcgataagatttcgcgtaaatcagacaatccgtccattacccgcgatgtttccggcgaaggcgtacagcaggcgttgctgaaactgatcgaaggcaccgtcgccgcggttccacgcagggcggtcgcaaacatccgcagcaggagttcttacaggtagatacctctaagattctgtttatctgcggcggcgcgtttgctggtctggataaagtgatcgctaaccgtgttgaaaccggctccggcattggttttggcgcgacggtgaaagcgaagtccgacaaagccagcgaaggcgagctgttgtcgcaggttgaaccggaagatttgatcaaatttggtctgattcctgagtttatcggtcgtctgccagtggtggcgacgctgaacgaactcagcgaagaagcgctgattcaaatcctgaaagagccgaaaaatgcgctgaccaagcagtatcaggcgctgtttaacctggaaggcgtcgatctggaattccgtgacgaagcgctggacgctatcgccaggaaagcaatggcgcgtaaaaccggtgcccgtggtctgcgttctatcgtcgaagcggcgctgctggataccatgtacgatttgccatctatggaagacgtcgaaaaagtggtgatcgacgagtccgttattgccggtcagagtaagccgttgctgatttacggcaaaccggaagcgcaggcttctggcgaa

SEQ ID NO: 37112 - DNA, 1291 bp, Salmonella paratyphi A
gcattagggggcgggctgaaatcacgccacgtcaccatgttatcgatcgccggcgtcatcggcgccagcctgtttgtcggttccagcgtggcgattgcggaggccggccctgcggtactgctggcctatctgttcgcaggacttttagtcgtcatgattatgcgaatgctggctgaaatggccgtcgccacgccggataccggttctttttccacctatgcggataaagcgatcggcccctgggccgggtataccatcggctggttatactggtggttttgggtgctggttattccgctggaggccaatattgccgccattattctgaattcatggataccgggtattccggtgtggctattttcattagtgttgtcgctttcctgaactggaatcaagtttttgagcgtcaaaaattacggctatttctaattcttggctggcgctatgtaaagtgattgctatcctggcgtttagtctgggaccgacggcgattagcggtttttatccgtatgccgaggtaagcggtatctcccggctatgggatccccacggcggttttatgccgaacggcttcggcgcggtgttaagcgccatgttgatcaccatgttctcttttatgggcgcggaaatcgtcactatggctgccgcggaatccgatacgctggataaacatatcgtacgcgccaccaattctgttatctggcgaatttccatcttttacttgtgttccatttttgtggtggtggcgctgatcccgtggaatatgccgggcctgaaaagcgtaggttcgtaccgctcggtactggagctgcttcatattccgcacgcaaaattcattatggactgcgtgattttgttgtcggtgaccagttgtctgaactccgcattatataccgcctcccggatgctctattcccttagccgccgcggcgatgctcctgcgataatgggaaaaactaaccgtagcaaaacgccctgggtagcggttctcctctctaccggcgcggcctttttaaccgttatcgtcaattattacgccccggcaaaagtgtttaaatttcttatcgacagttctggcgccatcgcgctgctggtctatctggtgattgcgatttcgcaattgcggatgcgtaaaattctgctggcgcagggcggagaaattaagttgaaaatgtggctttatccgtggctcacctggctggttatcggctttatctgctttgttctggtggtgatgctatttcgaccggcacagcaactagaagtcatttcaacggggctgttaggg

SEQ ID NO: 37113 - DNA, 297 bp, Salmonella paratyphi A
atgacagagcttgaacaacttcaggccagcgcagaacaggcggcggccctgctcaaagcgatgagccacccaaaaagattactgattttatgtatgctttgcggttcgccaaaaaccagcgcaggcgaactggcgcgcattaccgggctaagcccctccgcgacgtcgcaacatctggcgcggatgcgggaagaagggctgattgatagtcaacgcgatgcccagcgcattcactatttcattaaaaatgaggcggttaatacgattatcgccacgttaaagaatctctattgtcca

SEQ ID NO: 37114 - DNA, 447 bp, Salmonella paratyphi A
atgggacttttcaattttgtaaaagatgcaggtgaaaaactctgggacgcggtaaccgctaatcatgataaggacgatcaggcgaaaaaagtccaggaacatttaaataaaacgggaatacccgacactgacaaagtgaatgtgcaaatagctgatggaaaagcgacagtgacgggtgatgggctgagtcaggaggcaaaagaaaaaattctggttgccgtggggaatatcgccgggattagcagcgttgacgatcaggttaaaaccacgacgccggcggctgaaagtcagttttataccgtaaaatcaggcgacaccctgagcgctatttcaaagcaagtgtatggtaacgccaatctgtataataaaattttcgaggcaaataaaccgatgctgaaaagcccggaaaaaatatatccgggacaagtgttgcgtattcctgaagaa

SEQ ID NO: 37115 - DNA, 993 bp, Salmonella paratyphi A
agtgtaccgctgcggataatgactcttctgcgatacattattttcgtatctacagaaggtattttatgtttcctcaaagcaaattttcacgcgcgtttttgcacccgcgctactggctgacgtggtttggcgttggcgtcctctggttactggtgcagcttccctacccggttttgcgttttctgggcacccgcaccggtaagctggcgcgccccttcctgaagcgacgtgagtcgatcgcccagaaaaatattgaactctgttttccgaccctctcccgggaagaaaggggaaaactgatcgccgagaatttccactctcttggcatggcgctgcttgaaacgggcatggctggttctggcctgatagccgggttcgcaaatggtttgatgtggacgggctggacaaccttacccgtgcgcaggcgcaaaatcgcggcgtaatggtcgttggcgtgcattttatgtcgctggaattgggaggccgggtaatgggtctctgccagccgatgatggcgacctatcgtccgcataacaatccgctcatggagtgggtgcagacgcgcggtcgtatgcgctcaaataaagcgatgatcggcagaaacaatctgcgcggcattgtgggcgcgctaaaaaaaggggaagccgtttggtttgctcccgaccaggactacggccctaaaggcagctcctttgcgccatttttcgcggttgaaaacgtcgccaccaccaacggcacctatgtactgtccaggctgtccggcgccgcatgttaaccgttacaatggtcaggaaaaccgataactcgggttatcgtctgtatattacccctgaaatggaaggttacccggcagatgaaaatcaagccgctgcctatatgaataaaattattgagaaagagatcatgcgcgccccggagcaatatctctggatccatcgccgtttcaaaactcgcccgttgggggaagcgtcactctacatctgaaaaaggccg

SEQ ID NO: 37116 - DNA, 1237 bp, Salmonella paratyphi A
atggctgactcccgccctgaacgtcgctttacgcgtatcgatcgccttccgccctatgtttttaacatcaccgctgaactcaaaatggctgcgcgtcggcgcggcgaagatattattgatttcagtatgggtaatcctgatggcgcaacccctccccacattgtcgaaaaactttgcaccgtcgcgcagcgtccggatacgcacggttattccacgtcccgcggcataccgcgtttacccgcgcgatttctcactggtatcaggaacgttatgatgtcgatatcgatccggaaaccgaagcgattgtgaccatcggttccaaagagggactggcgcatttaatgctggcgacgctggatcatggtgatacggttctggtgccgaaccccagttacccgattcatatctatggcgccgttatcgccggggcgcaggtgcgttcggttccattggtcgagggagtggatttcttcaacgagctggagcgcgctattcgcgaaagttatccgaaaccgaaaatgatgattttgggttttccatctaaccctacggcccagtgcgtcgaactggaattttttgaaaaagtggtcgctctggctaaacgttatgatgtgctggtagtgcacgatctggcgtatgccgatatcgtgtacgacggctggaaagcgccatccattatgcaggtgcccggcgcacgcgacgtggcggtcgaatttttcacattgtcgaaaagctataatatggcgggctggcgtattgggtttatggtgggcaataaaaccctggtcagcgggcgcgcattaaaagttatcacgattatggtacttttaccccgcttcaggtggcggctatcgccgctctggaaggcgatcagcagtgcgtgcgcgatattgccgagcagtataaacgtcgtcgcgatgtgctggtgaagggactgcatgaggcgggctggatggttgaaatgccgaaagcctcaatgtacgtctgggcgaaaatcccggagcaatatgcggcgatggggtcacttgagtttgccaagaagctgctgaatgaggcgaaggtttgcgtttctccagggataggctttggtgactatggcgacacccatgtacgctttgcattaatagagaatcgcgatcgcattcgccaggccgtcagggggattaaagcgatgttccgcgccgatggcgtgctgccgtcacatccgaaacccgttgaagcgagcacggagtagaaa

SEQ ID NO: 37117 - DNA, 1255 bp, Salmonella paratyphi A
  misc_feature (447)..(447): n=g, a, t or c
atgatgaattttcgggggaaccgcatgataaacaacgatccgctttttgatctgcttaacaaagagcaacagcgccagcagcactcgctggaactgattgcctcggagaatttcgccagccctgccgttcttgcggcacaagggtcggtgttaaccaataaatacgccgaaggctattaccagcaccgctactacggcggctgtaagttcattgatgaggttgagatgctggcgataacccgcgcgcagcaacttttcggcgcgcgttacgttaacgtgcagcctcactccggcagccaggcgaatcaggcggtatatctggcgctgctgaaacccggcgacaaaattctgggcatgagcctgcaatgcggcggccatctcactcacggttcgccggtcaatcaatccggtaaatggtttaacgcctttcattatggcgtcgatgcngcatagcggtcttattgatatggatgaggttgagacgatcgcgaagcgtggagccccgcggctgattatcgccgggggatcggcctacccacgacactatgattttgcccgctttcgccgcattgccgatgccgtcggcgcgatactgctggtggatatggcgcattttgccgggctggtggcgggcggctgtttccccctcgccgctgcgtatgccgatgtgattaccaccaccacgcataaaacgttgcgcgggccgcgtggcggcatgattctggccaacgacgcccggctggcgaaaaaaatcgacagcgccatctttcccggcttgcagggcgggccgttgatgcacgttatcgcggctaaagcggtggcgcttggcgaagcgctacagcctgaatttaaacgttacgccgggcaggtaatcgaaaatgcgcaagcgatgtgtcagcaactggcgcagcgcggcctgacgctgttaacgggcggtaccgactgccatctgggcattatcgacctgcgcccgcaggggttaaccggcgctcaggtggaatactttctcgaactggcggggatcacggtcaataaaaacacgctgccaggcgatccgcagccgccgtcgattacctccgggattcgcattggcagcgcagcctgcgccacccgcggaatgaatgccgatgattttacgctgatcgcggactggatcagtgaaattatttttgccatcaagacgccgaatattacagatatttgcgccgatattcggcaaaaagtgactaaattaaccaccaactatccgttgcct

SEQ ID NO: 37118 - DNA, 1449 bp, Salmonella paratyphi A
gtcaccattatttacaccaacgatctacacgcccatgtggagccttataaagtgccgtggattgctgacggtaaacgcgatattggcggttgggccaatatcgctacgctggtgaagcaggaaaaagccaaaaataaggcgacgtggttttttgatgccggagattactttaccggaccgtatatcagcagcctgacgaagggtaaagcgattatcgatattttgaataccatgcagtatgacgctgccactatcggtaatcatgagttcgatcatggctgggacaatacattgttgcaactgagccgggcgaaattccctatcgtacagggcaatattttttatgaggacagcagtaaatccttctgggataagccgtacaccattgttgaaaaagatggcgtcaagattggcgtaatcggcttacacggtgtctttgcttttaatgatacggtttccgccgcgacgcgcgtgggcattgaggcacgcgatgaaattaagtggctgcaacgttacattgatgaacttaaaggtaaagtcgatctgaccgtcgcgctgatccacgaaggcaccccggcccgccagtccagcatggggaataccgatgtgcgacgcgcgctggataaagatattcagaccgcaagtcaggtaaaagggctggatattttgattaccggccacgcgcatgtcggtacgccggaaccgattaaagtcggtaatacgctgattctttcaacggacagcggcggcattgatgtcggcaaattggtgctggactaccaggaaaagccgcatcagtttaccgtgaagaacttcgagctgaagaccatttttgctgatgagtggaagccagatctgcaaacgaaacaggtgatcgacggctggaacaaaaagctcgataaagtcgtgcagcaaacggtggcgcagtcgccggttgagctgacccgtgcgtatggcgaatcgtcgtcgctggggaatctggcggcggatgcgctgctttttacggcggggaaagacacccagttagcgcttactaactctggcggtatccgcaacgaaatcccggctggcgcggtgacgatgggggcggtaatcagtaccttcccgttccctaatgaactggtcacgatggatttaaccggtaaacaattgcgcagcctgatggagcatggcgctggcttaagcaacggcgtattgcaggtgtctaaagggctggagatgaagtatgacagcagcaaacctgtcggccagcgggttaccgtgctgacgctcaatggcaagccgattgacgatgctacggtttatcacatcgctaccaacagcttccttgccgacggcggcgatggttttgcggcattcacggaaggccaggcgcggaatacctccggcggctactatgtgtcgaatgcgatagtcgattactttaaggcgggcaacaccatcacggat

SEQ ID NO: 37119 - DNA, 1258 bp, Salmonella paratyphi A
tattttgaccaactcgatcgtgttcgctatgaaggccctcaatcgactaacccgctggcatttcgtcattacaatcccgacgagctggttttaggtaaacgtatggaagatcacctgcgtttcgcggcctgttactggcataccttctgctggaacggcgcggatatgtttggtgtaggcgcgtttaatcgtccgtggcagcaaccgggcgaagcgctggagctggcgaaacgcaaagcggacgtggcgtttgaatttttccacaaactgaatgtgcctttttactgcttccatgacgtggatgtgtcgccggaaggcgcgtcgttgaaagagtataaaaacaacttcgcgcagatggtggatgtgctggcggcgaaacaggagcagagcggcgtaaaactgctgtggggaacggcgaactgctttaccaacccgcgctatcggcagcgccgccactaacccggacccggaagtctttagctgtgcagcgacgcaagtggttacggcaatgaacgccacgcataaactgggcggcgaaaattacgtcctgtggggcggacgcgaaggttatgaaacgttgctgaataccgatctacgccaggaacgcgaacagattggccgctttatgcaaatggtggttgagcacaaacataaaatgggtttccagggcacgctgctgattgaaccgaaaccgcaggaaccgacaaaacatcagtatgattatgacgttgcaacggtctatggcttcctcaaacagttcggcctggaaaaagagatcaaagtgaacattgaggcgaaccacgccacgctggcgggccattcgttccaccatgaaatcgcaaccgctatcgcgctgggtatttttggctccgttgacgccaaccgcggcgatgcgcaactgggctgggataccgatcagttcccgattagcgttgaagagaacgcgctggtgatgtacgaaatcctgaaagcgggcggattcacgacgggcggtctcaacttcgacgccaaagttcgtcgccagagcaccgataaatacgatctgttctacggtcatatcggcgcgatggatacgatggcgttgtcactgaaaatcgccgcgcgtatggtcgaagacggcgagctggggcagcagattctgaaaggacaactctccttaggcaaactggcgcagtatgcggagcagcaccatctggcgccggtacatcaaagcggtcatcaggagctgttagaaaatctggttaaccgttatctgttt

SEQ ID NO: 37120 - DNA, 1252 bp, Salmonella paratyphi A
atgacattttcacttttcggcgataaatttacccgccattcaggcattacccgcctgatggaggatctcaacgacggcttacgcacgccaggagccatcatgcttggcggcggtaacccggcacacatccctgcaatgcaggattatttccagacgctactgacagatatggtagaaagcaaagctcgctgatgcgctttgtaattatgacggtccccagggaaaaacggcgctactgaatgcactggccgtactgctacgtgaaacgctgggatgggatatcgaaccacagaatattgcgctgacaaatggcagtcagagcgcgtttttctacttatttaatctcttcgccggacgtcgcgcgatggcagtacgaaaaaggtactattcccgcttgcgccggaatacatcggctatgcggattccggtctggaagacgacctcttcgtttcggcgcgcccaaatattgagctgctgccggaaggccagtttaaatatcacgtcgattttgagcatctgcacatcggcgaagaaacggggatgatttgcgtctcgcgcccgaccaacccaaccggtaacgttatcaccgacgaagagctgatgaagctggacagactggcgaatcagcacaacatcccactggtgattgataacgcttatggcgtaccgtttccgggcattatctttagcgaggcgcgcccgctgtggaatcccaatattatcctatgcatgagcctctcgaagctggggctgcccggttcccgctgcgggattatcatcgccaatgataagacgatttccgccattgccaacatgaacggcattatcagccttgcgcccggcggcatgggtccggcgatgatgtgcgaaatgattaagcgtaacgatctgctgcggctgtcggaaacggttatcaaacctttctactatcagcgcgttcaacagactatcgcgatcattcgtcgctatttatccgaagaacgctgcctgattcataaaccggaaggcgcaatatttttgtggctgtggtttaaagatctgccgattaccaccgagctactctatcaacgcttgaaagcgcgcgggcgtgctgatggtgccaggccattatttctttcccgggctggataaaccctggccccacacacaccagtgtatgcggatgaactacgtgcctgaaccggacaaaatcgaggcgggcgtaaaaattctggcagaagagatagaacgcgcctggcgtgaaggctgacgg

SEQ ID NO: 37121 - DNA, 900 bp, Salmonella paratyphi A
atggctaacctttacgaccttaaaaaatttgatcttaacctgttggttatatttgaatgtatttatcaacatttaagcattagcaaagcagcggaaacactctatattacaccttctgccgtcagtcagtcattgcaacgcctgcgcacgcaattcaatgatcctctatttattcgctcaggcaaaggaattacgcctaccgtaacaggcattaatttacattatcatttagaaaataaccttaacagcctggaacaaactattaatataatgaatcagtccagtctgaagaaaaaatttattatctacagcccacagatgttgatcacccaatatgcgatgaaattagttaaatatatccgcaaagatccacaggttgaaattgaacatcacgacattttgaccactgacgaactgcctgaagatctgcttgcctaccgcaaagcagatgttgtggtttcaatggccccacttaataatcgttctattgtttgtactcactttaataggctagaatgtatcctggtttgcagtgaaaatcatccccgactaggcgacaccgccactatcgatgaaattctacaagagtcatttacgcaactcgtctcccgagcaaccggtatgaaagagtatcattcacttatagatgatgtgctgggggagagaataattggtttaagaagcaaatcggtgatgactatcgccaactccatcagctccacggagcttattggttttttaccacaaacatttgttgactattactcttcctctatcaaacttaaaaaagtcgccacaccttttaccactgctcctatacaattctatcttatgtacaatagagcttcgctgaataatagcggatttgctgagctcattgagcacatcacaaaaaagcgt

SEQ ID NO: 37122 - DNA, 565 bp, Salmonella paratyphi A
atgtccttaattaacaccaaaatcaaacctttcaaaaaccaggcgttcaaaaacggtgaattcattgaagtcaccgagaaagataccgaaggccgctggagcgtcttcttcttctacccagccgattttacctttgtttgcccgactgaactgggtgacgttgccgaccattacgaagaactgcagaagctgggcgtagacgtttattccgtctcaaccgatactcacttcacgcacaaagcatggcacagcagctctgaaactatcgcaaaaatcaaatatgcgatgatcggcgacccgactggcgccctgacccgtaaacttcgacaacatgcgtgaagatgaaggtctggcagaccgtgcgacctttgttgttgacccgcagggtatcatccaggcgatcgaagttaccgctgaaggtatcggccgtgacgcgtctgacctgctgcgtaaaattaaagcagcacagtatgttgccgctcacccaggcgaagtatgcccggcgaaatggaaagaaggtgaagcgactctggctccatctttagacctggtcggtaaaatctaa

SEQ ID NO: 37123 - DNA, 1750 bp, Salmonella paratyphi A
gtgaatattcaggctcttctctcagaaaaagttagtcaggccatgattgctgcaggcgcgcctgagattgcgagccccaggttcgtcagtcagccaaagttcagttcggcgactatcaggccaacggatgatggcagttgcgaaaaaactgggtatggccccccgacaacttgcagagcaggtgctgactcatctggatctcagcggcatcgcagcaaggttgaaatcgccggcccaggctttatcaatattttcctcgaaccggcttttctcgctgaacaggtgcaacaggcgctgacctccgatcgtctgggcgtttctcagccgactcgccagacgattgtcgtcgactactccgcgcccaacgtcgcgaaagagatgcacgttggtcatctacgctccacgatcattggcgatgcggcagtgcgcacagctggagtttctgggccatcatgttattcgcgctaaccacgtcggcgactggggcaccagttcggtatgcttatcgcctggctggaaaaacagcagcaggaaaacgcgggcgacatggcgctggcggatctcgaaggattttaccgcgatgcgaaaaaacattatgacgaagatgaagcgtttgccgagcgcgcgcgtaactacgtcgtcaaattgcagagcggtgatacctatttccgtgagatgtggcgtaagctggttgatatcacgatgacgcaaaaccagatcacctatgatcgtctgaacgtcactctgacgcgtgacgatgtgatgggcgaaagtctgtataatccgatgctgccgggcatcgtcgccgatctgaaagccaaaggctggcggttgaaagcgaaggcgcaacggtggttttccttgatgagtttaaaaacaaggaaggcgacccgatgggcgtcattattcagaagaaagatggcggttatctgtataccactaccgatatcgcctgcgccaaataccgttacgaaacgctgcacgccgaccgcgtgctctactacattgactcccgtcagcaccagcacctgatgcaggcctggaccattgtgcgtaaagccggttatgtgccggattccgttccgctggaacaccacatgttcggcatgatgttgggtaaagacggtaaaccgtttaaaactcgcacgggcggtacggtgaaactggcggacctgctggatgaggcgctggagcgcgcgcgtcgtctggtggcggagaagaacccggatatgccggctgacgagctggaaaaactggctaacgccgtcggtattggcgcggtgaaatacgccgatctgtcaaaaaaccgcaccactgactatatcttcgactgggataatatgttggctttcgaaggcaataccgcaccttatatgcagtatgcctatacgcgtgtgctgtctgttttccgtaaagcggacatcgacgagcaggcgctggcgagcgcgccggtatatcattagcgaagatcgcgaagcagctcgctgcccgtctgctgcagtttgaagaaaccctgacggtggtcgcgcgtgaaggtacgccgcacgtcatgtgcgcgtatctgtatgacgtcgccgggctgttctccggcttctacgagcactgccctattctcagcgccgagaatgacgcggttcgcaatagccgcctaaaactggcgcaactgacggcgaagacgctgaaactgggtctggatacgttgggtatcgaaaccgtagaacgcatgtaaacgcgccgtcgttaacatcat

SEQ ID NO: 37124 - DNA, 315 bp, Salmonella paratyphi A
atggctgaatggagcggcgaatatatcagcccatacgctgagcacggtaagaagagtgagcaagtcaaaaaaattacggtttccattcctctgaaggtgttaaaaatcctcaccgatgaacgtacgcgtcgtcaggtgaacaacctgcgccacgccaccaacagcgagctgttgtgtgaagcatttctgcacgcctttaccgggcaacccttgccggatgatgccgatctgcgaaaagagcgcagcgatgaaatcccggaagcggcaaaagagatcatgcgtgagatggggattgacccggaaacgtgggaatac

SEQ ID NO: 37125 - DNA, 1136 bp, Salmonella paratyphi A
acgcgtaaacaggccactatcgcagtgcgtagcggattaaacgacgacgagcaatacggctgcgttgtgccgccaatccacctctccagtacctataactttaccggtttcaatgagccgcgcgcgcatgattattcccgccgcggtaatcccacgcgtgatgtggttcagcgcgcattagcggaactggaaggcggccgggcgcggtattgacgaataccggcatgtcggcgattcatctggtcaccaccgttttcctaaagccgggcgatctgctggtcgcgccgcatgattgctacggcggcagttatcgtctgtttgacagtctggcgacacgcggctgttattgtgtgcggtttgtcgatcagggcgatgaaaacgcacaggcggcgctggaagaaaaaccgaagctggtactgtgtagtaagtcaagtaatccattgttacgcgtggtggatattgcgaaaatctgtcggctggcgcgcgagggggcgcagtgagcgtcgttgataacacgtttttaagcccggcgctgcaaaatccgctggcgttgggtgccgatctggtgttgcattcatgcacgaaatatctcaacggtcattcggatgtcgtggccggcgtggtgattgcgaaagatccggaagtggtcactgaactggcgtggtgggcgaataatattggcgtgaccggcggggcgtttgatagctatctgctgctgcgcggtttgcgaactctggtgccgcgtatggagctggcgcacgcaacgcgaggcgattgtgaaatatctgcaaacccagccgttggtgaaaaaactgtatcacccgtcgctgccggaaaatcaggggcatgaaattgccgcgcgccacgaaaaaggctttggcgcaatgttgagttttgaactggatggggatgaggagacgctgcgtcgttttctgggcgggctgtcgctgtttacgctggcggaatctttagggggagtggaaagtttgatctctcacgccgccaccatgacgcatgccggtatgtcgccgcagcgtgccgccgccgggatctccgaaacgctactgcgtatctccaccggtattgaagatggcgaagatttaattgccgacctgggaaatggcttccgggctgca

SEQ ID NO: 37126 - DNA, 1184 bp, Salmonella paratyphi A
atgacaatcaatccagtttcccgcaaggtcgcgtggctacgggtagttacgcttgctattgccgcttttattttcaataccacagaatttgtgccagttggtttgctgtcagacattgctgaaagctttcatatgcaaaccgcgcaggtcggcatcatgctaaccatttacgcctgggtagttgccgtcatgtcgctgccttttatgcttcttaccagtcaaatggagcgccgtaaactactcatttgtctgtttgttttgtttattgccagccatgtgctctcctttctggcatggaactttaccgtgctggtcattagccgtattggcatcgctttcgcccacgctattttctggtcgataaccgcctcgctggcgatccgcctggcccctgccgggaaacgcgcgcaggcattaagtctgatagcgaccggcaccgcgttggccatggtgcttgggctgccgataggtcgcgttgttggtcagtattttggctggcgcaccaccttttttgccatcggcatgggcgcattaattacgctgctatgtctgattaagcttctaccgaaattgccgagcgagcattccggctcactaaaaagtttacctttgctattccggtgcccggcgctgatgagcctctatgtgctgaccgtcgttgtggtgactgcgcattatacagcttatagctatattgaaccgttcgttcagaatgtcgccgggctcagtgcgaattttgctaccgtcctgttactgctcctcggcggcgccgggatcatcggcagcctcgtgtttggtaaactgggtaatcgccatgcctcgtcgctcgtcagtatcgctattgctctgctggttgtctgtctgcttctgctgctgcctgcggcggatagcgaagcgcatctggccatactgagcattttctggggcatcgcgattatggtgatagggctcggtatgcaggtgaaagtactggcgctggccccggacgcgaccgatgtcgaatggcgctattttcaggcatctttaatattggtatgggcgctggcgcgctggtaggcaatcaggtgagtttgcactggtcaatgtcggccatcggctatattggcgccatacccgcctgtgccgcgctggtatgggctgtgctcatattccgcaaatggccagtgacgctggaagaacaaccg

SEQ ID NO: 37127 - DNA, 915 bp, Salmonella paratyphi A
atggacctgacgcaactggaaatgtttaacgctgtcgctctgacgggcagcattacgcaggcggcggcaaaagtacaccgcgttccgtccaacctgaccacgcgtatccgccagcttgaagccgacctgggcgtctctctgtttattcgcgaaaaccagcgactcaggctgtcaccagccgggcataactttttacgttacagccagcagatcctggcgctggtcgatgaagcccgcatggtggttgccggagaggaaccgcaaggactgttttcactcggcgcgttagaaagtactgccgccgtacgtatccccgcgctgctggcgggttataaccagcgttaccctaaaattcagttcgcgttaacgaccggtccttccggcgccatgctggatggcgtgctcgaaggaaagctgaacgccgcctttattgatggcccgctaatgcatccggggctggaaggtataccggcttaccaggaagagatgatgatcgtcgcgccacacggccattccgtcgtttcgcgggccagcgaggtgaatggttataacatctatgcttttcgcgccaactgttcttaccgacggcatttcgaaagctggtttcatgccgatggcgcgacccccggtacgattcacgaaatggagtcatatcatggattgttggcgtgcgtaattgccggcgcaggtattgcgctgatgccagcaagtatgctcaacagtatgccaggacatcatcaggtggaagcctggccgttggcggagaagtggcgctggcttaacacatggctaatgtggcggcgcggggcgatgacgcgtcagcttgaggcctttatcgagttacttaacgcccaactgcgagcgccgactgaagacgaaacggcctgcgaagtaaatgagaagcaggtcacaaaa

SEQ ID NO: 37128 - DNA, 453 bp, Salmonella paratyphi A
gtggtagccgtcgtcctgccggttaatgcggttattgtggtcagtttgcaatacgccgtgggccgtcgacttaccgccgtcaatattcgaccaatgatgacgaccggcaccgtcttttttatcgccgggctcatcggatttattttttcaggcgacaatctgtttttttgggggctttcagcggcagtattcacgattggcgaaattatttatacccccggcgaatatatgttaattgacaacattgcgcctgccgggatgaaagccagctatttttcagcgcaatcgctgggctggctgggtgcggcggtaaacccgctggccagcggcgtcatcctgacgacgcttcccgcctggtcgcttttcgttgtcctgataatcgccattgtgttcgcctgggcactgatgttaaaaggaatgcggattacccctacgcaacaggctatcacctgt

SEQ ID NO: 37129 - DNA, 663 bp, Salmonella paratyphi A
atgatggatttgtttaaagcgattggattggggctggtcgtactgctcccgttagccaatccgctaaccaccgtggcgctgtttcttggccttgcgggcaatatgaatagtgcggaacgcaaccggcagtcctatatggcttcggtttatgtcttcgctattatgatggtggcgtactacgccgggcagttagttatgaacaccttcggtatttcgattccagggttacggatcgcagggggggtaattgtggcgtttatcggcttcagaatgcttttcccgcagcagaaggcgcatgagtcgccggaagcgaaaagcaaatcggaggagctggcagacgaaccgacggccaatattgcgtttgttccactggctatgccaagcaccgcaggaccggggaccatcgcaatgatcatcagttccgcttccacggtgcgtcatggcggcgagtttcccgactgggtcattatggtcgcgccgccgattatttttcttgccgtggcggtgatcctgtggggatgcttacgcagttctggcgctattatgcggctggtgggtaaaggggggattgaagcgatctcccgcttaatgggattcctgctggtgtgtatgggcgtgcaatttattatcaacggcgtgttggaaattattaaaacgtaccac

SEQ ID NO: 37130 - DNA, 327 bp, Salmonella paratyphi A
gtggagggtaaaagtatgaaaagtaagttgctgccttgcgcgctgttgcttgcaaccagttttgcatgggccgcccccgcgacaacgggcattgatcaatatgagttaaaaagctttatcgccgacttcacccacttcaagcccggcgataccgttccgcaaatgtaccgcaccgatgagtataatattaaacagtggaaattacgtaatctgcccgcgccagatgccggtactcactggacctatatgggcggcgcgtatgtactgattaacgataccgatggaaaaatcatcaaagcctatgatggcgagattttttatcatcga

SEQ ID NO: 37131 - DNA, 1719 bp, Salmonella paratyphi A
atgactcaagtcgcgaagaaaattctggtaacgtgcgcgctgccgtacgccaacggctctatccacctcggccatatgctggagcacatccaggctgatgtctgggtccgttaccagcgaatgcgcggccatgaggttaacttcatctgtgccgatgacgctcatggcacgccgatcatgctgaaagcgcagcagcttggtattacaccggagcaaatgatcggtgaaatgagccaggagcaccagaccgatttcgccggttttaatattagctacgacaactaccactcaacgcacagcgacgagaatcgcgagctgtccgagctgatttatacgcgcctgaaagagaacggttttattaagaaccgcaccatctctcaactctacgatccggaaaaaggcatgttcctgccggaccgatttgtgaaaggcacctgcccgaaatgtaaatccgcagaccagtacggcgataactgtgaagtgtgcggcgcgacctacagcccgaccgaacttatcgaaccgaaatccgtggtgtccggcgcgacgccggtaatgcgtgactccgagcactttttctttgacctgccgtcattcagcgaaatgttgcaggcgtggacccgcagcggcgcgctgcaggagcaggtggcgaacaaaatgcaggagtggtttgaatccggcctgcaacagtgggacatttcccgcgacgcgccgtattttggtttcgaaatcccgaacgcgccgggcaaatatttctacgtctggctggacgcgccgattggctatatgggctccttcaaaaatctgtgcgataagcgcggtgacacgaccagttttgatgagtactggaaaaaagactccgacgccgagctgtaccactttatcggcaaagacatcgtctatttccacagcctgttctggcctgccatgctggaaggcagccacttccgtaagccgaccaacctgttcgttcacggttacgtgacggtgaacggcgcgaagatgtctaagtctcgcggcacctttattaaggccagcacctggctgaaacactttgacgccgacagcctgcgctactactacaccgcgaagctttcttcacgtattgatgacatcgacctgaacctggaagactttgtccagcgcgtcaatgccgatatcgtcaataaagtagtcaacctggcctcgcgtaacgccggttttatcaataagcgtttcgacggcgtgctggcggctgaactggccgatccgcaattgtataaaacctttactgacgccgctgcggtgattggcgaagcatgggaaagccgtgaattcggcaaagctatccgtgaaattatggcgctggccgacgtcgctaaccgttatgttgacgagcaagcgccgtgggtggtggctaaacaggaaggccgagacgctgacctgcaggccatttgctcgatgggcatcaacctgttccgcgtgctgatgacttacctgaaaccggtactgccgacgctttctgaacgcgttgaagccttcctgaacagtgaactgaactgggatgccatcgaacagccgctgctcggtcacaaggtcaacacctttaaggcgctctacaatcgcatcgacatgaagcaagttgaagcgctggttgaagcgtctaaagaagaggtgaaagccgcagccgcgaccggttaccggcccgttagccgacttcccgattcaggaaaccatcacctt

SEQ ID NO: 37132 - DNA, 632 bp, Salmonella paratyphi A
aagagtatgaagatcgtggaagtcaaacacccactcgtcaaacacaagctgggtctgatgcgtgaaaacgacattagcactaaacgctttcgtgaactcgcctcagaagtaggcagcctgctgacgtatgaagcgacagccgacctggaaacggaaaaagtcaccatcgaaggctggaatggcccggtggaaatcgaccagatcaaaggtaaaaaaattaccgttgtgccgattctgcgcgcgggtctgggcatgatggaaggcgttctggaaaatgtaccgagcgcgcgtatcagcgtagtcgggatgtaccgtaacgaagagacgcttgagccagtaccttatttccagaaactggtatcgaacattgatgacgcatggcgctgatcgtcgacccgatgctggcgaccggcggttctgtcatcgcgaccatcgacctgctgaaaaaagcaggctgtagcagcattaaggtgctggtgctggtcgccgcgccggaaggcattgcggcgctggaaaaagcgcacccggacgttgaactgtacaccgcctctatcgatcaggggcttaacgagcacggatacattattccggggcttggcgatgccggcgataagatttttggtaccaaataa

SEQ ID NO: 37133 - DNA, 2200 bp, Salmonella paratyphi A
atgaagctgaataaaacttatataaatatcagagataaatggtggggactaccgctcatccttccttcgattttactacctgttttaagtagcgcaaatacttatgcgcttaccagcactggaaatgtggttcttttttacctgccgttagcttttatgcttagtctgatgctctttttcggctgggcagcactgccgggcattgtgcttgctatcttctggcgcagatacccgcagacagggctgtatgaaaccctttctgtgacgatgcactttatcattactatcgtgctaagctggggcggctatcgtgtcttttccccccggcgaaacaatgtttcccacggcgacgcccacctgttgtttcaacgaatgttctggcaggtattttgttcagcaacattatttctggtcatctaccagtttgccgcttttgttggcatgtacgaaagtaaagccagcctgatgggggtaatgccctttaatattaacacgctgattaattaccaggcgttactggtcggtaaccttgtcggcgtgccattgtgctattttattattcgtactctccgcaatccgctgcacctgcgggggtattatcagcaattaaagctacagattgatagcaaggccactaaaaaagagaacgttatttggctggctgtattgactacactaatgtttatactgtgtatgccattgacggataatagctcaatatttagtaccaactatacgctttcgttattattgccggtcatgctgtggggcgcgatgcgctatggttataagtttatttcaattatctgggccgtcgtgctaattacgtcgattcattattatcagcgttatatgccctggtattcaggttatgatacgcaattagcgattacctcttcgagctatctggttttttcttttattgttaattatatgtctgtactggccacgcgtcagcgcgtagtgagtggtcgcgcacggcggctggcctatcttgacccggttgtacatcttcccaatttacgtgcgttaaaccgcgcgcttaaaaatgcaccctggtctacgatctgttttttacacgtgccgggtctggagctattgggtaaaaattatggcgtcatgttacgcatccagtataagcaaaagctctctcactggattacgccgatgttggcctcaaatgagtgcgtctaccagatgtcagggcacgacctggtgctgcgtcttaatacagaggcgcatcagcagcgtattgaagcgctggataaacatattaagcagtttcggtttatctgggacggactgccgctacagccgcctgtcggcgtgagctactgctgcgtacgttctccggttagccacctttatcttctgctaggcgaattaagcaccagttccgatctttcgttgacgactaacgcgccggaggatttacagcggcgcggcgcaatgcacctgcagcgcgatttgaagggcagaattgcgatgatgaatcgcctgcaacaggcgttggagcacgatcattttttcctgatgcgcagcctatttttggtgttcgtggggacgtttaccatgaaatcttactgcgactcagggatgacaacggcgacgttatcaacccggacaattttttacccgtggcgcatgagtttggtttgtcttccgctatcgatctctgggtgattgaaaacacgctgcggtttatggcggccagccgggaatatatgcccgcgcatcgttttgccattaatctgtcgccaacatcggtatgccgcgcccgttttcctgcagaagttaagcagctcgtacgcaatatcagattgaaccctggcaactggtttttgaggtaacggaaagcaactctctcaccaatgctgagcaggcgcagttgacgctgggacagctacagcagtttggctgtcagatagcgattgatgatttcggtacgtacgccagctatgcgcggctgaaaaacgttgacgccgatattcttaaaattgacggcagttttattcgcaatatagtgtcaaacagtctcgattatcagattgtagcttctatttgtcatttagcgcgaatgaaaaatatgcaggttgtcgcggagtatgtcgagagcgaagaaatacgaagcgtagtgctctcgttgggaatcgactatcttcagggatatttaattggcgagccgcagctattatctgag

SEQ ID NO: 37134 - DNA, 4218 bp, Salmonella paratyphi A
tccgcactcgtcggtcttagcagtattatggtctctgcagatgcgctggccaatgcagggaacgataccggcagcggtgttacagtatcaggcacaacgggaagcgggtggattgcaattggtactgatgccacagccaatacttacaccaacgttgatgaagcgccgcaatgggttatcatgcctccgcaatggggaaatggagtaccgccattggttcatacagccagtccaccggcgactcttcgctagcgcttggcgtaaaatcgacttcagccggtgaccgggccattgcgatgggggcctcatcctcagccagtggaagttattcagcgtgtatgccaattcgagcggcgcaaaatcggttgcattaggttataaatctgtcgcgagcggagcaacttcctctgcattaggttatcaagctactgcgagcggcgacgacagcgctgcttttggtaatggcgcaaaagcggtaggcaccaactcagttgcccttggctcgggctctatcgcccaggaagacaattccgtcgccgtgggtaacagcaccactcagcggcagatcacctacgttgctaaaggcgacatcaattccaccagtaccgatgccgttacaggtgcgcaaatttattctttaagtcaatccgtcgccgatcgactcggcggaggggcttccgttaattctgatggtacagtgaatgcgcccctctacgaggtaggcacaggcatctacaataacgtaggcagtgcattaagcgcacttaacacttctatcactaatacagaggcctctgtcgcaggattagccgaagacgcgctgttgtgggatgacagcaccagcgcctttagctagccacacgggaaacgtcagcaaaatcaccaatctggcggcgggtaccctggctgctgacagcaccgacgccgttaacggctctcagttgtttgatacgaacgagaaagtggatcggaacaccgctgatatcgccaccaataccgacagcatcaaccaaaacactgccgatattaccgctaataccgacagcattaaccagaacacaaccgatatcgccgccaatacgaccagcatcaatcagaacaccactgatatcgccaccaacaccaccagtatcaacagtctgagcgactccgtcaccacgctcaccgacgatgccctgctatgggatgcagcctctgggcattcagcgctaagcacaacggaagcgacagcaagttaaccaatctggcggcgggtaccctggctgctgacagcaccgatgccgttaacggctctcagttgtttgatacaaatgagaaagtggataagaacactgctgatatcgccaccaataccgacagcatcaaccaaaacactgccgatattaccgctaataccgacagcattaaccagaacacaaccgatatcgccgccaatacgaccagcatcaatcagaacaccactgatattgccaccaacaccaccaatatcaacagtctgagcgactccgtcaccacgctcaccgatgatgccctgctttgggatgcagcctctgggcattcagcgctaagcacaacggaagcgccagcaaaatcaccaatctggcggcaggcaccctgaccgcggacagcaccgatgcggttaatggctcccagttgtttgatacgaacgagaaagtggatcagaacaccgctgatatcaccaccaataccaacagcatcaatcagaacaccactgatattgccaccaacactaccaatattaacaatctgagcgattctatcaccacgctcaccgatgatgccctgttgtgggatgcagcctctgcggcattcagcgctaaccacaacggaagcgacagcaaaatcaccaatcttagctctgacaacctgagctggaatgagacaacgagttcgttctctgccagccacggaagtagtacgacaaacaaaatcaccaacgttgctgccggagagctgtctgaagaaagtaccgacgcggttaacggatcgcagctgttcgaaaccaatgaaaaagtggatcagaacacgaccgatatcgccgccaataccaccaacatcactcagaacagcaccgcgattgagaacctgaatacttctgtctccgacattaatacgtccattaccggcctcactgataacgccctgttatgggacgaagacaccggcgctttcagcgcaaaccacggtggaagcaccagtaaaataaccaatgtcgccgccggggcgctttctgaggacagtacagacgcggtaaacggctcacagttgtatgaaaccaaccagaaggtggatcaaaacacctctgctatcgcggatatcaatacgtccatcaccaaccttggtaccgatgcactgagctgggatgacgaagagggtgcgttcagcgccagccacggtaccagcggtactaataagataaccaatgtagcagcaggtgaaatcgccagtgacagtactgacaccgttaatggctctcagctctatgaaactaacatgctgatttctcagtataatgaatctattagccaactagccggcgataccagcgaaacctatatcacggaaaatggtaccggcgtgaaatacatccgtacgaatgataacgggcttgaaggccaggatgcatacgcaacgggtaacggcgcaacggcagtaggttacgacgccgtcgcctctggcgctggcagtctggctcttggccaaaacagcagcagcagcattgagggcagtatcgctttgagcagtggctccacctctaaccgcgctattacaaccggtatacgagaaacgagcgcaacaagcgatggcgtggtgattggctacaatacaacagacagagagttgctgggcgcgttatcattggggacggatggagaaagctatcgtcaaattaccaacgttgctgacggctctgaagcgcaagatgcggtaacagttcgtcagttacaaaatgccattggtgcggtcactactacaccgaccaagtactaccacgcaaactcaacggaagaagattcactggctgtcggaactgactcactggcaatgggtgcgaagactatcgtcaatgctgatgcaggtattggtattggtctgaatacactggtgatggctgatgccatcaacgggattgctatcggttctaacgcacgcgccaaccatgcaaacagtattgcaatgggtaatggttctcagaccactcgcggcgcacagactgactacaccgcctacaacatggacacaccgcagaactctgtcggtgagttctctgtcggcagtgaagacggtcaacgtcagatcactaacgtcgcggcgggttcggcagataccgatgccgttaacgttggtcaattgaaagtaacggacgcgcaggtttccaggaatacccagagcattactaacctgaatactcaggtatcgaatctggatacccgcgtcaccaatatcgaaaacggcattggcgatatcgtcactaccggtagcaccaagtacttcaagaccaacaccgatggcgcagatgcaaatgcccagggtgtggacagcgtcgcgattggctctggctctattgctgccgctgaaaacagcgtggcgttaggcacaaattccgtcgcagatgaagctaatactgtgtctgtcggctcttctactcaacaacgccgtattaccaacgttgccgcaggggtgaataacactgacgcggttaatgtggctcaactgaaagcctcagaagcaggctccgtgcgttatgaaaccaatgcagatggctcggttaactatagcgtgctcaacctgggagacgggagtggcggcaccactcggatcggcaatgtttcagcggcggtgaatgatacggatgcggttaactatgcgcaattgaaacgcagcgtcgaagaagcaaacacctataccgaccaaaaaatgggtgaaatgaacagcaaaatcaaaggcgtagaaaacaagatgagcggcggtatcgcttcagcgatggcgatggccggtctgccacaagcctacgccccgggcgccaacatgacctcgattgctggcggtacgtttaatggtgaaagtgccgtcgccattagtgtctccatggtaagtgaaagcgggggctgggtgtataaattgcaaggaaccagcaacagccagggcgattactctgcggccattggcgcgggcttccagtggtaatgaagtaac

SEQ ID NO: 37135 - DNA, 579 bp, Salmonella paratyphi A
gcgcaggttagcctgcgcccaaataacagattgtcagatatgcagcaataatggaacaaacccaggcctttgaaaatcgtgtgcttgagcgtctgaatgctggcaaaaccgtacggagcttcctgattaccgccgtcgagttattgaccgaggcggtgaatattctggtgctccaggtgtttcgcaaagacgactatgccgtgaaatacgctgtggaaccgttgctggacggcgacgggcgctgggcgatctttcggtacgtctgaaacttatctatggccttggcgtactcagccgcaccgaatatgaagatgcggagctgttaatggcgctgcgcgaagagctgaatcacgacggcaatgagtacgcctttaccgacgatgaaatcctcgggccgtttggcgaactgcattgcgtcatggcgctgcgccaccgccgcattttgatacatccgacgcggcgctatacgccatgcaaattcagcgctaccagcaggcggtgcgttcgacgatggttctctctctgaccgagctgatttctaaaatcagcttaaaaaaggcctttcaaaagtaaatcccg

SEQ ID NO: 37136 - DNA, 1154 bp, Salmonella paratyphi A
atgaaagcattacattttggcgcaggtaatatcggtcgtggctttatcggcaaactgcctgctgacgcggggatacaactgacgtttgcggatgtaaatcaggtcgtactcgatgccctgaatgcccgtcatagctatcaggttcatgttgtgggtgcaaatgagcaggtggattacgtttccgcgtcaacgctgtcagcagcatcggcgatgatgttgtcgacctgattgcccacgttgatttaatcactactgccgtgggtccggttgtgcttgagcgtatcgctccggccatcgctaaagggctggtaaaacgtaaggcgcaggggtggatgccccgctgaacatcatcgcttgtgaaaacatggtacgcggcacaacgcagttgtaaaggccatgtgatgaatgccctaccggaagacgccaaagcatgggtagaagaacatgttggctttgtcgattccgccgttgaccgcatcgtgccgccttctgcgtcggcaaccaacgatccgctggaagtgacggtagaaaccttcagcgagtggatcgtcgataaaacccagtttaaaggcgcgttgccaaacattccggggatggagttaacggataacctgatggcatttgtcgaacgtaaactcttcacgctgaacacaggtcatgctataaccgcgtacctcggcaaattagccggtcaccaaaccattcgcgacgccattctcgatgagagtattcgcgcggtggtgaaaggcgcgatggaagaaagcggcgcggtgctgatcaaacgctacggttttgatgccgacaaacatgcggcatacattcagaaaatcctcggtcgttttgaaaacccgtatctgaaagatgacgtcgaacgcgtaggtcgtcagccgctacgcaaactcagcgcgggcgaccgtctgatcaaaccactgcttggcaccctggaatatggtctgccgcatgtgaatctggtcaaagggatcgcggcggcgatgcatttccgtagtgatgaagatccgcaggcgcaggagttggcggctctgattaccgaaaaaggcccgcagcgccgcgtggcgcaaatttccgggctggatgccaatagcgatgtggtggcggaggcggttaacgcatataacgcgaccaaatgacgcaga

SEQ ID NO: 37137 - DNA, 511 bp, Salmonella paratyphi A
atgaaactcatcggtagctacaccagcccttttgtgcgcaaaatctctgttctgctgctcgaaaaaggcatcaccttcgaatttattaatgaactaccctacgaggcggataacggcgtggcgcaatacaaccctctgggtaaggtgccagcgctggtgacggagaaaggggagtattggttcgattcgccgatcatcgcggaatatattgaactgctggatatcgcgccgtgacatcccgcgtgacccgatggcagcgttaaagttcgccgctcgaagcgttggctgacggattatggatcagcgttggtttctgtacgcgaacagcgctccggcgcgcaacaatcggaacgaactgctgcgcacgggaaaaatcaaccgcagctggatatgctcgaagtatctggcgacggacgtaaaacgatacgtcatctggcgcttcggatgctgtgcgtagctattcaactcgccggtcggcccgtggtgtgtagcgccccactggtcaatgtgg

SEQ ID NO: 37138 - DNA, 968 bp, Salmonella paratyphi A
atggataactttctggcgttgacgctaagcggcacgacaccacgggtgacgcaggggaagggcgcgggttttcgctggcgctggttaagccatggtctgcttgaactcacgcccgatgcgccggtcgaccgcgcgttaattctttctgcggggatacacggcaatgaaaccgcgccggtcgagatgctggataagctgctgtcggcgctgtattcaggcagcttgacgttaacgtggcgagtgctggtggtactcggcaatccgcaggcgctggcggcgggaatacgctattgtcacagcgatatgaaccgtatgtttggcgggcgttggcagtcctttgccgaaagcgatgaaacgcggcgggcgcgtgagctggagctcagtctggagaccttcttttcatctggccaggcgcgggtacgctggcatctggatctgcataccgccattcgtggctcgcatcatttgcgttttggcgtattgcgcagcgcgaccgcccgtgggagacaggttttctggcgtggctgggcgcggcaggactggaggcgttggtatttcatcaagcgcccggcggtacgtttacgcactttagctctgaacatttcggcgcgctttcctgtacgctggagttgggaaaggcgttgccgtttgggcaaaacgatctgacgcagttcagcgtaacctcgcaggcgttgtcggcgctgctgagcggtgtcgaaacgtcaacctgctcttcgcccggcacgctatcgggtggtgtcgcaaatcacgcgtcacagcgacaagttcgcgctttatatggatgcgcaaacgctgaattttactgcctttgcgaagggaacgttgctggccgaggagggggataagcgcgtgacggtgacgcatgacgttgaatatgttctctttcctaatccctctgtcgctgcggattgcgggctggattaatgctggaaagactgccctgataa

SEQ ID NO: 37139 - DNA, 480 bp, Salmonella paratyphi A
atgcgtaaactgactgctctatttgttgcctctaccctggcgatgggtgctgcgaatctcgctcatgccgctgagactaccaccgccgcgccagtgcgaagcaatgatgcagcataaaggtaaatttggcccacatcacgatatgatgtttaaaaacctgaacctgacggacgcacagaagcaacaaattcgcgacattatgaaagcgcacccgagcaaatgaaacgtccgccgctggaagagcgtcgcgccatgcatgatattatcgccagcgataccttcgataaagccaaagccgaagcgcaaattacgaaaatggaagcggcaaaggccaatatgctggcgcatatggaaacccagaataaaatttataacgttctgacgccggagcagaaaaagcaatataacgctaattttgagaagcgtctgacagaacgcccggcgcaagaaggtaaaatgcctgctgcggcagaataactt

SEQ ID NO: 37140 - DNA, 825 bp, Salmonella paratyphi A
atgactctgcagcaagagataatccaggcgcttggcgcgaaaccacatatcaaccctgaagaagaaattcgccgcagcgtggattttcttaaagcgtacctgaaaacctatccctttttgaaatcgctggtgttaggcatcagcggcgggcaggattcgacgctggccggtaaactcagccagatggctatcgccgaattgcgggaagagaccggtgataatgcgctgcagtttatcgccgttcgtctgccttatggcgtgcaggccgatgaacaggattgccaggacgccattgcttttattcagccggacagagtactcaccgtcaatattaaaggcgccgtcctcgccagcgaacaggcgctgcgcgaagcgggaattgagctgagcgattttgttcgcggcaatgaaaaagcgcgtgagcgaatgaaagcgcaatatagcatcgccggtatgactcacggcgttgtggtgggcaccgaccatgcggcggaagcgataaccgggttcttcaccaaatatggcgatggcggtaccgatattaacccgcttcatcgccttaacaaacgccagggcaaacagcttctcgcagcgctgggctgtcctgagcatctgtataaaaaagtccccaccgccgatttggaagacgaccgcccttcactgcctgatgaagccgcgctgggcgtaacgtatgacaatattgacgattacctggaaggcaaaacgctggactccgccatcgctaaaactatcgaaggctggtatgtaaaaactgaacataagcgccgtttgccgattacggtattcgacgacttttggaaaagg

SEQ ID NO: 37141 - DNA, 1356 bp, Salmonella paratyphi A
atgagtaatgttattgcttcacttgaaaaggtactccttccttttgctgtaaaaataggaaagcagccacacgttaatgcaatcaagaacggctttattcgtttaatgccattaacccttgcgggggcgatgtttgtattaattaataacgttttcctgagctttggggagggggcgtttttttattccatgggcattcggcttgatgcctcaaccattgaaacacttaatggattgaaaggcatcggcgggaacgtctataacggcacattgggcattatgtcgctcatggcgccattttttatcggcatggcgctggcggaagagcgcaaggttgatgcgctggccgccggactgctctccgtggcggcatttatgaccgtaacgccgtatagtgtcggcgaggcctatgccgtaggcgctaactggctgggcggcgcgaatattatctccggtattattattggcctggtggtcgcggagatgtttacatttattgtccggcgcaactgggtgattaaactaccggacagcgtaccggcttcggtgtctcgttcattctcagcattaattcccggctttattattctctctattatggggattattgcctgggcgctgtctaattacggttctaacttccatcagattattatggacactatctctacgccgctggcatcgctgggtagcgtggtagggtgggcatatgtcatttttgtaccgctgctgtggttctttggtattcatggttcgctggcgctgaccgcgctggacagcggcatcatgacgccctgggcgctggaaaacatctctatttaccagcagtatggctccgtcgatgcggcgctggaagccggtaaaacgttccatatctgggcgaaaccgatgctggattcttatatcttcctcggtggtagcggcgcaacgctgggtctgatcatcgctatcttcctggcatcccgtcgcgcggactatcgccaggtggcaaaactggcgctgccgtcaggtatcttccagattaacgaacccatcctgtttggcctgccgattattatgaacccggtgatgtttatccccttcattctggttcagccgattctggcggcgattacgctggtggcttactatttgggtattattccgccgattaccaatattgcgccgtggaccatgccaaccgggctgggggcgttctttaacaccaacggcagtgtcgccgcgttgctggttgcgctatttaacctggcggtcgctaccctgatttatctccccttcgtggtggtggctaacaaagcgcagaacgccatcgagcaggaagaaagcgaagaagatatcgctaacgcactgaaattc

SEQ ID NO: 37142 - DNA, 345 bp, Salmonella paratyphi A
atgtttgatcttgaaaatgttgtagataaccagacagcggctgaggaactcgaagaagtcgttatggggcttatcatcaattctggtcaggcgcgcagcctggcatatggcgcgctcagaaaagcgaaagaaggcgattttgaggcggcgaaagcgatgatggaccagtcgcgcatagcgctcaatgaagcgcatcttgtgcagacaaaactcatcgaaggcgatcagggcgaaggcaaaatgaaagtcagtctggtcctggttcacgctcaggatcatttgatgacatcaatgctggctcgtgaactgatcgccgagttgattgagctccatgagaaactgaaa

SEQ ID NO: 37143 - DNA, 1449 bp, Salmonella paratyphi A
  misc_feature (938)..(938): n=g, a, t or c
  misc_feature (1070)..(1070): n=g, a, t or c
atgagtcactcatccgccccggaaagggcaactggcgctgttatcacggaatggcgtccggaagatccggcattctggcagcagcgcggccatcgtgtcgccagccgtaatttgtggatttctgtcccgtgtttactgctggcgttttgcgtctggatgctattcagcgcagtggcggtgaacctgccgaaagtgggatttaattttacgaccgatcagctctttatgttgactgcgctgccatctgtttccggcgcgctgctacgggtgccttactcctttatggtgccgctatttggcggacgtcgctggacagcgttcagtaccggtatcctcatcgtgccctgcgtatggttaggctttgccctcaggataccagtacgccatttagcactttcattattatttccttgctgtgtggttttgccggcgcgaactttgcctccagtatggcgaacatcagctttttctttcctaaacaaaagcagggcggcgcgctgggtctgaacggtggtctgggcaatatgggcgtgagtgtgatgcagctggttgcgccgctggtggtttcgctctctatctttgccgcctttggcagccacggtgtagagcagccggacggttctcagctctatctggcgaacgcagcctggatttgggtgcctttcctggccatttttacgctggcggcgtggttcggcatgaacgaactggcgacgtctaaggcctcgctaaaagagcaactgccggtgctcaaacgtggtcacctgtggatcatgagtctgctgtatctggcgacttcggatcgtttatcggtttctccgcggggggtggcctaatgtctgtctaaaaaaggacatttcccggaatggggcagaaacctggaaataaagcgtttttttcggttccgctttaatcgggggcgccgggcggtttcccgncagggcggcgacaaattctggaaccccttctgggggggggaaactcgcgtcaagcttaaacaaacatttggcccggaaaggggcatatttcacgacgggtccggtcggtcccgggaaaattacctaactggnccggcctttgcgcggaggcctttaacccccatctaaggggtaaattttgggccattaatcccgaaccgcggggctggggagtggttctaccttccagatgatctctgttatcttccgtaaactgacaatggaccgggttaaagcggaaggcgggtcggacgaaagagccatgcgtgaagcggcgaccgatacggcggcggcgctgggctttatttccgcgattggcgcgattggcggcttttttattccgaaagcgtttggttcatctttagccttaaccggttctccagtcggcgcgatgaaagtctttcttattttctatatcgcctgcgtcgttattacctgggcggtatatggacgtcattctaaaaataaaaag

SEQ ID NO: 37144 - DNA, 391 bp, Salmonella paratyphi A
atgacaattgcaatgttgctcacgcttcatcttatttgtgttgcgctctccgtcagtttgtttgtcgctcgttactggtggcgctattgcgccatgcgttggccgcgcgcgctggacacgaatcgtgcctcccgtcatagataccctgttactgcttagcggtattgggttaatcgttaaaacgcacatcctgccattcacggagtcgggctcatggctgactgaaaaactgtttggcgttatcatctacatcgttttgggttttattgcgcttgattatcgtcaggcgcgcagccagcaggcgcgttttatcgctttcccgctggcgctggtggtgctgtacatcatcattaaactcgccaccacaaaaataccgttactggggtaagtc

SEQ ID NO: 37145 - DNA, 848 bp, Salmonella paratyphi A
atgaaacaaaaagtggttaacattggcgacattaaggtggcaaatgacctgccgtttgtgctgtttggcggtatgaacgtgctggagtcacgcgatctggcaatgcgcatttgtgagcactacgtaaccgttacccagaagctgggtattccttacgtgttcaaggcctcttttgataaagccaaccgttcctctattcactcttaccgtgggccgggtctggaagaagggatgaaaatcttccaggaactcaaacagacatttggcgtaaaagtgatcactgacgtccatgaagccagccaggtgcagcctgtggctgatgtggttgacgtgattcagctcccggcgtttctggcgcgccagaccgacctggtggaagcgatggcgaaaaccggcgctgtgattaacgtgaaaaagccgcagttcgtaagcccgggtcagatgggcaatatcgtggataagttccatgagggcggtaacgataaggtgattctgtgcgaccgcggcgcgaacttcggttatgacaacctggtggtggatatgctgggctttagcgtgatgaaaaaggtctccggcaactcgccggtgattttcgacgttacccatgcgctgcaatgccgcgacccatttggcgccgctctggcggtcgtcgtggtcaggtgaccgagctggcgcgcgctggtatggctgtcggtctggcgggcctgttcctggagtcgcatccggacccggctaacgcgaagtgcgacggtccttccgcgctgccgctggcgaaactggagcagttcctgacccagataaaagcaattgatgatttggtgaaaagcttcgacgagctggataccgag

SEQ ID NO: 37146 - DNA, 1798 bp, Salmonella paratyphi A
atgtttaaacggtgtttctctcctcttacgctggttaaccaactggcgctgattgtcatgctctctaccgctatcggcgtggcggggatggcggtttccggctggctggttcagggcgtacagggtagcgctcatgcgattaataaagcgggctcattgcgtatgcaaagctatcgactactggcagctgtcccgctggatgctaaagatcaaaagctgctggatgagatggagcaaacggcattcagcccggaactgacccgcgccgctgagcgagacgggcagcaaaagcagcttaaagcgttgcaggattactggcataacgaactctcgccaggactacagcacgcgcaaaaacggcacgcggtcgcagaagatgtcacgcgctttgtggcgggcctggatcgcctggtgacgtcgttcgaccatactactgaattgcgtatcgaacgcgtggtattagttcaccgggtaatggcgatctttatggcgctattgctggtatttacgattatctggctacgtgttcgccttttgcagccctggaaacagttattatcaatggcgcgcgccgtcagtcagcgcgactttacccaacgtgccaatatcagtggacgcaatgagatggccgcgttgggttctgcgctcaataatatgtctgaagagctggccgaaagttatgcggtactggaacagcgcgtacaggaaaaaacagccggtctggaacataaaaaccagattctctcgtttttgtggcaagccaaccgccgactgcattcacaggctccgctatgtgagcgtctttcaccggtactgaatggcctgcaaaatttaacccagttgcatgatattgagctgcgagtctatgacctggaagatgaagataatcaccaggaatttacctgtcagtcggacatcagttgcgatgataaaggctgccacctttgcccacgtagcgccctgccgatgattaacggcggcaccaccttaaaatggcggctcaccgactctcacacccaatacggtattttgctggcgacgctgccctacggacgccatctcagccacgatcagcaacagttggtggacacgctggttgaacagcttaccgcgactctggcgctcgacaggcatcaggagcgccagcagcagttgattgtcatggaagagcgtgccaccattgcccgcgaactgcatgattctattgcccagtcgctctcttgtatgaagatgcaggtgagctgcctgcaaatgcagggcgacgtgttaccggaaagcagccgtgagttactcagccaaattcgcaatgagctgaactgctcctgggcgcaactgcgcgaactgttaaccactttccgcttacagttgacggaacccgggctacgtccggcgctggaagcaagctgccaggagttcagcgcccggtttggctttacggtaaaactggattatcagcttcccccccgcctggtgccgtcacaccaggcgatacacctgttgcaaattgccagggaagccctcagcaacgcccttaaacactctcatgccgacgatgtggtggtgacagtgacgcaatgtggcaaacaggtcaaactaaaagtgcaggataatggctgcggcgtcccggaaaacgccgaacgcagtaatcactacggcatgatcatcatgcgcgatcgggcgaaagtttgcgcggcgattgccaggtacccgacgcgagactggcggaacagaggtcactgttacttttattccagaaacaaacttcacagaaacccagggagatacccatgaataatca

SEQ ID NO: 37147 - DNA, 978 bp, Salmonella paratyphi A
atggagctaaaaaacgtagttatttattcacctgaaaaaaagccagtcggtgatgcttttctgtatttttgcagcgaagacggaaaagacttttatgattcgctggataagttcacgaaaaaatacaagctgtgcattgacccggatacaggtattgtccgttctgtagccgaagatgtgtcgcgcctttatccggcaggttttacggtagttgagaccgatgtactgccagacggatttgatatttatgggggatggcgtttcattaacgggaaggtaaaacccgtaccggttgattatcaggcgaaagcagaagaaacgcggaaaaaattacttaatgatgcagataacagaatcagggactggcgtacagaattaacgctgggaactatcagtgatgaaaataaagcggttttgattctgtggatgaattatatcaatacgcttaaatcactggatatcagcaatgtaacaactgaggcgaaatataaggccattaaatggcggagtaccggatgtggcgtgaagcgcgtctggcttttacggattccctggctgcgctggattgttccgtcgttccggcgcatccgtggattcacggtctgggggcagcagaccgataacggggcatacctgagtccggtcaatgcaatccattatctggcggaaaggctggccggaacgggaggcaataccgatgtggtgatcatgatggtaacgggacagacccatgaaaacttcatgaaggggcttaacagcctggtggatgttttccccgcgcccgcattcacccaggttagacgtctggctgagtctgcggcgacactggctactgagaaaatgcagatccccgcgaaagccgggcaggactgccggttgccattccgctgtccgttccgaccagcagggcagccttatccgctgccgctatcagtgaggcgcagaaagcggctggcgccggattcagcctggacgggc

SEQ ID NO: 37148 - DNA, 938 bp, Salmonella paratyphi A
atgaaaaaacatgctattgcagtaatgatgatcgccgtattttctgagtcggtttatgcggagtctaccttatttattccggacgtctctcctgagagcgtcacgacatccctttctgtgggggtgttaaacggtaaatccagggagctggtttatgataccgacaccggacggaagctgagtcaactggactggaaaataaaaaatgtcgccacgttgcagggggatttatcatggaaaccctattcgttcatgacgctggacgcccgcggctggacgtctttggcgtcgggatcgggtcatatggttgaccatgactggatgagcagtgagcagccaggctggaccgatcgttcaattcatccggacaccagcgccaactatgctaatgaatacgatttgaacgtgaaaggttggttattgcagggcgataactacaaggcgggcgtaacagcgggctatcaggaaacccgttttagctggacggcaagaggcgggtcttatatttatgataatggtcgatatattggtaactttcctcatggcgtgcgcggtataggttatagccagcgtttcgaaatgccctatatcgggctggcgggtgattatcgtattaatgactttgagtgtaatgtactgtttaaatacagcgactgggtaaatgcgcatgataatgacgaacactacatgcgaaaacttaccttccgtgaaaaaacggaaaattcacgatattatggcgcgtctattgacgccggatattatattaccagtaatgcaaaaatctttgctgagttcgcttacagtaaatatgaagaaggtaagggcggtacgcaaatcatagataaaaccagcggtaatacggcgtattttggtggcgatgcgcaggtatagctaataataactatacggttaccgcggggttgcagtaccgcttctag

SEQ ID NO: 37149 - DNA, 600 bp, Salmonella paratyphi A
aactacgcgctgacctaccgctcggaagtcaaaattgactttaaaggcaactacagtagcgatcttcccatcgctataaaccaatttaatctgcctatcccaacggcaaccggcggcgcgacgcagtcaggctacctgacgctgaatctgccggaaatgtgggaagtgtccggttataaccgtgtggcgccacagtgggccatccactatagcctggcctataccagctggagtcagttccaggaattgaaggcaaaatcgaccgctggcgatacgctctttgagaagcatgaaggctttaaagacgcttatcgcattgcgttaggtaccacctattactacgatgacaactggacgttccgtaccggtatcgccttcgatgacagcccggtaccagcgcaaaaccgttctatctctattccggaccaggaccgtttctggctgagcgccggtacgacttacgcctttaacaaagatgcgtctgtcgacgttggcgtctcttatatgcatggtcagagcgtgaaaattaatgaaggcccttatcagtttgaatctgaagggaaagcctggctgttcggtactaactttaactacgcgttc

SEQ ID NO: 37150 - DNA, 639 bp, Salmonella paratyphi A
atgtacaacttcaactttaatgtgctggacccgtatgttgttcggccggtcgcggtcgcctggcgtgattatgttccacagcctgcgcgtaacggtttaagtaatttcaccggcaacctcgaagaaccggcgatcatggtgaactatttcctgcagggcgatccttatcagggtatggtgcatttcacccgtttcttcctgaataccttattagggatgggcggctttattgacgtcgcgggaatggcgaatcctaagctgcagcgcgttgaaccgcatcgctttggcagtacgctgggccattatggcgtggggtatgggccttatatgcaacttccgttctacgtcagcttcacgctgcgtgaagatggcggggatatggcggataccttgtatccggtgctctcgtggttgacctggccaatgtccataggaaaatggactatcgaagggatagaaacccgcgcgcagttgctggactccgatggtttgctgcgccagtcttccgatccttatattatggtgcgcgaggcgtacttccagcgtcatgactttatcgccaatggcggaaaactcaagccgcaggaaaacccgaacgcacaggcgattcaggacgaactcaaagagatcgactcggaa

SEQ ID NO: 37151 - DNA, 1920 bp, Salmonella paratyphi A
ttggaacacttaaaatacagacctgatatagatggattacgcgcaatagcggttttatctgtggtaatattccattatttcccatcattattgccgggtgggtttgttggagtagatatattctttgtgatatctggataccttataacatcaataatattaaaatctgcatcaaacaaatcattttcataccttgatttctataaaaggagagtgcttagaatatttccagcattatccatagttcttgtatcatgtcttattgttggttggatttatttattccaggatgattacaaattacttggtaagcatgtttttagtggctcattctttatatcaaactttactctttggagtgagtctggctattttgattcaaaatcataccttaaacctttactacatttgtggtcgctgggaattgaagagcaattttatataatatggccagtagttatattgctatgctttagaagcaaaaaccataacagaaacatagtattatcatgcgcaactatatttataattagctatgcgattagcatttttacaatggcatctgatggcggagctaattactactctcccgcatcaagattttgggagttaatggctggagcgattatatccacattgagatttataggaataacaacttcgttatcaaaattaatgtccctgttaggaattatactaatcgcattatcaataaccatgatagatgaaaagatgtcatttcctggatatatagcaataatcccagtacttggcgcctctcttataatagcatctaatggtaatgatttagttgtgtcgaaattgcttagtgttaggcctgttgttttctttggtcttattagctatcctctttatttgtggcattggcctatttattcattctatcgttcaatatttgctggttcaccagactaccatgaattaactcttcttttattattatcgttctttttggcgatattaacttattatttaattgaaaaaccactgagaaattccagaagtaaatatatcacagcaatattattaacattatctgtatttgggacgggtttaattggcgcatttatttttcatataaatggagttaaagacagggaaatcaataaatcagcaggtgaatatgcttctgttactgacgtgtacaattattataaatatggagaactactccgtggagggatatgtcactcagtacaacttactgctgccatatccaatggatgtataaaaaatggcaagcataatatatttatcattggtgattcttatgcggcggctcttttcaatgggctttctcattatatagataataaaggttctgattatataataagccaaatgacagatggtaatgctcctcctctatttgttgacggtaaagatgatttacagagaagtgtcatcactctaaacaataatagaattaatgaaattaaacgtgttcagcctgaggtggttctgctgacatggtcagttcgaggaacaaatggagtacatgataaaaagttagcaattgatgcgttatcattaaccattaaaaaaattaaagaggcatcccctgactcaaggattattttcattggaccagtcccggaatggaatgcaaacttagttaaaataatatctaactacctgagtgagtttaaaaaaactccaccattgtatatgacatatggattaaatagtgaaataagcgagtgggactcttactttagtaacaatgttccaaaaatgggaattgaatatatatcagcatacaaagcattatgtaacgaaagtggatgtcttacaagagttggtaatggtcctgattttatcactgccgttgattggggacatttaacaaagcctggttctgatttcctttttaataaaattggaaataaaataatcaaa

SEQ ID NO: 37152 - DNA, 769 bp, Salmonella paratyphi A
ctgcgtattttgcgtcgactacagtcgccccgccaccgtctccaggatgcgatagacaatcgcgaaattaacgtacactatcagcctattgtctccctgagcagcggaaaaattgtcggtgccgaagccttagctcgctggcaacaggcggacggcaccttcctttcgccggaaatttttatcgcgctggctgaacaaaccgggctcacggaccgctaacccggctaatcatcgaaaccgtttttgaagacatggggagttggttaaagtcccatcccgaacaacatatttcaatcaatcttgaggcatccgatctggcgtcggaaacgttgccgacgctgttaagcacgctgctgaaccgtagccaaatttctccgtcgcaaatcgcgcttgaattaacggaacgcgagttcgccgatccgaaaaccagcgcgcccattgtcgccagataccgtaacgcgggacatgcaatttatattgatgactttggcaccggctattccagcctcagctacttacaaaatctggatgtggatgtccttaaaattgataaatcttttgtcgatgcgctggaatataaaaacgtcacgccgcatattattgaaatggcgaaaacgctcaaacttaagatggtcgcagaaggcatcgaaacgaccaggcaagaacagtggctacgcagcatggcgtacattatggtcagggctggttatacagtaagcccctacccgctacggcatttattctttgggcggaacagcggctataacgt

SEQ ID NO: 37153 - DNA, 573 bp, Salmonella paratyphi A
atgaaactcgtgcacatcgtaagtggtttagcggttgcgatatctctggcggcctgcgctgataaaagcgctgatatccagacgcctgcgccaaaccctaacatgtcgattacagctaaccagtctactattcagcaacccaatgtttccggtaccgtctggatccgccagaaggtcgctctgcgccagatgcggtgctgaccgtgacgctttcagatcgtcgctggctgatgcgccgtctaaggctgtcgcaaaaagcggtagcgtaccgaaggtaaacaggcgcctttcagttttgtgttgccgtttaacccatcagatattcaacctaacgcgcgcattctcctgagcgcggccatcaccgttgataataagctggtatttattaccgatagcgtgaaaccggtgattaataatggcggcactaaagcggatctgacgctggtaccggtacagcaaacggcggtgtctgtgcaggccggcggtggtgcgacgacgacggttccatcgacttcgccgacccaggtcaatccgtcttctgccgttcctgcgcctacccagtattaatcctgc

SEQ ID NO: 37154 - DNA, 1442 bp, Salmonella paratyphi A
acgcaaaccgactggagcggcgtgccagatctgtggtcgcagttgctgggcgggctgatgctcacgttattgttgttacgcccgatgacgctgatggggctggatgcacgcgttgcgcgtaatctgggtctggcgctgtcgttagcgcgtctggcggcgttgtcgctggcgattgtgttgagcgcgctgctggtcaacgcggtgggcattatcggttttatcggcctgtttgcgccgctgctggcgaaaatgcttggcgcaagagtctgctggcgcgctgatgctgcgccgctcattggggcgcttattttatggctatccgatcagattatcctttggctaacccgcgttatggatggaagtctccaccgggtcagtgacggcgttaatcggcgcgccgctgctcctgtggcgtgccgcggcttaaaagcatgagcgcgccggatatgaacgccagcgatcgtgtggcggcggagcgtcggcatgtcctcgcttttgccgttgccggtggggcgctcctgctgctggcaacatgggtcgcgctctcttttggtcgcgacggcacggctggacgtgggcgagcggaaccgtgcttgaagaactgatgccgtggcgctggccgcggatactggcggcgttaatggcgggcgtcatgctgtcggtggcgggctgcattattcagcgtctgaccggtaacccaatggccagcccggaagtgctggggatcagttccggagccgcgtttagcgtggtgttgatgctgtttttggtgccggggaatgctttcggttggctactgctgccggaagcctgggcgcggcggcgacactgctgattattatgatagccgccgggcgcggtttactcgccgaacggatgttgctggcggggatggcgctcagcactgcgtttaccatgctgctaatgatgctccaggcgagcggcgatccgcggatggcggatgtgttgacctggatctcaggatctacctataacgccactggcgggcaggttacgcgaaccgcgatcgtaatggtgattttgctggccattgtgccgttgtgtcgccgctggttaacgattttgccactggcggcgatggccgcgcgcggtgggcatggcgcttacgccgtcgcgtatcggctgctggcctggcagcgtgtttgacggcaaccgcgacgatgaccattgggccgctgagtttcgttggactgatggcgccgcatattgcgcggatgctcggttttcgccggacgatgccgcatatggtcatctcggcgctggcagggggcgttttactggtctttgccgactggtgcggcaggatggcgctatttccgtatcagatcccggcgggactgctttcaagctttattggcgcgccgtactttatctatttgctacgtaaacagagccggtaaaaaaaagctgtgccacattta

SEQ ID NO: 37155 - DNA, 752 bp, Salmonella paratyphi A
atgatgccattaaaacgttataacctggccgctgttttgctgcttttgctgggcggctacggtagcgcccaggctgccatcgcgcccgatcgcacccgcctggtgtttcgcggcgaagataaatcgataagcgtcgatctgaaaaacgccaacagcaaactgccctatctggcgcagtcctgggtggaagatgagaagggcgtcaaaatcacctcgcctttaatcgtcgtcccaccggtccagcgcattgagccgtcggcaatcggacaggtcaaaattcaggggatgccggcgctggcgtcgctccctaaggatcgggaaacccttttttattacaacgtgcgcgaaattccgccgcaaagcgacaagcccaatacactgcaaatcgccctgcaaacgcgcatcaaagttttttatcgcccgcaggcgctgtcgaaaatcgatatgcagcatccatggcaatacaaaatcacccttcagcgtcagggcaatggctatcaggtgagcaacacaaccggctactacgtggtgttaagtaacgccagtaaccgcatggacggcacaccagccagagctttagcccattagtgattgcaccaaaaagcaacgtgacgctgggaggggacgccagtgaattaggtcgctcgcctgtgctgacttacgtcaacgattatggcgcgcggttaccgctgatttttaactgtactggcaacagttgtgcggtagatgaagcaaaaagcagaaagtcgtaa

SEQ ID NO: 37156 - DNA, 2520 bp, Salmonella paratyphi A
tccgtggtgggtattattctgactgttggccaggggaatagctatgcggaagcgctcattcaatttaatacccgatttcttgatgttaaagatgatgccagcctggatctctcccgtttttcccgtaaaggctacattatgccggggagctataatctccaggtgttggtcaaccagagtcaaattgcccaggataatgttattacgtattccgttgataataacgatcctgataacacatatccctgtttaccgcctgaactggtatcactgctggggttaaaacctgaaatagcagataaaatgatctggataaatgccggtcagtgtctgcaaccagatcaactggaagggatggaaacccaaacggatttaagccagtcaacgctgacggtgattattccgcagcctatctggaatacagcgatgaagagtgggatcaccttcccgctgggatgaagggattcccggcgtattatttgactacaacgttaacagccagtgcgagcatgctgaacatgatgacggcgatgaatatgacatcagcggcaaggcatggtgggtgccaactcggcgcgtgggtttgcgcgcggactggcaggctaactatcgtcacgaaaatgacagcgaagatagagacaactttaggctccagttccgaacagaactgggactggagaccgctattacgcctgggggagattacccgagactgccgggcgcacgtaaacgctgggcgaaggatcgctggagtccgatattttcgatggctttaactatgttgggcggcagcctattcaccgacgatcagatgttaccgcctaatctgcgcggctacgccccggatatatcagggcgtggcgcgcaccaacgccaaagtcaccgtgacccagcgcgggcgggtgatttatgagtcgcaagtcccggctgggccgtttcgcattcaggatattaatgaaacggtatccggcgatctacacgtcaaaattgaagaacaaagcggtcaggtacaggaatatgacgtcagcaccgcctccattccgtttctgacccgtcccggccaggtgcgctacaagttggcagccgggcgaccgcaggactgggatcacaatatggaaggcggctttttcacctcagccgaagcctcctgggggatcgctaacggctggtcgctgtacgcggtgccatcggtgagtaggattatcaggcgctggcgttaggactggggcgcgatctggcgctgctgggcgcgttttccgtcgatgtcacccattcccgtgcgacgctgccagagggtagctacggcgacggcaccattcagggtaactcgttccgtgccacgtacgctaaagattttgatgatatagacagccgtctgacgtttgctggttatcgcttttccgaagaaaactacatgacgatggacgagtttatcgatacgcataatgacgataacgatcgtcagcgcaccggccatgataaagagatgtataccctgacgtacagccagaacttttcggcaataaacgttaacgcctatatcaactacacccatcgcacctactggaatcaacccaaccaggacagctataacctgacgctgtcgcactatttcgatgtcggtgaagtgcgcgggatcagtctgtcggtgaacggttttcgcaatgaatatgatgatgagcgagatgacggcgtgtacgtctcgctcagtattccgtggggcaacgatcgcacgctaagctacaacggctcctttagcgatgacaacaacagcaatcaggtcggctattacgagcgcattgacgatcgcaataactaccagattaatgcagggcgtgcggataacggcgcgactctcgacggctactaccgtcatcaagcgagctatgccgacattgacgtcagtgcgaactatcaggaaggcgactatacctccggcgggctgaacatccagggcggcgcgacgctgactgctaaaggcggggcgctgcaccgacccagcgtcaacggcggctcgcggctgctggtggatgtcggcgatgaagcgaacgtacccatctccggctacagcacgccagtatataccaacgtgtttggtaaagccgtcattgtcgacgtcaacgactactaccgcaaccaggtgaaaatcgacattacccagttgccggaagacgcggaagcaatcctctctgttgctcaggcgaccctgacggaaggggcaatcggttatcgccgcatggaggtgctcagcagtaaaaaagccatggccagtatccgcctgcgcgatggcggcacaccccccttcggtgcggaagtttacaacagccgccagcaacagttagggatcgtcggcgaaggcggcagcgtttatctgatcggcattaaccccggcgagcggttgcaggtgacatgggaaggtaaaacgcagtgtgaagcggcgttgccgatccgctgccgggcgatctgtttagcggcctgttgctgccgtgcatcggcgacgcttcatcacctgaggcaacg

SEQ ID NO: 37157 - DNA, 1465 bp, Salmonella paratyphi A
aaacagggtattgaagtcaacaacaacctgtgcgagcactttgcttattctcgtcaggaactgttccacttaatccgcgtggaaggtatcaaaacctttgaagaactgctggcgaaacacggtaaaggctacggctgcgaagtgtgtaagccgaccgtcggttcgctgctggcgtcgtgctggaacgaatacatcctcaagccgcagcacacgccgttgcaggataccaacgataacttcctggcgaatattcagaaagacggcacctactcggtgatcccgcgctcggcgggtggtgaaatcacgccggaaggtctggtggccgtgggtcgtatcgcccgcgagtttaacctctataccaaaatcaccggttctcagcgtatcggtctgttcggcgcgcaaaaagacgatctgccggaaatctggcgtcagttgattgaagcgggcttcgaaaccggtcacgcgtacgccaaagcgctgcgaatggcgaaaacctgcgtcggcagcacctggtgccgctacggcgtgggcgacagcgtcggtttcggcgtcgagctggaaaaccgctacaaaggcattcgtaccccgcacaaaatgaagttcggcgtctccggctgtacccgtgaatgtgcggaagcgcagggcaaagatgtcggcattatcgcgacagaaaaaggctggaacctgtacgtctgcggtaacggcggcatgaaaccgcgtcatgcggatctgctggcagccgatctcgatcgcgacacgctgatcaagtacctcgaccgctttatgatgttctacatccgtactgccgacaaactgacccgtaccgcgccgtggctggataatctggaaggcggcatcgagtatctgaaatcggtcatcatcgacgataagctgggcctgaacgaacatctggaagaagagatggcgcgcctgcgtgcagcggtggtctgcgagtggacggagaccgtcaacagcccagcggcgcaggttcgtttcaaacacttcatcaacagcgacaaacgcgacccaactgtccaggttgtgcctgaacgcgaacagcatcgtccggccacgccgtatgaacgcatcccggtcactctggtggaggaaaacgcatgagccagtggcaaaacatctgcaaaattgatgacatcctgccgggaaccggcgtctgcgcgctgtcaggcggcgagcaggtggcgattttccgtccttaccatagcgatcaggtgtttgcgatcagcaacatcgacccgttctttgaggccagtgtgctgtctcgtgggctgattgcggaacaccagggcgaactgtgggtcgccagcccgttgaaaaagcagcgttccgcctgagcgatggtttatgcatggaagatgagcagttttctgtgaaacattacgacgcgcgggtaaaagacggcgtggtgcagttgcgcggttaattatttttgggaggcgcaacgcct

SEQ ID NO: 37158 - DNA, 1375 bp, Salmonella paratyphi A
gtggaccatttgcctatattttgtcaattacgcgaccgcgactgtctgatcgtcggcggtggcgatgtcgcagaacgcaaagcacggttactgctggaagcaggcgcacgtttaacggtcaatgcgctgaactttattccacagttcaccgtatgggcaaatgaaggcatgttgactctggttgaggggccgttcgacgaaacgcttctcgactcgtgttggctggcgatcgcggccactgacgacgataccgtcaaccagcgtgtcagcgacgcggcggagtcacgccgtatcttctgcaacgtggtggatgcgccgaaagccgccagctttatcatgccctccattattgaccgctcgccgctgatggtcgccgtctcctcgggcggcacttccccggtgctggcgcgtctgctgcgcgagaagctggaatcgctgctgccgcagcatctggggcaggtcgcgcgctatgccgggcaactccgcgcccgggtgaaaaagcagtttgccaccatgggcgaacgtcgtcgcttctgggaaaaatttttcgtcaatgaccggctggcgcagtcgctggcgaatgccgatgagaaagcggttaacgcgacaaccgaacgcctgtttagcgaaccgctggatcaccgtggcgaagtcgtgctggtcggcgccgggccgggcgatgccgggctgttacgctgaaaggattacaacaaatccaacaggcggatatcgtggtttacgatcgcctcgtttccgacgacattatgaacctagtacgccgcgatgccgatcgggtctttgtggggaaacgcgcgggttaccactgcgtcccacaagaggaaatcaaccagatcctgctgcgtgaagcgcaaaaaggtaaacgcgtggtacgcctgaaaggcggcgatccctttatctttggtcgcggcggcgaagagctggaaacgctgtgtcatgccggtattcctttctcagtagtaccggggattaccgcggcttccggctgtccgcctactccggtattccgctaacccatcgcgattacgcacagagcgtacgtctggtcacgggtcacctgaaaaccggcggcgagctggactgggaaaacctggcggcagaaaaacagacgctggtgttctacatggggctgaatcaggcagcgactatccaggaaaaactgatcgcattcggtatgcaggccgatatgccggttgcgctggtagaaaacggtacctccgtgaagcaacgcgtcgtccacggtgctgtgacgcagctcggtgaattagcgcaacaggttgaaagcccggcgctgattatcgttggtcgcgtggtagccttacgcgataaattaaattggttctctaatcattaatta

SEQ ID NO: 37159 - DNA, 1293 bp, Salmonella paratyphi A
  misc_feature (218)..(218): n=g, a, t or c
atgcaaaagaaaaaacttatttctatcgctatcgctttaacgctgcaaagttattacattccggccatcgccgcagagaataacgatgatgaaaaagaatgtcccagtaatatcgcctccctgcctaaagaaaaacgcgcaaaactctcaccgacctgccttgctacattacctgaaaatgataatcactggggctggattgctggcggcgttccgcnctggtcgcgggtgtggctattggcgttgaaaataacggtggcggagattctactcattcttatattcccctacgcccgacgatggcgcaacgttaccccgccgacgatggcgcaatgtcacgcgcctgacgatggcagcgatgacaatgtgaccccgccgacgatagtggcgatgacgatgtgaccccgccgatgatagcggcgatgacgatgtaaccccgcccgacgatagcggcgatgacgatgtacccccgcccgaatgatagctgcgatgacgatgtacccccgctcgatgatagcggcgatgacgatgtaaccccgcccgatgatagcggcgatgacgatgtgaccccgcccgacgatagcggcgatgacgatgtgaccccgcccgatgatagcggcgatgacgatgtgaccccgcccgatgatagcggcgatgacgatgtaaccccgcccgatgatagcggcgatgacgatgtgaccccgcccgacgatagcggcgatgacgatgtgaccccgcccgatgacgacgacacgcccccggatgactctgttataaccttcagcaacggcgtcaccatcgataaaggcaaagacaccctggccttcgatagcttcaaactggatagcggcagcgttctcgagggtgccgtgtggaattattcagaacagaacaaccagtggcagctcaccaccctggacggcaaaacgctgaacgtcaccggctgggacgtgaccgacgccaatgccgccgtgattgaaggcacccaggaaaatggtctctactggaagtacgacagccggggctatctgatccttgccgacgataaaaccaccgttatcagcggcgatgaccaggcgcatacctccgatcgcggcatggatatcagcggtcaggatcgcaccggcgtgattatttccggcgatcgaaccgtcaacacgctcaccgggggttccagtgtgaccgacggcgccatcggcatggtgatcactggcgatggcaccaccaacaccatttcaggccactcaacgatggacaacgccaccggcgcgctgatttccggtaacgaaccac

SEQ ID NO: 37160 - DNA, 800 bp, Salmonella paratyphi A
atgaccatcaccgatggcggcaccggtgctcacatcaccggcgataacgcggttatcgataacgccggggacaccaccgtcagcggcacgggctcaacggcgctgtatatcgacggcgacaatgcgctcattatcaatgaaggtaatcagactatttccggcggcgccattggtacgcgaattgacggcaacgacgcccgtatcgccaataccggcgatatcgccgtcgatggcgcaggctctgcggcggcgattattaatggcgacaatagcagcctgacccaggcgggcgatctgctggtcaccggcggcgcgatgggcatcatcacctacggcaccggaaatgaggcaaaaaataccggcaacgccaccgtgcgtgatgcagactcagtggggtttgtggtcgcaggcgaacaaaacaccttcaaaaacaaggggaatattaacatcagccttaacggcaccggcgcgctggtgagcggcaatgcgtcgcaggcgacgctggatggcgatattaatgtcaccgcaacagaggacggggataacgtttatcgtggcgcgacgggcctcgacatgacggggaataacaacacgctgaatattatcggcagcgtcacggtcaacggcgactatgacaaagacagcgtgatggccggcagcagcgatacccttatggggatgtctatcagcggcagcaataatgcggtggacctgagcggcacgctcaatattaacgtcagcgatatgagtaacgtgaacgaacaatatctgaataccgttggccttgatgtggcaggtga

SEQ ID NO: 37161 - DNA, 2542 bp, Salmonella paratyphi A
aacagcggcaagattaccgcgtatgccacaacagggacgtccagccgtaatgcgatagccgcggctaacggccagggttccaccgttaataatgaagcggaagggacaatcaccttagtttcatcattaactccgttttcaaataccggcgcgggcaacttcccactaatctggtacaaaaataccctgtacgccatgctggcagaggactacggcgaggtgagtaacgacgccggcgccaccatatatttgcagggcgcaggggtatacggcgtatccgccagcaaaggcacggcgctcaacgctggtgatatctacctagacggctttgtcccgacgctggatgatgaaaataacatcaccgacaaaacttactggacgccaccgaaactttatgtcaccagcgccgcgatggtcgcaggcaccaccgacagcggttatggcgatgccaccgccaccaacaccggcaccattaacgtcaataacgccgggttcggcatgatggcgcttaacggcggtaccgccattaaccagggggtaattaatctgaccgctgatgcgggcgttgaagggaccgacccgaatcaactggtaggcatggcggcgctcaacggcggaaccgttgtcaacgataccacaggcaaaatcaatatttatgccgattacggcaagcctttcctgaccgacggcaatagcctgattgttaactacggcaccgtctgttttggcgacgattgccaggacagcgacgagtacaatccaacaaacagtgacgtttctatcccttacacagacggcgctactcttgccgataccggaaccagcacaacacttgataataaagcagttgtgaccggagacgttaataacgccggagtggtcggcggcgagtccattaccgtcctggatagcggcacgctgaccaacaacgacagcggcgttatcaatagcaacaccacggtatccggcaaccttgtcaatgacggcgtcataaacggtacgtgacgcaaaatggcggcgatatcgttaataatggcaccattgacagccgtagcctgacgaccaacggcgtattaactaacggcacggatggcaccatgacttccggcgcaaaagtgactggcgctaacagtgcaatcattaacgacggcacgttctatcttgcgtccgcgactgacgctaaaaatgcgtccatgctggaaatcaatgatttcgcgcaattctttaataccggtacgttaatccttgataacaacaaaaatgccattcacctgaatgcgaataacggaacgctgtacaacaccgggacgatggagctcacggcaacctccaataagggcgcgattaactattggggcgcgggagcggcatttatcaatgacggtacggtaaatgccactactgcggcactggcttatgctggcggtgcgcaggtagcgctccggaaaaacacgctttcttctggaaccagtcaaacggcgtaatcaattacgatgcagataatggccgcgccgtcgatttctccgcctataacaattacgtggcggtcaacgacggcaccatgaatatcagcggtaataacgcttacggcatgtatggcggcaagaatgcgcaactggtcaataacaatacgatcaatttaggtactgaaggcaccaccgcacaccggcatggtcgcgatgggctggataaaaatgccaccgctgatgctgtcattgagaacaacggcaccattaatatttacgctaataactcttacgcgtttagctggcgggtgcgggacatgtggttaataacgggacggtagtcattgccgatggcgtaacgggttccggtattattaaacagggtgacagcgttaacgtcgaagggacaaacggtaataacggcaacagcgacgaggcgcattatgccgactatacgttgccgggaacgcctgttgaacccggcagcaacacgacctccggctccgcgccgggatcatcgtccgggcgtccaacgacctgaacggttacgtggttggtaccagcgccgacggtagcgctggtaagcttaaggtcagcaacgccagcatggaaggcgtgggtatcaataccggcttcacgcgcagcaccgcgatcaccaccgtcagctttgacaacgtggtggagggcagcaacctcaccgacgcttccgctatccagtccaccagcgtggtgtggaacgcccagggcagtcaggacagcgacggcaacgttgacgtcaccatgaccaaaaacgcctacgccgatgtggcaaccgacggtagcgtgtctgacgtggcgcaggcgctggacgctgctacaccaacaacgagctgtacaccagccttaacgtaggcaccaccgccgaactcaacagtgcgctgaaacaggtaagcggcagccaggccactacggtattccgtgaagcccgggtgttaagcaaccgcttcaacatgctggccgacgccgcgccgcagattaaagacggcctggcgtttaacgtggtggcgaaaggcgacccgcgcgccgagctgggcaac

SEQ ID NO: 37162 - DNA, 647 bp, Salmonella paratyphi A
aacattaacgccggcctgtttgattacccggtgttgatggcggcagacatcctgttgtaccaaaccaatctggtccggtaggcgaagatcagaagcagcatctggaactgagccgcgatatccccaaagttttaacgggctgtatggcgatattttcaaagtaccggaaccgtttattccaaaatccggcgcgcgagtgatgtcgctgctggagccgacaaagaaaatgtccaaatcggacgataaccgtaataacgtgatcggccctgctggaagatccgaaatcggtagtgaagaaaatcaaacgtgcggtcactgactccgacgagccgccggtagtgcgttatgatgtgaaagagaaagtgggtgtctctaacctgctggatatcctttccgccgtgaccggtcagagcattcctgaactggaaaaacagtttgaaggtaaaatgtatggccatttgaaaggcgaagtggcggaggcggtttccggaatgctgtctgagttgcaggagcgctatcaccgtttccgcaacgacgaagcgttcttgcagaaggtgatgaaagacggggcggaaaaagccagcgcacgtgcggccgaaacgctgaaagccgtttacgaagccattggttttgtggcgaaaccgtaa

SEQ ID NO: 37163 - DNA, 1088 bp, Salmonella paratyphi A
atggcgaaattgcgggtaggaatagtatttggcggtaagtcggcggaacatgaagtgtctttgcaatcagcgaaaaatatcgttgatgcgatcgataaaacccgcttcgacgtggtgctgttagggatagataaggcaggacaatggcatgttaacgatgcggaaaattatttgcagaatgcagacgatccggcacatatcgcgctacgtccttcggcaatcagtctggcccaggtgcctggcaaacatcaacaccaattgattaacgcccagaacgggcagccgctaccgacggtagatgttatttttcctatcgtccacggtacgctgggcgaagacggctcattgcaggggatgctgcgcgtcgcaaacttaccgtttgtcggttcagacgtgctgagctccgcagcctgcatggataaagacgtcgccaaacgactgctacgcgatgcaggactgaatatcgccccgtttattacactcacccgaacgaatcgtcacgcgtttagttttgccgaggttgaatcccgtctgggactgccgctgttcgttaagcccgccaatcagggctcttcggtcggcgtcagtaaagtcgctaacgaagcgcaatatcagcaggcggtcgcgctggctttcgaattcgatcataaagtggtggtggagcaagggatcaaagggcgcgagatcgaatgcgctgtattaggtaacgataacccacaggccagtacctgcggcgaaatcgtactgaatagcgaattttacgcctacgatactaagtatattgatgataacggcgcacaagttgtcgtgcctgcgcagctcccttccggggtgaatgacaagatccgcgcgatctaggcttatcagacgctgggatgcgcgggtatggcgcgtgtcgatgtcttcttaacggcagacaatgaggccgtgattaacgagatcaatacgctgccaggttttaccaatatcagtatgtatccaaaactctggcaggcgagcggactgggctataccgatttgatcagccgcctgattgagctggcgctggaacgccatgcgcgaataacgccttaaaaaccacgatgtaa

SEQ ID NO: 37164 - DNA, 1795 bp, Salmonella paratyphi A
tctgacaatatgtatcccgatagcctgcagggctacgcccacggtcagagggatcgcccggacggcggcaaagctgacgatacgacagaacgggtatgttatctaccaaaactatgtgtcgccgggcgcgtttgcgattaccgatcttaatcctacctcttccagcggcgaccttgaggtgacggtagatgaaaaagacggtagccaacaacgttacacggtgccttactctaccgttccgctattgcagcgtgagggcagggtgaagtatgacctggtggccggggattttcgcagcggcaatagtcagcagtcttcgccattctttttccagggaacggtgattgccggcctgcctgcggggctgacggcttacggcggtacgcaacttgccgatcgttaccgtgctgtggtggtcggggcggggcaaaatttgggtgactggggggccgtgtcggtcgatgtcacacatgcgcgtagcaactggcagatgacagcacccatcagggcaaatcgttgcgttttctgtacgccaaatcgctgaataatacgggactaattttcaattgctgggttaccgctattccacacgcggattttacaccctggatgatgtggcataccgtagcatggaagggtacgactacgaatacgatagcgacggacgccgccataaagtgccggtggcgcagagctaccacaatctccgttacagcaaaaaaggccgctttcaggtcaatatttcgcaaaacctgggggattacgggtcactgtatctttccggcagtcaacaaaattactggaatacggcggataccaatacctggtatcaactgggatacgccagtggatggcaagacataagttattcgctgtcatggtcgtggaacgagtcggtggggatctcaggcgccgatcgcattctggcattcaatatgtccgctccgtttagcgttctgaccggacggcgctatgcgcgcgacactattcttgatcgtacttatgccacgtttaacgccaaccgcaaccgcgacggcgacaatagctggcagagcggcgtgggcggcacgcttctggaaggacgtaatctgagctacagcgtgacgcaagggcgtagcagtaccaatggttatagcggcagcgcagcgctagctggcaggcgacgtatggcacgctgggcgtgggatataactacgatcgcgatcagcatgactataactggcaactttccggcggcgtggtcggtcatgcggatggtattacgtttagccaaccgttgggcgataccaatgtcttgattaaagcgccgggagcgaaaggcgtgcgcatcgaaaaccagaccggcgtgaaaacggactggcggggttatgcggtaatgccctacgccacggtatatcgctataaccgcgtcgcgttagataccaacacgatggacaaccataccgatgtcgaaaataacgtcagcagcgtagtgccgacagagggcgcgctggtgcgggccgcttttgatacgcggataggcgtaagggcaatcattaccgcgaggcttggcggacgtccgttaccgtttggcgcgatagtacgagaaaccgccagcggtattaccagtatggtcggcgatgacgggcaaatttatctgagcggcttgccgctaaaaggtgaactgttcatccagtggggagaggggaaaaacgcgcgttgtatcgccccttacgccctggcggagaatagcctgaagcaggcgattacgatagtcagcgcaacctgtatccgtccggcgtcataaaaggaaaaa

SEQ ID NO: 37165 - DNA, 320 bp, Salmonella paratyphi A
atctggatgttccctgaaggtagcgtcaggggacgcgtctgctgccgtttaaaaccggcgcgtttcatgcggtctatcgcggtctggtgtgccgatcattcctgtctgcgtttccaacacctctaacaaagtcaatctaaaccgcctgaacaacggactggttattgtggaaatgctgccgccagtcgacgtcagcgaatatggtaaagatcaggttcgtgagctggcggcccactgcgtgcgttaatggagcaaaaaatcgcggaacttgataaagaggttgcggaagtgaagcgaccggtaagtttaagcagccttac

SEQ ID NO: 37166 - DNA, 699 bp, Salmonella paratyphi A
ctgtttgaagttgagtttaatgacccgcgtccggtgctggatattctcaacgccatcgccatatgccgttgccgccgtacatcgaccgtccggacgaggagccgaccgcgaactgtaccagacggtctacagtgaaaaaccgggcgccgtcgcgcgccgaccgccgggctgcactttgacgagccgctgctggcggcgcttcgtgagaaaggtgtcgaaatggcgtttgttacgctacacgtcggcgcgggcactttccagccggtgcgtgtcgataccattgaagatcacatcatgcactccgaatatgctgaggtgccgcaagaggtggtcgacgcggtgctggcggcgaaagcgcgcggcaaccgggtgattgcggtcggcaccacctcggtacgctcactggaaagcgcggcgcaggcggcaaaaagcgatttgatagagccgttcttcggcgatacgcaaatatttatttatccaggttatcaatacaaagtgattgatgcgctgatcaccaacttccatctgccggaatcgacgttgattatgctggtttccgcatttgccggttatcaacacaccatgaatgcctataagactgcggtagaacaaaaatatcgcttttttagctacggggacgcgatgtttatcacgtacaatccgcgggctatttctgagcgtccgtaagaaggctatctc

SEQ ID NO: 37167 - DNA, 537 bp, Salmonella paratyphi A
atgacaagacgttacctaagaattctcctggtgggaagtctcttgagcctgaccgcctgcgcgccgcagagcgaagttcgccagatgcatcaaagcattagcaccctgaataaagagatgacccaactgaatcaggaaacggtaaaaattacccaacaaaataagctgaatgcggagtcaacccgcggcgtctatttgttgcctggcgccaatacgcctgcccggctggagagccagatcggtacgctacgtatgacgttgctggagattacgcctgtcgcagacgcgcgtcacgcaacgttacgcattcagggcgagtcccgcgatccgctgccggcattcagcgctaccgtagagtacgggcaaattcagggcactacggagaactatcaggaggtgaatgcacagagccttctggtaaatgcccctaccagtttgctggcgcccagtgatgtcaatatttcgttaccgttgaaggggatcacaccggcgcagttaggcttcattcgcatccatgatattcaacctgttaatcaa

SEQ ID NO: 37168 - DNA, 1130 bp, Salmonella paratyphi A
atgaaatttgagttagataccaccgatggtcgtgcgcgtcgcggtcgtctggtgtttgatcgtggcgtagtggaaacgcctgcttttatgcctgtgggtacttacggtaccgtgaaaggcatgacgccggaagaagtggaagcgaccggcgcgcagattattctcggcaacactttccacctgtggctgcgccgggtcaggaaatcatgaagctgcatggcgatctgcacgattttatgcagtggaaagggccgattctcaccgattccggcggcttccaggtcttcagcctcggcgatattcgtaagattaccgagcaaggcgtgcacttccgtaacccgatcaacggcgatccgattttcctcgatccggaaaagtcgatggagatccagtacgatctcggttccgatatcgtgatgatctttgatgaatgtacgccgtatccggcagactgggactatgctaaacgctcgatggagatgtcgttgcgttgggcgacgtagccgcgaccgttttgatagccttggcaataagaatgcgctttttggcatcattcagggcagcgtttacgaagatttacgcgatatctcggtgaaaggtctggtagagattggctttgatggctacgctgtcggcggtttggctgtcggtgagccgaaagcagatatgcaccgcattctggagcacgtttgcccgcagctcccggctgacaaaccgcgttacctgatgggcgtgggtaaaccggaagatctggtggaaggggtgcgtcgcggtattgatatgtttgactgtgtcatgccaacgcgaaatgcccgcaatggtcatctgtttgtgaccgacggcgtggtgaagattcgtaatgcaaagcataaaagcgacaccagcccgcttgacgccgagtgcgattgctacacctgtcgcaattattcacgcgcttacttgcatcatctcgaccgttgcaacgaaatattaggtgcgcgtctcaataccattcataacttgcgttactaccagcgtttgatggcgggtttacgcaaggctattgaagagggtaaattagagagcttcgtaaccgagttttaccaacgtcaggggcgaccgttccacctttgaacgttgattaattttaa

SEQ ID NO: 37169 - DNA, 1106 bp, Salmonella paratyphi A
atgcaggatgagttttacatggcgcgggcgctaaaactggcgcagcgtggacgtttcaccactcacccgaaccctaatgtcggctgtgtcattgttaacaatggcgatatcgtcggcgaaggttatcaccatcgcgccggagagccgcacgccgaggtccatgcgctgcggatggcgggcgcaaaagccaaagcgcaaccgcctatgtcacgcttgaaccctgtagccatcatgggcgaacgccgccatgttgtgatgcgctgattgcggccggcgtcgcgcgcgtggtcgccgcgatgcaggacccgaacccacaggtcgccgggcgcgggctgtatcgcctgcaacaggcgggtattgcggtcagccacgggttaatgatgagtgaagcggaggcgctcaataaaggcttcctcaagcggatgcgtaccggattcccttatcttcagcttaaactgggcgcctccgtcgacggacggacggcgatggcagcgcgaaagccagtggatcacctcgccgcaggcccggcgtgacgttcagcgcttggtgcgcaaagccacgctatcttaaccagtagcgcgacggtattggctgacgatccggccttgacggtgcgttgggcggagttagacgcctctacgcaggcgtcttacccgcaggaaaatctgcgccagccggtgcgaattgttatcgacagccaaaaccgggtaacgcctgcgcatcgtattgtgcagcagcctggcgaaacgtggattgcgcgtacccaggaagatagccgcgcgtggcccgattcggttcgtactatcagcgtgccggcgcacaacggacatttggatctggttgtgctgatgatgcagttaggcaggcagcagattaatagcatatgggttgaagccggaccgggactggcaggcgcgttgttgcaagccgggctggtggatgaactgattgtctatgtcgcgcctaaattgttgggaacccaggcgcggggattatgcgaattgccggggcttgagaagctcgccgacgcgccgcaatttaccttcagcgaaatacgtcatgtcggcccggatgtttgcctgcatatggtgagcgcatgagttctc

SEQ ID NO: 37170 - DNA, 345 bp, Salmonella paratyphi A
atggctatcatccccaaaaactatgcgcgcctggaaagcggctatcgtgaaaaagcgctgaagctgtttccgtgggtgtgcggacgttgttctcgtgagtttgtgtattcaaatctgcgtgagctgacggtgcatcatatcgatcatgaccacaccaataacccggaagacggcagcaactgggagctattgtgcctctactgccacgatcacgagcattctaaatataccgaagccgatcagtacggttcgacggtcattgctggggaagatgcgcaaaaagatgtcggcgaggcgacttataacccgtttgccgatctgaaagcgatgatgaacaaaaagaaa

SEQ ID NO: 37171 - DNA, 291 bp, Salmonella paratyphi A
atgttttgtgtgatctatagaagtagcaagcgcgatcaaacctatttgtatgtcgaaaaaaaagacgatttttcgcaggtgcctgaagcgttgatgaaaggattcggtcagccgcagttagcgatgatgctgccgcttgatggacgtaaaaaattagtcaatgccgagctcgaaaaagtaaaacaggcgttaagcgagcagggctattatttacaattgccgccgccgccggaagatttgctgaaacaacatctttcttcggtgggacaaaatacgtcgcccgctgaccgt

SEQ ID NO: 37172 - DNA, 662 bp, Salmonella paratyphi A
atgtatcaacatcgtaactggcaaggtgccttgcttgattacccggtaagtaaagtggtctgcgtgggcagtaattacgcaaatcacatcaaggagatgggcagcgcgacgccggaagaacccgtgctttttatcaagccggaaaccgcattgtgtgatattcgccagccgctggagattccggcggatatgggcgctgttcatcatgaagttgagcttgccgtgctgattggcgcaacctccgccagcgaccgaagatcatgtacgtaaagcgatagcggttatgggtggcgcttgatttaaccctgcgcgatattcaagggaaaatgaaaaaggccggacagccctgggaaaaagccaaaggttttgataacgcatgtccgatttcaggcttcatccctgtcgcggccttctgcggcgatccgcaaaatacggttatcggacttaacgttaatggcgaggttcgccagcaagggtcgaccgcggatatgattcatcctattgtgccccttatcgcctatatgagccgctattttacgctcaaagccggggacgtggtgctaacggcacgcgcagccgtgggcccattattaagcggcgatgagctggacattcgttttaatggcgaaacgttgtctacccgcgttctgtaaaatctgctt

SEQ ID NO: 37173 - DNA, 756 bp, Salmonella paratyphi A
atgactgaagcacaaagacatcaaatactgctggatatgctggcacagttgggctttgttaccgtcgaaaacgtgattgagcgtctgggaatctccccggcgacgcgcgcgcgacatcaacaagctcgacgaaagcggaaaacttaaaaaagtgcgcaacgcgcagaggccattacccaacagcggccccgctggacgccgatgaatctgcaccaggcgcaaaaccacgatgaaaaagtacgcatcgcgaaagcggcgtcgcagctggtaaacccgggtgagagcgtagtgattaactgcggctccaccgctttcctgctggggcgcgaaatgtgcgggaagccggtacagatcattaccaactatctgccgctggcgaattatctgatcgatcaagagcatgacagcgtgattatcatggggggtcagtacaacaaaagccagtcgattaccctaagcccgcagggaagtgaaaacagtctctatgctggccactggatgtttaccagcggaaagggcttaactgcggatggcctgtacaaaaccgatatgctaaccgccatggcggaacaaaaaatgctcagcgtcgtcgggaaactggtcgcgctggtcgatagcagtaaaattggcgagcgcgcgggaatgctgttcagccgcgccgatcagatcgctatgctgattaccggcaaaaatgccaatccgcaggttttgcaacagcttgaagcccagggtgtaagcatactccgcgtttaaaga

SEQ ID NO: 37174 - DNA, 1287 bp, Salmonella paratyphi A
atgaaagcactaaaccgagaggtcattgactactttaaagagcatgtaaatccaggatttctggaataccggaaatctgttaccgctggcggggattacggagccgtagagtggcaagcgggcagtttgaatacgcttgtcgacacccaggggcaggagtttatcgactgtcttggggggtttggcatctttaacgtggggcaccgtaatcctgttgtggtatccgccgtccagaatcaactcgcaaaacaacctctccacagccaggagttacttgatcccttgcgggcgatgctggcaaaaacgctggcggcgctgacaccggggaaactcaagtacagctttttctgtaacagcggcaccgaatccgtcgaagcggcgctaaaactggcaaaagcgtatcagtcgccgcgcggcaagtttacctttatcgccaccagcggcgcatttcacggcaaatcattgggcgcgctctccgccacggccaaatccaccttccgcagaccctttatgcctttactgccgggcttccgccatgtgccgtttggcaatatcgacgcgatgagcatggcatttagcgaaggcaaaaaaacgggcgacgagatagcagccgtgattctggagcctattcagggtgaaggcggcgtgatcctgccgccgcagggatacctgacagaggtacgtaagctctgtgacgaattcggcgcgctgatgattctggatgaagtacaaaccggcatggggcgtaccggcaagatgtttgcctgcgagcacgaaaatgtgcagcctgatattctgtgtctggcgaaagccctgggcggcggcgtgatgccgattggcgccaccatcgcgactgaagaggtgttttcggttctgttcgacaaccccttcctgcataccaccacttttggcggtaacccgctggcttgtgctgccgcgctggcgaccattaacgtcctgctggaacaaaacctcccggcccaggcggaacaaaaaggcgatacgctcctggatagttttcgacaacttgcgcgtgaatatcccaatctggtacacgaggcgcgcggcaaaggtatgttgatggccattgaatttgtcgataacgaaacgggctaccgttttgccagtgagatgttccgtcaacgcgtgctggtcgctggtacgctgaataatgcgaaaacaattcgtatcgagccaccgctcacgctaaccattgaactgtgcgaacaggtattgaaatcagcgcgtaatgcgatggcggcaatgcaggtgagcgttgaagaggtt

SEQ ID NO: 37175 - DNA, 1644 bp, Salmonella paratyphi A
  misc_feature (1103)..(1103): n=g, a, t or c
atgaaaaacatcaatccaacgcagacttctgcctggcaggcgctccagaaacactacgatgaaatgaaagacgttacgatcgctgagcttttcgcgaacgatagcgaccgtttcgctaaattttccgcgacgtttgacgatctgatgctggtggatttctccaaaaaccgcatcaccgaagagacgctggcaaaattacaggatctggcgaaagagaccgatctggccggcgcgattaaatccatgttctccggcgagaagatcaaccgcaccgaagaccgcgccgtgctgcacgtggcgctgcgtaaccgtagcaatacgccgatcattgtggacggcaaagatgtgatgccggaagtgaacgccgtgcttgagaaaatgaaaactttctcgcaagcgattatctccggtcagtggaaaggctacaccggtaaggccatcaccgacgtggtgaacatcggtatcggcggttccgacctcggcccgttcatggtgaccgaagtgctgcgtccgtataaaaatcatctgactatgcacttcgtctctaacgttgatggcacgcacatcgctgaagtgctgaaaaaagtgaacccggaaacgactctgttcctggtggcgtcgaaaaccttcactacgcaggaaaccatgaccaacgcccacagcgcgcgcgactggttcctgaaaactgcaggcgatgaaaaacacgtggcgaaacactttgctgcgctctccaccaacgccaaagcggtcggcgaatttggtatcgacacggccaatatgttcgagttctgggactgggtcggtggtcgttactcgctgtggtctgccatcgggctgtccattattctgtccgtcggtttcgacaactttgtcgagctgctttccggcgcgcacgcatggacaagcatttctccaccactccggcggagaaaaacctacccattctgctggcgttgattggcatctggtacaacaatttcttcggcgcggaaaccgaagccattctgccgtatgaccagtatatgcaccgtttcgccgcctacttccagcagggtaacatggaatccaacggtaaatacgttgaccgtaacggcaacgctggnattaccagacaggcccaattatctggggcgaaccaggcaccaacggtcagcacgcgttttatcaattgattcaccagggtactaaaatggtgccgtgtgattttatcgccccggctatcacccataacccgctatccgatcatcatcagaagctgctgtctaacttcttcgcgcagaccgaagcgctggcgtttggcaaatcccgcgaggtggttgagcaggaatatcgcgatcaggggaaagatccggcgcagcttgaacacgttgtgccattcaaagtgtttgaagcaaccgcccgaccaactctatcctgctgcgcgaaattacgccgttcagcctgggcgcgctgattgcgttgtatgagcataaaatctttacgcagggcgtcatcctgaacatctttactttcgaccagtggggcgttgagttgggtaaacagttggctaaccgtattctgccggagctgggcgatgataaagctatttcgtcccatgatagctctactaacggtctgattaaccgttataaagcctgagcctga

SEQ ID NO: 37176 - DNA, 859 bp, Salmonella paratyphi A
ggctgcgagccgtggggcgacgctaaactgaaactgatcacctggtaagaggtgctgactctcgctgcgggtatcctgagctgtccgcacttcgcccacgtgacccgatgaaagagcgaatccggttatcccgacctgccattacatgatgggcgtattccgactaaagtgaccgtcaggcgctgaccgtgaacgagcagggcgaagacgtggtcattccggggctgtttgcggtagcgaaatcgcctgtgtatcggttcacggcgccaaccgtctgggcggtaactcactgctggatctggtggtctttggcgcgcggcggggctgcatttacaggaatccatcgccgagcatgggcgtgtgcgcgacgccagcgagtctgacgttgaaggttctctggagcgcctgaatcgctggaacaataaccgcaatggcgaagatccggtggctatccgcaaagcgttgcaggagtgtatgcagcataacttctccgtattccgtgaaggcgacgcgatggcgaaagggcttgagcagttgaaagtgatccgcgagcgtctgaaaaacgcccgtctggatgacacgtccagcgagtttaatacccagcgtgttgagtgtctggagctggataacctgatggaaaccgcttacgccactgccgtatcagccaacttccggacggaaagccgcggcgcgcatagccgcttcgatttcccggagcgtgatgatgccaactggttgtgtcataccctgtatcagccgcaaacggaatccatgacgcgccgaagcgtcaatatggaaccgaaactgcgtccggcgttcccgccgaagattcgtacttattaattgcggagacaggatg

SEQ ID NO: 37177 - DNA, 2812 bp, Salmonella paratyphi A
aaagatgcttaagggatcacgatgcagaacagcgctttgaaagcctggttggactcttcttacctctctggttcgaatcagagctggatagaacagctctatgaagacttcttaaccgatcctgactcggtagacgctaactggcgtttgacgttccagcagttacctggtaccggagtcaaaccggatcaactccattcaaaaacacgtgaatatttccggcggcaggcgttggctggctcacgtcactcttctacgatttccgaccctgacaccaatgtgaagcaggttaaagtcctgcagcttatcaacgcttatcgtttccgtggccatcagcatgcaaacctcgatccgctgggtctttggaaacaagaacgcgtggcggatctggatccttctttccatgatttgaccgaggccgatttccaggaaaccttcaatgtcggctcctttgccagcggcaaagagacgatgaagctgggcgagctgctcgacgcgctcaaacagacctactgcggcccgattggcgctgagtatatgcacatcaccagcaccgaagagaaacgctggatccaacagcgcatcgaatccggtcgtgcggcctttagcgctgacgagaaaaaacgcttcctgaacgaactgaccgccgctgaagggctggaacgttatctgggcgccaaattcccgggtgcgaaacgtttctcgctcgaggggggagatgcgctgatacccatgctgaaagagatggttcgccatgcgggtaacagcggcactcgcgaagtggtgctggggatggcgcaccgcggtcgcctgaacgtgctgatcaacgtactgggtaaaaaaccgcaggatctgttcgacgaatttgccggtaagcataaagaacatctgggtaccggcgacgtgaagtatcacatgggcttctcgtcagatatcgaaaccgaaggcggtctggttcacctggcgctggcgtttaacccatcgcatctggaaattgtgagcccggtggtgatgggctccgtgcgcgcccgtctggacagactggacgaaccgagcagcaacaaagtgttgccgatcactattcacggcgacgccgcggtgaccggccagggcgtggttcaggaaaccctgaacatgtcgaaagcgcgcggttacgaagtgggcggtacggtacgtatcgttatcaacaaccaggtgggcttcaccacctctaacccactggatgcgcgttcaacgccttactgcaccgatatcggtaaaatggtccaggcgccgattttccacgtcaatgcggacgatccggaagccgtcgcttttgtgacccgtctggcgctggacttccgtaatacctttaaacgcgatgtctttatcgatctggtgtgctaccgccgtcacggccacaacgaagccgacgagccaagcgcaacccagccgctgatgtaccagaaaatcaaaaagcatccgacgccgcgtaaaatctacgccgacaaactggaagctgataaggtcgcaacgctggaagatgccaccgaaatggtcaacctctatcgcgatgcgctggatgcaggcgaatgcgtggtgaaagagtggcgtccgatgaatatgcactcgttcacctggtcgccgtatctaaaccacgaatgggatgaagcatacccgaacaaggtagaaatgaagcgtctgcaggagctggcaaaacgtatcagcaccgtgccggaagccattgaaatgcagtctcgcgtggcgaaaatttatggcgaccgtcaggcaatggcggcaggcgagaaattgtttgactggggcggcgcggaaaatctggcttacgcacgctggtcgatgaaggcattccggtgcgcctgtccggggaagactccggtcgcggcaccttcttccatcgtcatgcggtgatccacaaccagacgaacggctcaacgtatacgccgctgcagcatattcacagcggtcagggacagtttaaagtctgggactccgtgctgtctgaagaagcggtactggcttttgaatacggttatgccacggcggaaccacgtaccctgactatctgggaagcgcagtttggcgattttgccaacggcgcgcaggtggtgattgaccagttcatctcctccggcgagcagaaatggggccggatgtgcggtctggtgatgctgttgccgcatggctatgaagggcagggcccggagcactcttccgcgcgtctggaacgttatctgcaactttgcgccgagcagaatatgcaggtttgcgtgccgtccaccccggcgcaggcctaccatatgctgcgccgtcaggcgcgcggatgcgtcgtccgctggtggtgatgtcgccgaaatcgctgctgcgtcacccgctggcggtttccacgcttgatgaactggcgaacggttccttccagccggccattggcgaaattgacgagctggaccctaaagccgtaaaacgcgtggtaatgtgttctggtaaggtttattacgacctgctggaacaacggcgtaaaaactcacagaaagatgtcgctatcgtgcgcatcgaacagctctatccgttcccgcataaagcggtgcaggaagcgctgcaaccacacgctcacgtccatgattttgtctggtgccaggaagagccgctcaaccagggcgcatggtactgcagtcagcatcatttccgtgaagtgattccgtttggggccgctctgcgttacgcaggtcgcccggcctccgcctctccggcggtagggtatatgtccgttcaccagaaacagcaacaagatctggttaatgacgcgctgaacgtc

SEQ ID NO: 37178 - DNA, 875 bp, Salmonella paratyphi A
gttttaattaataaagataccagggttatctgccaggcttcaccggtagccaggggactttccactccgaacaggcgattgcttacggtacgcagatggtcggcggcgtaacgccgggcaaaggcggcaccacgcatctgggtctgccgtgttcaacaccgtgccgaagcggtagaagccaccggtcgaccgcatccgttatctacgtcccggcgccgttctgcaaagactccattctggaagcgatcgacgcaggcatcaaactgattatcaccatcaccgaaggtattccgacgctggatatgctgactgtgaaagtgaagctggacgaagcaggcgtacgcatgatcggcccgaactgcccaggtgtgattaccccgggcgaatgcaaaatcggcatcatgccgggtcacattcataagccgggtaaagtgggtatcgtttcccgttccggtacgctgacctatgaagcggttaagcagaccaccgactacggtttcggtcagtccacctgcgtgggtatcggcggcgaactgattccgggctctaacttcatcgacatcctgaaactgttccaggaagatccgcagactgaagcgatcgtgatgatcggtgagatcggcggtagcgcggaagaagaagcggcggcttacattaaagaccacgtgaccaagccggttgttggctatatcgcgggtgttaccgcgccgaaaggcaaacgtatgggccacgtggcgccatcattgccggtggtgaaggcactgcggatgaaaaattcgccgcgctggaagccgcgggcgtgaaaaccgttcgcagcctggccgataatcggcgaagcgctgaaagcaattataaaataaaactctctgttcctg

SEQ ID NO: 37179 - DNA, 1524 bp, Salmonella paratyphi A
  misc_feature (1357)..(1357): n=g, a, t or c
atgttagatatagtcgaactgtcgcgcttacagtttgccttgaccgcgatgtaccacttcctgtttgtgccgctaacgctcggtatggcgttcctgctggccattatggaaacggtatacgtcctttccggcaaacagatttataaagatatgaccaagttctggggcaagttgtttggtatcaactttgctctgggtgtagctaccggtttgaccatggagttccagttcgggacaaactggtcgtactactcccactatgttggggacatcttcggtgcgcgctggccatcgaaggtttgatggccttcttcctcgaatccacctttgtaggtctgttcttcttcggctgggatcgtctgagtaaagttcagcatatgtgcgtcacctggctggtggctctggggtccaacctctccgcgttgtggattctggtagcgaacggctggatgcaaaacccaatcgctgcggatttcaatttcgaaaccatgcgtatggaaatggtgagcttctctgaactggtgctgaacccggtagcacaggtgaaatttgttcacactgtggcgtccggctatgtcaccggcgcgatgttcatcctcggtatcagcgcttactacatgctgaaaggtcgtgacttcgcctttgctaaacgctcctttgctattgccgccagcttcggtatggctgccgtactgtccgttatcgtactcggtgacgaatccggttacgaaatgggcgacgtgcagaaaaccaagctcgctgcgattgaagctgaatgggaaacgcaacctgctccggcctcctttaccctgttcggcattcctgaccaggacaaacaggaaaaccatctggcgattcagatcccttatgcgctcggcattatcgctacgcgttccgtggacacgccggttattggcctgaaagatctcatggttcagcatgaagagcgtatccgtaacgggatgaaagcttatgagctgctggagcacgtgcgcgccggttctaccgaccaggccgttcgcgaccagtttaacagcatgaagaaagatctcggttacggcctgctgctgaaacgctatacgcctaatgtgactgacgcgaccgaagcgcagatccagcaagcgacgaaagattctattcctcgcgttgcgccgctgtacttcgctttccgtatcatggtggcgtgcggcttcctgctgctggcgattatcgcactttccttctggagcgtgattcgtaaccgcatcggtgagaaaaaatggctgttgcgtgcggcgctgtacggtattccactgccgtggattgcggttgaagcaggttggttcgtcgccgagtatggtcgtcagccgtgggcgantcggcgaagtgttgccgacagccgtggcgaactcatcgctgaccgtgggcgatctgctgttctccatgtttctgatttgcggcctgtataccctgttcttggtggcagaattgttcctgatgttcaaatttgcacgccttggcccaagcagcctgaaaaccggtcgc

SEQ ID NO: 37180 - DNA, 1163 bp, Salmonella paratyphi A
atgactaacagcaaccgcatcaagctcacatggatcagctttctttcctacgccctgaccggggcgctggtgattgtcaccgggatggtgatgggaaatatcgcagactattttcatctgcccgtttccagcatgagtaacacctttactttcctgaacgccgggattttgatctcgatcttcctcaatgcgtggctgatggaaatcgtcccgctgaaaacacagctacgctttggttttatcctgatggtgctggcggtggccgggctgatgttcagccatagcctggcgttgttctcagcggcgatgtttgtgctggggctggtcagcgggatcaccatgtcgattggcaccttcctgattacgcaactgtatgaagggcgtcagcgcgttcccgactgctgtttaccgactccttcttcagcatggcggggatgatttttcctatggtcgccgccttcctgctggcgcgtagtattgagtggtactgggtctacgcctgcatcggcctggtctacctggcgattttcatcctgaccttcggctgtgaatttccggcgctgggtaaacatgcgcagcactctcaggcgcctgtcgtcaaagaaaaatggggcattggcgtactgtttctggccgtcgccgcgctgtgctatatcctcggtcaattaggctttatctcctgggtgccggaatacgccaaaggcctcggcatgagcctgaatgacgccggggcgctggtgagtgatttctggatgtcctatatgtttggcatgtgggcgttcagctttatcctgcgctttttcgatctgcaacgcattctgaccgtactggcgggtatggcggcggtactgatgtatctgtttattaccggcacgcaggcgcatatgccgtggtttattttgacgctgggcttcttctccagcgccatttatacctccatcattacgctgggatcgcagcaaacgaaagtggcctcgcctaagctggttaactttattctgacctgcggcactatcggaacgatgctgaccttcgtcgtcaccggcccgattgtggcgcacagcggtccacaggcggcgttactcaccgcgaatggtctgtatgcggtggtctttgtgatgtgctttgcgctcggctttgtatcccgtcatcgccagcatagt

SEQ ID NO: 37181 - DNA, 601 bp, Salmonella paratyphi A
atgagcgataaatttggcgaagggcgcgatccgtacctctatccggggctgaatgtgatgcgtaatcggctggggattcatcaggcccagcgactggcgcaagcggcatatgaaatgaccgcgctccgccgccacgattgaactggggccgctggtacgcggcttgcctcatctgtgcgcgattcatcgccagctctatcaggatattttcgactgggcagggcaactgcgggaggtcgatatttaccagggtgatacccgtttctgccactttgcctatatcgaaaaagagggcaacgctctgatgcaggatctggaagaagagggctatctggtcggtctggcgcacgagaagtttgtcgagcggctggcgcattactactgtgaaattaacgtgcttcatccgtttcgtttggggagcgggctggcgcagcgcatcttctttgaacagctggccttacatgcaggctacgcgctgagttggcaaggtattgcggttgatacatggaatcaggcgaaccagagcggcgcgatgggcgatctctccgctttgcaggcgatttttcagaaagcgataagcgaagctcgcgaaactgagtaa

SEQ ID NO: 37182 - DNA, 2097 bp, Salmonella paratyphi A
  misc_feature (340)..(340): n=g, a, t or c
atgtggcgaagactgatttatcacccagagattaattacgcactacggcaaacgctggtgctgtgcctgcctgtgcgtgttggtttattgataggccagctacacctgggcttgcttttctctctcgttcccgcctgctgcaacattgcaggtctggataccccgcacaaacgtttttttaaacgcctgatcatcggcgcgtcgctgttcgccggatgcagtctggtaacgcaacttctgctggcggaatccatccccctgccgttgatcctgaccgggctcacgctggtgcttggcgtgacggcggaaattagccgcttcacgcgcggctactgcaggnctcgctgattgccgccatctttaccctgagccttgcggagatacatgcccgtctggagccgctgtcatttatgcgctgggcacgctatggtacggcgtgtttaactggttttggttctggctatggcgcgaacagcgctgcgcagtcattgagtttgttataccgtgaactggccgattattgtgaagcgaaatacagcctgctcacccaacatatcgatccggaaaaagcgctgcctcccctgctgatacgccagcaaaaagcggtcgatctcattacccagtgtaccaacaggatgcatatgctttcggcgcacaacaataatgattacaagcgcctactacgggcttttcaggaagcgatggatttgcaggagcacatttccgtcagcttgcatcagccggaagaggtacagaaactggtagaacgcagccatgcggaagaggtgattcgctggaatgcgcaaacggtcgccgcccgtctgcgcgtgctggcggatgacattctttatcatcgtctgccgacgcgcttctccatggaaaaacagattggcgctctggagaagatcgccaatcagcatcctgaaaatccggtaggccagttctgctattggcacttcagtcgaatcgcccgtgtgctgcgtactcagcgaccgctgtacgcccgcgacctgatggccgataaacagcgtcgtttgccgctacttccggcgctgaaaaattatatgtctcttaaatcgccggcgctacgcaacgccggacgcatcagcgtgatgatgagtatcgccagtctgatgggcagtgcgttgcacctgcctaaaccgtactggatactcatgacggtgctgtttgtcacccaaaacggctatggcgacgcgcgtacgtattctgcaccgttcggtcggaacgctggtcggcctggtgattgccggcgtcacgctgcacttacatattcccgaaagcattacgctggcggtcatgctggtactaacgctggcaagttatctgattattcgtaaaaactacggctgggcgacggtcggctttacggtgacggcggtatacaccatccagttactgacgttaaacggagagcagtttattgtgccgaggctgatcgatacgctgattggctgtttaattgcctttggcggcatggtctggctgtggccgcaatggcaaagcgggctattacgtaaaaacgcccatgatgcgctggaagccgatcaagaagctatccgactgatcctcagtaacgatccgcaggccaccccgctcgcttatcaaagaatgcgggtcaaccaggcgcataacacgttattcaactcgttaaatcaggcaatgcaggaacccggattcaatacccactatctgtcggatatgaaactgtgggtcacgcacagccagtttattgtcgagcatatcaacgccatgacgacgctggcgcgggaacacaccatgctgacgccggatctggcgcagcgctatctggaatcttgcgagattgcgattcagcgctgccagcagcgcctggagtacgacaggccaggaggctccggcgatgtcaacattctggagtcgccggacatgccgtcacatggcttattgagcactctggagcaacatttacagcgcatcattggccatctgaacaccatgcacaccatttcgtcgatggcctggcgtcagcgtccgcatcacggtatctggctgagtaagcggctacgggatacaaaaggttaagaccgactgccggat

SEQ ID NO: 37183 - DNA, 1782 bp, Salmonella paratyphi A
atgactattgccattaccgatgtcgtcctgcgtgacgcccaccagtctctgttcgccacccgcctgcgccttgacgatatgctgccgattgccgccgcgctcgatgacgtgggctacgggtcgctggagtgctggggcggcgccacctttgacgcctgcatccgtttcctcggcgaagacccgtggtccgcctgcgcgagctcaaaaaggccatgccgaagacccccctgcagatgctgctgcgcgggcagaactgctcggctaccgccactatgccgatgacgtggtggagcgcttcgttgagcgcgcggtgaaaaacggcatggacgtgttccgcgtcttcgacgccatgaacgacccgcgcaatatgaaagccgccctgcagacgtgcgcaccacgcgcgcgacgcccagggcacgctctcgtacaccaccagcccggcgcacaccctgcagacctggctggacctgaccgaacagttgttagagaccggcgttgactcgattgccatcaaggatatgtccggcatcctcacgccgatggccgcctttgagctggtcagcgaaatcaaaaaacgttttgaggtgcgcctgcacctgcactgtcatgccaccaccggcatggcggagatggcgctgctgaaagccatcgaggcgggcgttgacggcgtcgacacggcgatttcctccatgagcgccacctacggccacccggcaccgaagcgctggtggcaacgcttgccggcacggaacacgacaccgggctggatatcctgaagctggagagcatcgcagcgtacttccgcgaggtgcgcaagaaatatcacgcctttgaaggccagctgaagggctacgacagccgtatcctggtggcccaggtgccgggcggaatgctgaccaacctcgaaagccagctgaagcagcagaacgcggcggacaaactcgaccaggtgctggcggaaatcccccgcgtgcgcgaggacctcggctttatcccgctggtcaccccgacctcgcagattgtcggcacccaggcggtgctcaacgtgctgaccggcgaacgctacaaaaccattgccaaagaaacggcgggcattctgaaaggcgaatacggccacaccccggtgccggtgaacgccgcgttacaggcccgcgtgctggaagggggcgctccggtgacctgccgtccggcggatttactcaaaccggaactggctgaactggaagcggacgtcaggcgccaggcgcaggagaagggcatcactctggcgggaaacgccatcgacgacgtgctcaccgtggcgctgttcccgcagattgggctgaaattcctcgaaaaccgccataacccggcggcgtttgagccactgccgcaggcggaagcgcgcagccggtggcaaaagcagagaagcctgccgcttccggtatctacaccgtggaagtggaaggcaaagcctttgtggtgaaggtcagcgacggtggcgatatcagccagctgaccgcagccgttcctgcctccgcgccacgcgctgccgctccgcaggcgcggcaccccggtcaccgcgccgctggcgggcaacatctggaaggtgattgccaccgagggccagacggtggcggaaggcgacgtgctgctgattctggaagccatgaagatggaaaccgaaatccgcgccgcgcaggccgggacggtacgcggcatcgcggtgaagtccggcgacgcgtctccgtcggcgcccccctgatgacgctggcgtaacggagaactgaaatggaaagtctg

SEQ ID NO: 37184 - DNA, 1299 bp, Salmonella paratyphi A
atggataagacggcagcgctcgccagcgacattttacgtggtatcggcggagagcaaaatattctgcgcctggaaaactgtatgacgcgagtcagggtggaggtacaggacgacagccaactggatatcccacgcttaaaagcgttgcctggcgtcagtggatacgtaaagcaaggggagcaacatcagctgatcgttgggccggggaaggctgcgcaggtggttgatgcgatgcgcgtgcagattgccgcaggtggtgtaaagccggatgacgctatggtgcgtaccaaatccgaggcgaaagcgaagtataaagcgccgatgagcgatgcgttgcgtaagctggcgaatgtttttattccgctcatccccgcctttatcgcatccggcttgattaccggcattatcaacattctgaaacgtccggatatcgtcggcgatgttgccgtccactatcctaacctgctgggcctgatggggatatttggtagcgcggtgttcgctatcatgaacattctggttggcgtcaataccgcgaaagtctttggcggatcgcaggcgttaggcggcgtgatggcggggatcctttccagcccgcaactggcgcagattacgctctttggcgaggtgcttcagccgggacggggcggcgtcatcgccgtcctgctggtggtggcgttaatgtgctggattgagcgccagttccgtaagctgctgccggggtcgctggagttaattcttaaccctttattgacgactgttatcaccggcgcggtagcgattgtcgctctacaaccgcttggcggctggatttcagacgctatcgctcacggcgcgtcctgggctatcgatcgcggcggttttctggtgggcgcggtgttagccggaaccttcctgcgttggtactgaccgggctgcatcaggggctggtgcctattcatgtggagctggtgcaagcgcacggctataacgcgctgtttcccatcctggcgatggcgggcgttggtcagatacggcgtgccattgccgtactgatgaaaacccgaaatgcgcgactcaaaaaggtgattaaaggcgcgcttctgtcggactgctggggattggcgagccgcttatttttgggtcacgctgccattgggtaagccatttattgggctcttggcggcgcggtaggcggggcgttgatcagctactggaaagtggcgacggtaattacctttggtatttccggatccgctggcattaacaattgttgccggaaaagtcctgttctatctgttaggctatttaaggggatcc

SEQ ID NO: 37185 - DNA, 907 bp, Salmonella paratyphi A
atgagcactgacaaaacttactgcggatttattgccatcgtcggacgtccgaacgttggcaaatccaccttgctgaacaaactgcttgggcagaagatttcgatcacttcccgtaaagcgcagaccacgcgccaccgcattgtcggtattcataccgaaggcccgtatcaggcaatctatgtcgataccccgggtctgcatatggaagaaaagcgcgccattaaccgtttgatgaataaggcggcgagcagttcgattggcgacgttgagctggtgattttcgttgtggaaggcacccgttggacgtccggacgacgaaatggtcctgaacaaactgcgcgatggcaaagcaccggttattctcgccgttaacaaggtggataacgtgcaggaaaaagccgatttgctgccgcacctccagttcctggcaagccagatgaactttcttgatatcgtacccatctctgctgaaacgggtatgaacgtcgatactattgctggtatcgtgcgtaaacatttaccggaagcgattcaccacttcccggaagattacatcaccgatcgctctcagcgctttatggcgtctgaaatcattcgtgaaaagctgatgcgttttctcggcgccgagctgccgtattccgttaccgttgagattgaacgttttgttaccaacgaacgcggcggctatgatatcaacgggctgatcctcgtcgagcgcgaagggcagaagaagatggtgattggcaacaaaggcgccaaaatcaaaaccattggtattgaagcgcgtaaagacatgcaggagatgttcgaagcgccggtacacctggaactgtgggtgaaagtgaaatccggctgggctgatgacgaacgcgctctgcgcagtctcggttacgtagacgatctgtga

SEQ ID NO: 37186 - DNA, 884 bp, Salmonella paratyphi A
atgaatcttggtaccttagtgtctgaaacccgtaacccgcaaacgatggatctggatgcgttgcctactcctgaattagttaagcgttttaatgaacaggatacgctggtagcgaaagcagtaaaagccactctgcctgacgtcgcgcgtgcggtggatgccgcggcggcgctgaagtctggcggacgtatcatctatatgggcgcgggcaccagtggtcggcttggcgtactggatgcctcagaatgccccccgacgtttggcgttccgcacggtctggtcgtcgggctgattgccggcgggccggcgcgttgctgaaagcggtcgaaggcgcggaagatagccaacaggcaggcgaagacgatcttgtcgcgctaaatctgcaagaacaggatctggtcgtggggctcgcggcgtcggggcgtacaccctatgtgattggcggcctgcgctatgcgcgacagtccggttgtaccactgttgccgtctcctgtaatccagattcgcctattgcgcgggaggctaatatcgctatttcgcccgttgtcgggccggaagcgcttaccggctccacgcggctgaaatccggcaccgcacagaaaatggtgctcaatatgatttctaccggcgcgatggtgaagttcggcaaggtctatcaaaacctgatggtggatatgaaagccaccaacgtcaaactggtcgatcgcgcgtgtcggatggtcgttgaagcgaccgggataggtcgtgaagaggcggaagctttgctgaaacagaccgattttgaggttaagcccgccattttgatggcgcttacggggctggatgctgcagccgccagggaaaaactcgccgctcatcagggctttttaagggcggcgttagaa

SEQ ID NO: 37187 - DNA, 922 bp, Salmonella paratyphi A
agaatattcctccaggcgagtgaaatttcgttttgtcgtcgccatcacgtttcgcaggagctgcccatgaactgtttgatacgtattcgccagcgttatccggatctcgcgcaaagcacaggaaactggcggattatctgctcgcgcaaccggatacggcgcggcatctgagctcgcagcaactggcggccgaagcgggcgtcacgaatccagcgtagtcaagttcgcgcaaaaactggggtttaaagggtttccggcattgaaactggctatcagcgacgtgtggccagcaatcctaatccgcattccgttcccgttcataaccagattcgcggcgacgatccgatgcgcctggtcggggaaaaattaattaaagagaatgtggcggcgatgcacgccacgtctggacgttaacagtgaagaaaagctgttagaaagcgtcacgatgatgcgccacgcccgccgtattgtgatcaccgggattggcgcctctgggctggtggcgcaaaattttgcctggaagctactgaagattggcattaacgcggtggttgagcgcgatatgcacgccctgctggcgacggtgcaggcgctggcgccggaggatctgctgctggcgatctcttattccggggagcggcgcgagctgaacctggcggcggacgaaacattacgcgcaggcgcgaaaatcctggccattaccggtttttctcccaacgccttgcagcagcgcgccactcactgtctgtatacgattgctgaagagcaggcgacgcgcagcgccgctatctcctcgacacatgcgcaaatgatgttgaccgacttactgtttatggcgctggtacaacaggatttagagcgggcgccggagcgtattcgccatagcgaggcgctggtaaaaaaactggtatgaaaatggctc

SEQ ID NO: 37188 - DNA, 258 bp, Salmonella paratyphi A
atggcgctgttaatcaccaaaaaatgtatcaactgcgatatgtgcgagccggagtgcccgaatgaggcgatttcaatgggcgacaacatttatgaaattaacagcgacaaatgcaccgagtgtgtaggccattacgaaacgccgacctgtcagaaagtctgtccgatccccaatacgattttgcaggatcccgcccatgtcgaaaccgaagaacagttgtgggataagtttgttctgatgcatcacgcagataaactg

SEQ ID NO: 37189 - DNA, 378 bp, Salmonella paratyphi A
atggcgattctcggcctgggaacggatattgtagagattgcccgcattgaggcagtgatctcccgttccggcgaacgtctggcaaggcgtgtgctcagtgacaacgagtgggctatctgggagacgcatcagcagccggtgcgttttctcgccaagcgttttgcggtgaaagaggcggcagcgaaagcttttggcaccggcatccgcaacggtctggcgtttaatcagttcgaagtatttaacgatgagctgggaaaaccacgtttgcggctgtggggcgaggcgttaacgctggcggaaaaactcggtgtggcgcacatgcatgtcacgttggccgatgaacgccattacgcctgcgctacggtcattctggaaagt

SEQ ID NO: 37190 - DNA, 1036 bp, Salmonella paratyphi A
atgacccattccctaaaaccctggaatacttcggcattgatcattgtgcaaagcacatcgtatgcgctgaaaacgaacaacaactactgagcgcctggcagcaagcaactcgtgagggactgccggttatgatcctgggtgaaggaagcaacgtcctgtttctggaaaattacgccggcaccgtgatccttaaccgcctgaaaggcattgaggtgaatgaaaccgcggacgcctggcacctacacgtcggcgcaggcgaaaactggcatcagctggttcgctacggctggacaacaacatgcccggcctggagaatctggcgctcatccctggctgcgttggttcctcacctatacagaatattggcgcgtatggcgtagaactacagtgtgtctgcgactacgttgactgtgttgaactggaaacgggaaaacgtctgcgtttgtccgcggcggaatgccgtttcggctatcgtgacagtatcttcaaaaatgaatatcaggatcgcgttgcgatcgtcgcggtgggtctgcgtctgtcaaagcaatggcagccggtgctgacctatggcgatcttacttgtttggacccgaaaacggtcaccgcgcaacaggtgtttgatgctgtatgccatatgcgcaccacaaaattgccggatcctaaagtgaatggcaatgcaggcagcttttttaaaatcccgttgtcgcagccgatatcgctatggaactgttagaacgatttcccaacgcgccgcattaccctcaggcagacggctcagtgaagctggcggcaggctggctgatagatcaatgtcagttgaaaggcgtcaccattggcggcgctgcggtgcattctccaacaagcgctggtattgattaatgcgaatgatgcgacaagtaaagatgtggtggcgctggcgcatcatgtccggcaaaaagtgggtgaaaaatttaatgtctggctggagcttgaggttcgctttattggtcagttcggagaggtgaacgctgtggagagcattgcatgaaagatacta

SEQ ID NO: 37191 - DNA, 738 bp, Salmonella paratyphi A
atgagtaactggccttatcctcacattgtcgcccatcgcggcggcggtaaactggcgccggaaaacactctggcggcgattgacgtgggcgcgcgatacgggcacaccatgattgagtttgatgccaagctgtcgaaagacggcgaaattttcctgctgcatgacgataacctggagcgcaccagcaatggttggggtgtggcgggcgagttgaactggcaggatttattgcgtgtggacgctggcggttggtttagcggcgaatttaaaggcgagccgctgccgttgctctcgcaggtggcggagcgctgccgtaaacacggcatgatggcgaatattgagatcaaaccgacaacggggagcggaaggctaacaggacgtgtcgtggcgttggccgcccgcgaactgtgggccgggatgacgccgccgctgctttcttcctttgagatagaggcgctggaagcggcgcaggcggcagtacctgaactgccgcgcgggttactactggataaatggcgtgaagactggcgtgaactgacgacccgtctgggctgtgtttccctccatctcaaccataaattactcgatgagacgcgagtgcaagagattaaggccgcgggtctgcggattctggtgtataccgtcaatcagccccagcgggcggcagagctgctgcgctggggcgtggattgtatctgcaccgatcgcattgatgacatcggccctcactttcagttt

SEQ ID NO: 37192 - DNA, 1756 bp, Salmonella paratyphi A
  misc_feature (563)..(563): n=g, a, t or c
  misc_feature (609)..(609): n=g, a, t or c
  misc_feature (1581)..(1581): n=g, a, t or c
  misc_feature (1583)..(1583): n=g, a, t or c
atgaaaccaacgtttatgcgctgggtggcgatcgcgctctgctggccggggggacgtttagcgcggtggccaatcctcccgtcgcgccgccagtctcctatggtgttgaagaagatgtctttcatcctgtgcgggcgacgcaagggatggtggcctcggtggatgcaatggcgacgcaggttggcgtggatatcttaaagcagggcggtaatgccgtggatgccgccgtcgccgtgggctatgcgctggctgtcacgcatccgcaagccgggaatctgggcggcgggggatttatgctgttgcgcactaaagatggcgctaccacggcgattgattttcgtgaaatggcgccggcccacgcgcgatatgttccttgacgatcagggtaacgccgatgcgaaaaagtcgctgacgtcgcatctggcatccggtacgcctggcaccgtggcggggttctcgctggcgctggagaaatacggcacgatgccgctgaataaagtggtgcgtccggcgattcagctggcggaagagggttttgtggttacgatgcgctggccgacgancttaaaacttacggcagcgaagtgattcctaatcatgagaacagcnaagcatttttctggaaagacggcgagcgctgaaaaaaggcgataagctggtccagaagaatctggcgaaaagctggaaatgattgccgaaaacggcccggctgcgttttataaaggggcgattgcgaccagattgccggggaaatgcagaagaacggcggtctgatgaccaaagaggatttagccagctataaagccgttgagcgtacgccaatcagcggtgactatcgcgggtatcaggtcttctccatgccgccgccgtcctcgggcgatattcacatcgtgcaaatcctcaatattcttgaaaacttcgatatgaagaagtacggctttggcagcgcgatgccatgcaaatcatggcggaagcggaaaaatatgcctacgctgaccgctcagagtatctgggcgatccggactttgtgaaagtgccgtggcaggcgctgaccaacaaagcctatgcgaaaacgttggccgatcaaattgatattaataaggcaaaaccttccagccagatcaaaccgggcaagctcgccccgtatgaaagcaaccagaccacccacttctcggtggtggataaagacggcaatgcgtggcggtgacctataccctgaacaccaccttcggcacaggaattgtggcgggaaataccggtattctgctgaataatcaaatggatgatttttctgctaaacccggtgtacccaatgtttatggcctggtgggcggcgatgctaacgcggtcgaaccaaaaaaacgtccgctgtcgtcgatgtcgcccactatcgtggtaaaagacggcaaaacctggctggtgaccggtagccctggcgggagtcgaatcatcactactgtgctgcaaatggtagtgaacagcattgattttggcatgaacgtcgccgaagcgaccaacgcgccgcgcttccatcatcagtggttgccggatgagcttcgcgtcgagaagggcttcagcgtnantacaatcaaactgctggagcaaaaaggacagaaagtggcgctgaaagaggcgatgggcagcacacaaagtattatggttgggccggatgggcactgtatggcgcgtccgaccgcgttccgtagatgacttaacggcgggatactgatttttaataccaggcccggtgtcagac

SEQ ID NO: 37193 - DNA, 1030 bp, Salmonella paratyphi A
ggaggtgtcaggatgaaaggtttcctgcaaaccgtaactggcccggtggcgcatactgatatgggcctgacgctaccgcatgagcatctgtttaacgatctgtcatcagtcgttgacgagccacattatgctttttcacagcaactggtgggaaagaaagtcagtgctgacctgcagtgggggctgaaacacgacccatactgctgcgccgataacatggacagaaaagagattgatgatgttatctttgaaatcaataactttatgtccttaggcggcaggacgattgtcgacgccacgggatcagaatccattgggcgggatgctcagcgctacgagaagttgccttaaaaacgggtttgaatatcgttgcgtcctcaggaccttatctggagaaatttgaaagcacccggattcataaacctgtcgagttgttagcctcactcattgataaagaactgaatcagggtattggtgagacggatattcgcgcgggcatgatcggtgaaatcggcgtatcacctgcttttacccaaacggagcgtaacagcctgcgggctgcttctctggcacaatgtaacaacccccacacggcgatgaatatccatatgccggggtggctgcgactgggggatgaggtgctggatattgtgctggaagaaatgaacgtctccccggcaaaagtctcgctggcgcattcggacccttcaggaaaagatgtcgcctatcaacgtaaaatgctcgaccgcggcgtatggcttgaatttgacatgattggtctggacatcacctttccaaaagaaggtgtcgcgccgggcgttcaggagaccgcagatgcagtagcgaatctgattgcactgggttacgccgaccaaatcgttttaagccatgatgtttttctcaaacagatgtgggcgaaaaatggcggaaatggctgggggtttgtaccaaatgtcttctcgcctatctggctgcccgtggagtagacaacgatactctctcaagctctgtattgatacagcccgattac

SEQ ID NO: 37194 - DNA, 974 bp, Salmonella paratyphi A
ttgatctggatcacgtttaatgacagtgcttttttacctgctgaagataatcatgatcgttagaccacaacagcactggattcgcctgatatttgtctggcatggttccgtgttatctaaaatcttttcacgactgctccttaactttcttctttctatcgccgttattatcatgctgccctggtacacaatgctgggtattaagtttacccttgcgccgtttagcatactgggcgtctatcgccatttttcttgggtttcgcaataatgcctgttatgcgcgttacgtcgaagcgcgacatttgtgggggcagttgatgacacgcttcacgctcaatactgcgagaggtgaaaacaaccttgcctgatgaacgcggtatcgaggattttgttcggttacaaatcgcttttgcccactgtttgcgtatgacattgcgtcgacagcctcaaacgcaagttctgggaaactatcttgaccaggaggcgttacagaaagttgtcgcttcccattctcccgctaaccgtatcttattgctgatgggagagtggctggcgattcgcgccgcagcggaaagctttccgatattttatttcatagcctcaacaaccgtttaaatgatatgtcgtcagtgttggccggctgtgaacgcatcgccaacacgccggtgccttttgcctatacgttaattttgcatcgtacggtttatcttttctgcattatgttgccatttgcactggtggttgatctgcactatatgacgccgtttatttcggtacttatttcttatacgtttatcgcgctggatgcgttagcggaagagttggaagatccgttcggtactgaaaataatgatttaccgctggatgcgatatgcaatgcgatagaaatcgatttactgcaaatgaatgatgaaagggatattccggcaaaacggataccggataagcgctatcaactgacctgagatcgtctt

SEQ ID NO: 37195 - DNA, 1643 bp, Salmonella paratyphi A
gaacctaaaaaaggggaagccaaagtacaaaaggtgaaaaattggtcgcctgtctggatattcccgattgttactgcgcttatcggagcctggattctgttttatcactacagccaccagggaccggaagttaccttaattaccaccaatgcggaaggcattgaaggcggaaaaacgacgatcaaaagtcgcagcgtggatgtcggcgtggttgaaagcgcgacgctgactgacgatctgacccatgtacaaatcaaagcacggcttcattccggtatggagaagttgctgcataaagactcggtattttgggtcgtaaaaccgcaggtggggcgtgaaggcatcagcgggcttgggacgctgctatcaggcgcgtatattgaactacaaccaggaagtaagggcagtcagccggaaagctatcagcttcttgactcaccgccgttgcgccgcccgatgccaaaggtattcgtgtgattctggacagcaaaaaggccggtcagctcagtcctggcgatcccgttctgttccggggttatcgggtaggatccgttgaaaccagctctttcgatccgcaaaaacggacaatgagttatcagttgttcattaaggcgccaaacgatcgattggtcaccagtaatgtccgattctggaaagatagcggtatcgctgtggatctgacatcggcgggaatgcgcgtggaaatgggatcgttgacgacgttgtttggcggcggcgtgagttttgatgtgccggaaggacttgagcaggggcaaccgtcgccgaaaaaacggcgtttaatctctacgacgatcaaaaaagtattcaggattcgctgtacaccgatcatatcgattacctgatgttctttaaagattcggtgcgcggattacaacccggcgcgccgctggagttccgcggtattcgtctggggacggtaagcaaagtgccttctttgcgtctaaaatgcgccaggtatttaacgacgattaccgtattcctgtgctggtgcgcattgaaccggagcgtctgaaagcgcaattgggagaaaatgcggatgttggcgcgcatttgacggaactgcttacaggcggttttatctctcgcttaaaaccggtaacctggtgaccggggcgctgtatgtcgatctggacttttatcctaaggagccgccgattaccgggctacgcgaatttgatggttatgaaattattcccaccgtcagcagcggtctggcgcaaattcaacagcgactggtggaaacgttggataagatcaacaacctgccgctgaatccgatgattgaacaagcgaccaatacgctgtcggaaagccagcgtactatgcgtcggctgcaaaccacgctggataatatgaacaagattatctccagtcagtcgatgcagcagcttccggcagatatgcaaacgacgttacgcgaacttaaccgcagtatgcaaggcttccagcctggatcggcggcgtataacaaaatggtggcggatatgcagcgtctcgatcaggtgcttcgtgagttacaaccggtgttgaaaactctgaacgagaagagcaacgcgctggtatttgaagcgaaggataaaaaagatcctgagcctaagagggcgaaacaatgaaaaaatggc

SEQ ID NO: 37196 - DNA, 1763 bp, Salmonella paratyphi A
actttgaccattacgaaacttgcatggcgtgatctggttccggatagcgaaagctatcaggagatatttgcacagccacacgcgactgacgaaaacgacaccttactcagtgatactcagccacgactgcaatttgcgcttgagcaacttatacagccgtgggcatcatcctcttttatgctgactaaagcgcctgaagagcaagagtatctcactttactttcagatgccgtccgcgctctgcaaaccgatgccggacaattaaccggcggacattatgacgtttccgggcatactgttcattaccgcgcgcgcagaatgcgcaagacaactttgccaccgtcacacaagtcgtcagcgctgactgggtcgaagccgaacagctctttggttgcttgcggcagtataacggcgacattaccctgcaaccgggactggttcatcaggcgaacggcggcgtgctgattatttccttacgaacccttctgcgcagccgttactatggatgcgtctgaaagccatcgttagcccgagcgttttgactgggtggcctttgacgagtcgcgtccattaccggtctccgtgccatcaatgccgctcaaactgaaggtgattctggttggcgaacgtgaatcactggctgattttcaggagatggaaccggagctcgcggaacaggctatctacagtgaatttgaagacaatttacagatagcggacgcagaagctatgaccctgtggtgtcaatgggtgacgcgtatcctttacgcgataatttgccgcccccggcaccggacgcctggcccgtcctgatacgcgaggctgtgcgctataccggcgaacaggatacgctgcctctttgcccactgtggatagcccgccagtttaaggagcgtcgcctttatgcgaaggcgatacctggcgcgcagaagcgctcagcctgatgcttgcccgacgcgaatggcgagaaggctttctggcggagcggatgcaggatgagattctgcaagagcagatcctgattgaaaccgaaggcgaacgcgttggacaaatcaatgcgctttccgtcattgagtttcccggacatccgtcgcctttggcgaaccgtcgcgaattagctgtgttgtgcatatcggcgatggcgaatttaacgatattgagcgcaaggccgaacttggcgggaatatccacgctaagggaatgatgattatgcaggccttcctgatgtcggagttgcagctggagcaacaaattcccttctctgcctcgttaacctttgagcagtcctacagcgaagtggatgcgatagccctcaatggcggaactctcagctcatcagcgcgctggccaatgtgccggtgaatcaaaacattgcgattaccggctcggtcgatcagtttggtcgtgcgcaaccggtgggtgggctaaacgaaaaaattgaaggtttcttcgccatctgcgagcagcgggaattaaacggtaaacagggcgtgattatccctgccgccaatgtccgccatctcagtcttaaatctgaactgctgcaagcggttaaagaagagaagttcactatctgggcggtagacgacgtgaccgacgccttaccgctactgttaaatctggtgtgggatggcgaaggtcaaacgacgttgatgcagactatccaggagcgtatcgcgcaggcgacgcaacaggaaggccgtcatcgtttcccgtggccattacgttggctgaacgcttttattccgaactgatcggacttg

SEQ ID NO: 37197 - DNA, 2021 bp, Salmonella paratyphi A
ctgactacaatagccgccatttcgctgctattggataagaaagactgtatgcgccagcaacctcactatctcgaattgttaagtccggcccgtgacgccgcaattgctcgcgaagcgattttgcatggcgcagatgccgtctacatcggcggacccggttttggcgcgcgtcataacgccagtaacagtctgcgcgatatcgccgatctggtcccgtttgctcaccgttacggcgccaggatttttgtcacgctgaatactatcctgcatgatgatgagctggtagcccgcagcggttaatcaccgatttgtacgacaccggggtggatgcgctgattgtgcaggatatgggcattctggaactggatatcccgccgattgagcttcacgccagtacacagtgtgatattcgcagcgtggaaaaagcgaagtttcttgccgatgtcggtttttcacagattgtactggcgtgcgagcttaatttgagtcagatagcggctattcatcaggctactgacgccacgattgagttcttcattcatggcgcgctgtgtgtcgcttattctgggcagtgttatatctctcatgcgcaaaccggcgcagcgccaatcggggcgactgttcgcaagcctgtcgcttaccgtatacgttaaaagacgatcaggggcgggtggtctcttacgaaaaacatttgctatcgatgaaagataacgaccaaacggctaacctcggcgcgttaatcgatgcaggcgtacgttccttcaagattgaagggcgctataaagacatgagctatgtcaaaaacatcaccgcgcattatcgtcagatgctggacgcgattatcgagcaacgtggcgatctggcgcgtgcatcggttggtcggaccgagcatttttttgttccctccacggaaaaaaccttccatcgcggcacaccgactattttgttaacgcgcgtaaaggtgatattggcgcatttgattcaccaaaatttattggcttgcggtagtgaggtgctgaatgtggcgaaggattatctcgatgtagaagcgacggagccgttggtattggcgatggtctgaacgtgttgattaagcgtgaagtggtaggttttcgcgccaatacggtggagaaaaccggtcataaccgctaccgcgtttggccaaatgatatgcctgccgacctgcataaagtccgtccgcatcatccgttgaatcgtaatctggatcataactggcagcaagcgctgacaaaaacctccagtgagcgccgtgtggcggttgatatcatgctgggcggctggcaggaacagcttattctgacgctgaccagtgaagacggtgtctgcatcacgcatacgcttgacggggtatttgaggaagccaacaactctgaaaaagcgttgaataacctaaaagccggactggcgaagctgggacagacgccttactacgcgcgtgatatgcaggtgacattaccggcggcgttgttcgtgccaaatagcctgctcaatcagttccgtcgggaggcgattgatatgcttgacgcggcgcggctggcccattatcaacgaggtcgtcggaaacccgtggcgcagctgcgccggtctatccgcaaacgcatctcagctttctcgctaatgtctacaaccacaaagcgcgggaattttatcaccgttacggcgtacaattgattgatgcggcctatgaggcgcatcaggagaagggcgaggtaccggtcatgatcaccaaacactgcctgcgttttgcgttcaacctttgtcctaagcaggcgaaaggaaatattaagagctggaaagccacgccgatgcagttggtgcatggcgatgaggtactgacgctaaaattcgactgccgcccttgcgaaatgcatgtcattggcaaaattaaaaaccacatcttaaaaatgccccagcccggcagcgttgtcgcttcagtgagccctgaagcgctgatgaaaacgctgccgaagcgcaggggcgtttaattaacgaaaatagct

SEQ ID NO: 37198 - DNA, 996 bp, Salmonella paratyphi A
cagagcgatcgcgtgctcaatctcgctgcgggctattttggcatcgtccttggcactatcggtatgggattcgcctggcgttatgccagccagatatgggcaataagccactggcccggcgacatcatggtgatcctggcgatgattatttgggcactcttgaccttggcgttccttagccgtctggcgcgctttccccatagcgtgatggctgaagtgcgacatccggtaatgagcagttttgtcagcctgtttcccgccaccacgatgctggtcgcgatcggtttcgttccctggtatcgccgttggccgttgcctattcagcgtggggtcgtcatacaactgcgtatgcgcctggcagacggcgggactttgcgcggagcgcatccggaagaagcgacaaccccaggactttatctgcccacggtagcgaataattttatcagcgccatggcctgtggagcgctcggctacaatgatgccggactggtgtttttaggcgcaggcgtcttttcgtggttaagcctggaaccggttattttgcagcgactgcgtagctgcggcgaattaccggcggtgctgcgaacgtcgctgggtatccaactggcgcccgcgctggtcgcctgtagcgcctggctgagcgtcaatggcggggaaggcgacacgctggcgaaaatgctattcggctacggtctgttacagcttttatttatgctgcgattaatgccctggtatttatcacaaccgtttaatgcttccttctggagtttttcgttcggcgtttccgcgctggcgaccacggggttacatcttggtcacggtagtgaatcagggcttttccatattctggccgtcccgctgtttattttcacgaacgctattatcgccttattgctggttcgtacatttctattgctggtgcaggggacgttgcttattcgcactgagcgcgctgcactgttgaaaacggaggaaaaaaatgaccgttcgtgacga

SEQ ID NO: 37199 - DNA, 314 bp, Salmonella paratyphi A
atggtaaaatgcgtatcttctttcctcctgttcagcctgttgtccgttcaggcaatatcagctgaaaaccatattgatctccaccagccaaaagactttgtcgatattactacggtcgcccccgacgtacaggtagacatgcgatacttcagttcccataactttattggtcgccccattaaagggctataacgcgcctgtttgcctgttaacacgaccagccccgcaacgcagtaaagcagggtcgcccgatcgttacgcccccttcgggactttacctcaaaatatatgattgctaccgtccgcaaggccag

SEQ ID NO: 37200 - DNA, 643 bp, Salmonella paratyphi A
  misc_feature (449)..(449): n=g, a, t or c
atgcaactgaattccaccgaaatcagcgaactgatcaagcagcgcattgctcagttcaatgtggtgagcgaagctcacaacgaaggtactattgtttctgttagtgacggtgttatccgcattcacggcttggccgattgtatgcagggtgaaatgatctccctgccgggtaaccgttacgctatcgcactgaacctggagcgcgactccgtgggtgcggtagtcatgggtccatacgctgaccttgccgaaggcatgaaggttaaatgtacgggtcgtatcctggaagttccggttggccgcggtctgctgggacgtgtggtaaacaccctgggtgcgccaatcgacggtaaaggtccggttgataatgacggcttctctgccgttgaagcgattgcgccgggcgttatcgatcgtcagtctgtcgatcagccggtgcagaccggtantaaagccgttgactccatgatcccaatcggtcgtggtcagcgtgaactgatcatcggtgaccgtcagaccggttaaaaccgcgctggctatcgacgccatcatcaaccagcgcgactccggcatcaaatgtatctatgtcgctatcggccagaaagcgtccaccatctctaacgtggtgcgtaaactggagggg

SEQ ID NO: 37201 - DNA, 533 bp, Salmonella paratyphi A
atgtctgaatttgttacggtagctcgcccctacgccaaagcagcttttgactttgccgttgaacaccaaagtgtagagcgctggcaggatatgactgcgtttgccgccgaggtaaccaagaacgaacaaatggcagagcttctgctgctgcgctggcgccggaaacgctcgctgagtcgtttatcgcagtctgcggtgagcagttagacgaaaatggtcagaacctgattcgggtgatggctgaaaataatcgtctgaacgcgctcccggatgttctggagcagtttattcatctgcgtgccgccagtgaagctacctccgaggtagaagttacgtcggcaaccgcattgagtgaagagcagctttcgaaaatcagcgccgcgatggaaaaacgtctgtcacgcaaagtgaagctgaattgcaaaatcgataagtctgtaatggcaggcgttatcatccgggcgggtgatatggtcattgatggcagcgtacgcggccgtcttgagcgccttgcagacgtcttgcagtcttaa

SEQ ID NO: 37202 - DNA, 470 bp, Salmonella paratyphi A
gtgaatcttaacgcaacaatcctcggccaggccatcgcgtttattctctttgtctggttttgcatgaagtacgtatggccgccgttaatggcagccatcgagaaacgtcagaaagaaattgctgacggtctcgcttctgctgaacgagcacataaggatcttgaccttgcaaaggccagcgcgaccgaccagctgaaaaaagcgaaagcggaagctcaggtaatcatcgagcaggcaaacaaacgccgcgctcagatcctggacgaagccaaaactgaagcagagcaggaacgtactaaaatcgtggcgcaggcgcaggcggaaattgaagccgaggtaaacgcgcccgtgaagagctgcgtaagcaagttgctatcctggctgttcgtggcgccgagaagatcatcgaacgttccgtggatgaagctgctaacagcgacatcgtggataaacttgtcgctgaactgtaa

SEQ ID NO: 37203 - DNA, 1839 bp, Salmonella paratyphi A
  misc_feature (1031)..(1031): n=g, a, t or c
attaccctcgcagctattggggttgtctacggtgatattggtaccagcccgctttatacgcttcgtgaatgtttgtccggtcagtttggttttggcgttgaacgagatgccgtgtttggttttctgtcgctgatcttctggctactcatctttgtggtttccatcaaatatctcaccttcgtgatgcgcgccgataacgcgggtgaaggtggaattttgacgctgatgtcgcttgccgggcgtaatacctcggcgcgcaccacatccatgttagttatcatgggactgataggcggcagctttttctatggcgaagtggtcattacgccggcgatttcagtgatgtcggcgattgaaggcctggaaattgtcgcgccgcagctggatacctggattgtcccgctctccattattgtgctgactctgttgtttatgattcagaagcacggtacgggaatggtagggaaactctttgcgccgatcatgctgacctggtttttaactctggcggtacttggcctgcgcagtattatcgccaatcccgaagtgttacatgcgctgaatcctgtctgggcggtacgttttttccttgaatataaaaccgtatcgtttattgcgttgggcgcggtggtgctgtcgattaccggcgtagagcgttgtacgccgatatgggacacttcggtaagttcccgattcgcctggcgtggtttaccgtggtattgccgtcgttagtactgaactactttggtcagggcgcattgctacttaagcatccggaagcgattaaaaacccctttttcctgttggcaccggattgggcgttaattccgctgctgattctggcgcgctgcgacggtgatgcctcccaggcggtcatttccggcgtctttgctgacgcgtcaggccgtgcgtcttggctatttgatcccgatgcgtattatccatacctccgagatggagtccggtcagatctatatccctttcgttaactggctgctttatttcgcggtcgtggttgttattgttagctntgagcactacagcaactgggcggcggcctatggataaatctgaaccggcacgatggtgctgacgtctattctttctacgaccgtggcgcgtaagaactggcactaaaacaaatatttgttagcgctgatcctcatcgcgttcctgtgcgtggatatcccgctgttctcggccaacctcgacaaattgttgtccggtggttgcgtgccgctgagcctgggcctgatcatgttcacgatcatgaccacctggaagagtgagcgtttccgtctgttgcgtcgtatgcatgaacacggtaattcgctggaagcgatgattcgtcgctggagaagtcaccgccggttcgggtgccaggtactgccgtatacatgtcgcgcgcgctcagtgtgatcccttttgctttattgcataacctgaagcacaacaaagtgttgcatgagcgcgtaatcttactgacgttgcgtacggaagatgcgccttatgtgcataacgttcgccgggtgcagattgagcagtcttctccgacattctggcgcgtggtggctagctacggctggcgcgaaacgccaaacgttgaagaggtgttccaccgctgcggtctggaagggcttagctgtcggatgatggaaacgtcgttctttatgtcgcacgagtcgttgattgtcgcaaacgcccgtggtatttgcgtctgcgtggcaagctgtatttgttgttgcaacgcaacccctgcgcgcgccggatcagttcgagatcccgcctaaccgcgtgattgagttaggaactcaggtcgagatttaacctctcatcacc

SEQ ID NO: 37204 - DNA, 813 bp, Salmonella paratyphi A
atggcttcagaaaatatgacgccgcaggaatacataggacaccatctgaataaccttcagctggacctgcgtactttctcgctggtggatccgcagaaccccccagccaccttctggacgctcaatattgactccatgttcttctcggtggtgctgggtctgttgtttctggtgatgttccgtagcgttgctaaaaaagcgaccagcggcgtgccaggcaagtttcagaccgcgattgagctgatagtcggctttgtgcatggcagcgtcaaagacatgtaccatggcaaaagcaagctgattgcgccgctggccctgacgattttcgtctgggtattccttatgaacctgatggacttactgcctatcgacctgctgccgtatatcgctgagcattggctgggtctgccggcaacgcgcgtggtgccgtctgctgacgtcaacatcaccctgtcgatggcgctgggcgtattcatccttattctgttctacagcatcaaaatgaaaggcatcggcggcttcgcaaaagagttgacgctgcagccgttcaatcactgggcgttcattcctgtcaacttaatccttgaaggggtaagtctgctgtccaaaccggtttctctcggtctgcgactgttcggcaacatgtatgccggtgagctgattttcattctgattgctggtctgttgccgtggtggtcacagtggattctgaatgtgccgtgggccattttccacatcctgattattacgctgcaagccttcattttcatggttctgacgattgtctatctgtcgatggcgtccgaagagcat

SEQ ID NO: 37205 - DNA, 625 bp, Salmonella paratyphi A
gtgctcaacaaactctctcgtctgctggctgatgccggtatttctcttaccgatcaccagaaaacgctgctggtcgcctacgttgatatgctgcacaaatggaacaaagcatacaacctgacgtcagtgcgggatcccaacgaaatgttggtacgccatattctcgacagcatagtcgttgcgccgtatctgcagggacagcgttttatcgatgtaggaacaggaccggggctgccgggcatcccgctggctattgttctccctgacgcgcatttcaccttactcgacagcctgggcaagcgggtacgttttctgcgtcaggtccagcacgaactgaaactggaaaacatcacgccggttcaaagccgcgttgaagcctatccctccgaaccgccgtttgatggcgttatcagccgcgtttcgcatcgttgaatgatatggtgagctggtgtcaccatctgccgggagagaaagggcgtttttatgccttaaaagggcaattgccaggggatgaaattgcctcactacctgacaattttagcgtcgaatctgttgaaaaattaccgttccgcaactggaaggcgagcggcatctggtgattattaagtcaaacaaagtttaattt

SEQ ID NO: 37206 - DNA, 1873 bp, Salmonella paratyphi A
tttgacgtcattattattggcgggggtcatgcaggcactgaggccgcgatggcgcagcgcgtatgggtcaacagactctgcttttgacacacaatattgacacgttgggacagatgagctgcaacccggcgatcggcggtattggaaagggacatctggtaaaagaggtggatgcctcggcggtctgatggcgaaagcgatcgatcaggcaggtattcagtttaggatactaaacgccagcaaaggtccggccgttcgcgctacccgggctcaggcggatcgagtcttatacgccaggcggcgtaccgcgctggagaatcagccgaatctgatgatcttcagcaagctgttgaagatctgatcgtcgaaaacgatcgcgttgtcggcgccgtgacccaaatggggctcaaattcggcgaaagcggtggtactgaccgtcggaaccttcctggatggcaaaattcatattggtctggataactacagcggcggtcgtgctggcgatccgccatccatcccgctgtctcgccgtctgcgtgagcttcgtacgcgtcagccgcctgaaaaccgcacaccgccgcgtattgatgcgcgtactatcgatttcagcgtgttggctcaacagcatggcgataacccgatgccggttttctcgtttatggggaatgcttctcagcatccgcaacaggtgccgtgttacatcacgcataccaatgagaaaacccatgacgtgattcgtaataacctcgatcgtagcccaatgtacgctggcgtgatcgaagggatcggcccacgctactgtccttcgatcgaagacaaggtgatgcgttttgccgatcgtaaccagcatcagatcttccttgagccggaaggactgacctctaacgagatttaccctaacggtatctccaccagcctgccgtttgacgtgcagatgcagattgtccgttccatgcagggcatggagaacgcgaagatcgttcgccctggttacgcgattgagtatgatttcttcgacccgcgagatctgaaaccgactctggaaagtaaatttattcacggcctgttctttgctggtcaaatcaacggtactaccggctatgaagaggctgcggcgcagggcttgctcgctggtctgaatgccgcgcgtctttccgccgacaaagagcgctgggcgcctgcgcgttctcaggcttatctcggcgtgctggtggacgatctctgtacgctgggcaccaaagagccgtatcgcatgtttacctcccgcgccgaatatcgcctgatgctgcgtgaggacaacgccgatctgcgtctgaccgaaatgggccgcgagctggggctggtggatgatgaacgctgggcgcgcttcaacgagaagctggaaaatatcgaacgcgaacgtcagcggctgaaatcgacatgggtaacgccgtctgcggaatccgctgatgaagtgaatgcgcatttgaccacgccactctcccgtgaggccagcggcgaagatctgttgcgtcgtccggaaatgacatatgcgcagctcacttcgcttgccgcattcgcgcctgcgcttgaagatgagcaagccgctgaacaggtggaaatccaggtcaaatacgaaggctatatcgctcgccagcaggatgagattgaaaaacaactacgtaacgagaatacgttgctgcctgccacgctggattatcgtcaggtttccggtctgtcgaacgaagttatcgccaagctgaacgatcataaaccggcgtctatcggccaggcatcgcgtatctccggcgttacgccagcggcaatctccattctgctggtatggctgaaaaaacaaggtatgctgcgtcgtagcgcttgataacactaattt

SEQ ID NO: 37207 - DNA, 1185 bp, Salmonella paratyphi A
ctcaacccctactttggtgaattcggcggcatgtatgtgcccagatcctgatgcctgcgctgaaccagcttgaagaggccttcgtcagcgcgcaaaaagatcctgaatttcaggcgcaattcgccgatctgctaaaaaactacgcgggacccccaccgcgctgacgaaatgccagaacattaccgccggtacgcgtaccacgttgtatttaaagcgcgaagatttactgcacggcggcgcgcacaaaaccaatcaggtactgggtcaggcgctgctggccaaacggatgggtaaaagcgagattatcgctgaaaccggcgccggtcagcacggcgtcgcctctgcgctcgccagcgccctgctgggtctgaaatgccgtatctatatgggcgccaaagacgttgagcgccagtcgccgaacgtcttccgtatgcgtctgatgggcgctgaggtcatcccggttcatagcggctccgctacgctaaaagatgcctgtaacgaggcgctgcgcgactggtccggtagttatgaaaccgcgcactatatgctcggcacggcggcaggaccgcatccctatcccaccatcgttcgcgagttccagcgcatgattggcgaagagacgaaagcgcaaatcctcgacaaagagggccgtctgccagatgccgttatcgcttgcgtcggtggcggctcaaacgctatcgggatgtttgccgattttattaatgataccagcgtcgggctaataggcgttgaacctggcggtcacggtattgaaaccggcgagcatggcgcgccgcttaaacatggtcgcgttggcatctatttcgggatgaaagcgccgatgatgcaaacagcagacgggcaaattgaagagtcctattccatttccgccgggctcgatttcccgtccgttgggccgcaacatgcgtacctgaacagcatcggacgcgcggattatgtctccattaccgatgatgaggcgctggaagccttcaaaacgttgtgccgccatgagggaattatcccggcgctggagtcctcccacgcgttgggcacgctctgaaaatgatgcgcgagcagccggaaaaagagcaactgctggtggtcaatctctctggccgcggagataaagacatctttaccgtacacgatatcctgaaagcgcgaggggaaatctgatggaac

SEQ ID NO: 37208 - DNA, 541 bp, Salmonella paratyphi A
atgaagcagtttctggattttttaccgctggttgtcttttttgcgttttataaactttatgacatctatgcggcgacctccgcactgattgtcgcgacggcaatcgtgctgatttatagctgggtgcgctatcggaaaatagagaagatggcgctgattacctttgttctggttgccgtcttcggcggtctgacgctcttcttccataacgatgaatttattaaatggaaggtgacggttatttatgcgctgttcgccggcgcgctgttaataagccagtgggtgatgaaaaaaccgttaatccaacgtatgttaggtaaagaactgcgttgccgcagcaggtctggtcaaagctgaacctggcgtgggcgctgttttttattgcgtgcggtctggctaacatttatatcgccttctggttgccgcaaaatatctgggtcaactttaaggtcttcggactcacggcgtgacgctcatttttaccctgctgagcggcgtctatatctaccggcatctgccacaggaagataaatcataaccc

SEQ ID NO: 37209 - DNA, 398 bp, Salmonella paratyphi A
atgacaacaatggataatactcctcagggcgagctggttttacgtacattggccatgcctgccgataccaatgcgaacggcgatatttttggcggctggctgatgtcgcaaatggatattggcggcgcgatactggccaaagagatcgcgcacggtcgggttgtaaccgtacgcgtggaaggaatgacatttctgcgccccgtcgcggttggcgatgtcgtatgctgctacgccgctgcgttaaacgcggtacgacgtctattagcatcaatattgaagtctgggtgaaaaaagtcgcatcagaaccgattggacagcgctacaaggccaccgaggcgctgtttatttatgttgccgtcgatccagacggtaaaccccgcccgctcccggttcagggt

SEQ ID NO: 37210 - DNA, 603 bp, Salmonella paratyphi A
ttgctcagactgtttagctggcccgaaccggcaaaatacgtttttagtttctggggatttattgatctggtgacgattttgccgctgtacgtcatgtggctgtggccggaaattagcctgaactatatgtttgcctggcgcgctatgcgagcgattcgcgtgctgcgtatccttaaactgctacgctttatgccatccctgcgcgtattctggagcgccattattagcgcgcgtcatcagcttattctgttctattcatttattgcgatcgtgatgattatttttggtgccttgatgtatcttattgaaggaccgaaatatggcttcacgacgcttaatgcctcggtgtattgggcgatagtgacagtcacaaccgtggggtacggtgatattacgccgcatacgccgctgggacgtattgtcgcgtcggtgcttattttgattggttattcggtgattgcgattcctacaggactgattaccacgcacatgagcagcgcgtttcaaaaacgtcactggcagcgaaaatgtccgcagtgccagcaaagccagcatgaacatagcgcgcaatattgtaaccgatgcggcagtaagctaccggat

SEQ ID NO: 37211 - DNA, 636 bp, Salmonella paratyphi A
atgaaaaaatttacagtggcggcactggcgttaacaactcttctctcaggcagcgcgttcgcgcacgaagccggagaattctttatgcgtgcaggtccggcaaccgtcagacctacagaaggggcgggtggtacgctggggcatttaaacgggtttgatgtgagtaataacacgcaactcggcctgacattcatttacatggcgacggacaatatcggggttgaattgctggcggctacgccgttccgccataaggtgggtacgggcgcgacgggcgatatcgccacggtccacctgttacctccaacgttaatggcgcagtggtacttcggcgattccagcagcaaagtgcgtccttatgtcggcgtgggggtgaactacaccaccttcttcgataacgactttaacgataatggtaaaaagaccgggctgtcggatctgagctttaaggattcctggggcgcggcagggcaagttggggtagattacctgattaaccgcgactggttaattggcgcctctgtctggtacatggatattgatactaccgccaattataaaatgggcggcgtgcagcagcatgacagcgtgcgtctggacccatgggtatttatgttctcggcaggctatcgtttc

SEQ ID NO: 37212 - DNA, 1530 bp, Salmonella paratyphi A
atgcgaattggcataccaaaagagcggttacccaatgaaacccgtgtcgctgcgacgccgaaaacggtagagcagctactgaagctggggtttagcgtcgctatcgaaagcggggcgggtcaactggcaagttttgacgacaaagcgtttgcgcaggctggcgcggatattgtagacggcaatgctatctggcagtcggaaattattctcaaggttaatgcgcctgaagaagatgaaatcgctttactgaaccccgggactacgctggtcagttttatatggcctgcgcaaaatcctgggttaatggagaaacttgccgaacgtaaggtcacggtgatggcgatggactccgtgccgcgtatttcccgcgcgcagtcgctcgacgcgttaagctcaatggcgaatatcgcgggttatcgcgccattgtagaggccgcgcatgaatttgggcgcttctttaccggccaaatcaccgccgccgggaaagtgccgccggcgaaggtgatggtgattggcgcgggcgttgccggtcttgcggctatcggcgcggcaaacagcctgggggcgattgtccgcgcgtttgacactcgtcctgaagtcaaagagcaggtccagagtatgggggctgagttcctcgaactggattttaaagaggacgccgtagcgcgatgggttacgccaaagtgatatccgaggcattaatcaaagcggaaaaggagcactatgacgcccaagaaaaaaaaatcgatatcattcttaccaccgagttgattccgggcaaacaagcgcagaagctgattacccgagatatggtcgattcatatgaaggcaggcagcgtgcttgtcgacctggccgcgcagaatggcggtaactgcgaatataccgtcgccaatcaggttgtgacgacggacaatggcgtaaaagtgattggctacaccgatctaccggggcgtttgccgacgcagtcatcccagctttatggcaccaacctggttaacctgctgaagctgctgtgcaaagagaaagacggcaatattgacgtggattttgacgatgtcgtgatccgtggcgtgacggtgattcgcgacggcgacattacctggcctgcgccgccaatccaggtttttccgcgcagcacagccgcgcctaaagcagcacctgcgccaaaagagccggaaaagcccgcttcaccctggcggaagtatgcgttaatggcgctggcgatcattctttttggctggctggccgatgtcgcgccaaaagagttcctcggccattttaccgtgtttgcgctcgcctgcgtggttggttattacgtggtgtggaacgtgtctcatgcgcttcatacgccattaatgtcggtgaccaacgcaatttcagggattattgttgtcggggcattattgcaaattggtcagggcggctgggtcagcttcctgagctttatcgcggtgcttatcgccagcattaatattttcggtggcttcaccgtgactcagcgtatgctgaaaatgttccggaaaaactaa

SEQ ID NO: 37213 - DNA, 1378 bp, Salmonella paratyphi A
atggaaaaaaaactgggacttggcggcgctgaccgcgctggttttaagctcaatgcttggcgcaggtgttttcagtctgccccagaatatggccgccgttgccagtccggctgcgttgttaattggctgggccattaccggcgtggggatactcttactggcattcgcgatgttaatccttacgcgcattcgctccgagcttgacggcggtatctttacttacgcccgcgaaggcttcggcgaactgattggcttttgttctgcctggggctattggctgtgcgcggtcatcgccaacgtatcctatttggttatcgtcttttcagcgctgagtttctttaccgatacgcctgccctgcgtctgtttggcgacggtaatacctggcaggctattgtcggcgcttcagtcctgctctggattgtccatttcctcatcctgcgcggcgtacaaacggcagccagcatcaatctggttgcgactctggcgaaactgttgccgctctgcgcgtttattgtgctggctatcatgatgttcaaactggataccttcacactggacttcaccggtgttgaactcggtattcccgtatgggaacaggtcaagaacaccatgcttattacgctgtgggtgtttattggcgttgaaggcgccgtcgtcgtctcggcccgagcgaaaaataaacgcgatgtaggccgcgccacgctactggcagtactcgcagcgctgggaatatatctcctggtcacgctgctttctcttggcgttcttgcgcgtccggaactggcggagatgcgcaacccgtcgatggccggtctgatggtgaaaatgatggggccgtggggagaaattattattgcagcgggactgattgtgtctgtctgcggggcttatctaagctggactatcatggcggcggaggtgccgtttctggcggcagcctataaatccttcccgggcatcttcgcgcgacaaaatgcgcaaggtgccgcttctgcgtcgttatggctcaccaatatctgtgtgcaaatctgtctggtgctgatctggctgacctgttcggactacaacacgctattgacgattgcgtcagaaatgattctggtgccctactttctggtcggcgcatttctgctgaagattgcagcacgtcccctccatcgggcggtcggtatcggagcctgtatttatggcttatggttattatatgcgtcgggccctatgcacctgctgctgtccgtcgtactgtacgcgcctggattactggttttcctgtatgcgcgtcggacgcacaagcatgacaatgtattaaatcgtcaggaagtcgtgctgattggtttattgctggtcgcggcggttccggctacgtggatgctggtg

SEQ ID NO: 37214 - DNA, 1157 bp, Salmonella paratyphi A
atgaaaagaaaagtattggcacttgtcatcccggctctgctggctgctggcgcggcacacgccgctgaaatttataacaaagacggcaacaaactggacctttacgggaaagtagacggcctgcactatttctctgatgactcttctaaagatggcgaccagacttatatgcgtttcggctttaaaggcgaaacacagattaatgaccaactgaccggttacggccagtgggaatataacgttcaggctaacactaccgaagcgaaggcgcgaactcctggactcgtctggcattcgcggtctgaaattcggcgactacggctcattcgactatggtcgtaactacggcgtcctgtacgacgtagaaggctggaccgatatgctgcctgagttcggcggcgactcctatacttacgctgacaactacatgaccggtcgtgctaacggtgtggccacctaccgtaacactgatttcttcggtctggtagacggtctgaacttcgcgttgcaatatcagggtaaaaatgatagcaaagcgctgacgatgtaaatatcggtaccaataaccgtaatgatggcgacgatattcgttacgataacggtgatggcttcggtatttctactacctatgatattggcatgggcttcacgcaggcgctgcgtataccacttccgatcgtactaatgagcaagtcaatgcaggcggtaccattgctggcggcgacaaagcggatgcatggacagctggcttgaaatatgatgccaacaacatctatttagcgactatgtattctgaaacccgtaatatgacgccttatggtaaaacggacaaggattatgctggcggcgtagcaaacaaaacgcaaaacttcgaagttacagcccaatatcaatttgacttcggtctgcgcccggcggtttctttcctgatgtctaaaggtaaagatctgacctataacaacgttaatggtgatgataaagacctggttaaatatgctgatgtaggtgctacctactatttcaacaaaaacttctccacctatgttgattataaaatcaacctgctggatgatgacgacccgttctataaagatgccggtatcagcactgatgatatcgtcgcgctgggtatggtttaccagttctaattattcatt

SEQ ID NO: 37215 - DNA, 272 bp, Salmonella paratyphi A
atgtcacataccatccgggacaaacaaaagcttaaagccagaaccagcaagattcagggacaggtgatagcgctaaaaaaaatgctggatgaaccgcatgaatgcgcggccgtgttacaacagatcgcggcgattccggcgcggtaaatggcttaatgcgtgaggtgattaaagggcatctgaccgagcatatcgttcatcagagtgatgaagccagacgtgaagaagatctggacgtaatattaaaggtgctggattcttatataaaatag

SEQ ID NO: 37216 - DNA, 504 bp, Salmonella paratyphi A
atgacgccccacataaaacaactaagaatcattctcatgggtgaatttccgacacttcttcagcaaggaaacggctggttcttcattcccagcgccattttattaggtattttgcacgggcttgaaccagggcactccaaaactatgatggcggcttttatcattgccattaaaggtacggttaaacaggctgtcatgctcggtctggcagcaacgctttctcataccgcgatcgtctggttaatcgctctgggtgggatgtatcttagccgggcattcaccgcacaatcagtggaaccatggctgcagttaatttctgcgatcattattctgagcaccgcgtgctggatgttctggcggacatggcgaggcgagcagcagtggctggcgggaaaccaccatcacgaccatgaccatgaccatgaccatgaccatgaccatcatggccacatacatccggaaggcgcaacgtcaaaagcgtatcaggatgcccaggggatcctc

SEQ ID NO: 37217 - DNA, 1176 bp, Salmonella paratyphi A
gtaatgaaagaggttgtgatagtgggggctttacggacacccatcggctgttttcagggaacgctggcccgtcattccgccgtagagctggggagtatggtcgtaaaagcgttaattgagcgcaccggcgtggacgctaacgctatcgatgaggtcatcctcggtcaggtgctgacggctggcgccgggcagaatccggcgcgccagtcagccatcaaaggagggctgccgactaccgtttccgccattaccattaatgacgtttgtggttccggtttaaaagcgttgcacctggcgacgcaggctattcagtgcggcgaagcggacattgttattgcgggcgggcaggagaatatgagccgtgcgccgcatgtcctcaatgacagccgtagcggcgcgttgcctgatgccgacaatctggtggatagtctggtacatgatggcttatgggatgccttcaacgattatcacattggcgtgatggcagaaaacctggcgcgggaatatggcattagccgcgagttacaggatgcttatgcgctcagttcgcagcaaaaagccagggccgcgattgataccggacgttttaaagatgagattgtccccatcgtcacgcaacgtaatgggcagaccgcaattgtcgatacggatgaacaaccgcggccgacccagtgcggagggttagccctgctgcatccggcgtttgatagtttaggttcggtgacggcgggtaatgcctcctcaatcaacgatggcgccgcgcggtgatgatgatgagcgagggatacgaggcgctggggcttgccgtgcctggcgcgcatccgtatgccacgtcggttcgatcctgcgctaatggggattgcgccggtatatgctacccgggctgtctgagagcgtgcggctgggcaactgacggaggtcgaccttatcgaagccaacgaagcgtttgccgcccaggcgttgtcggtaggaaaaatgctggaatgggatgagcgacgggtaaacgttaatggcggcggattgcgctggggcatcccattggcgcttccggctgtcgaattctggtttcactggtgcacgaaatggttaaacgcgacgcgtaaaggcctggcgacgctgtgtatcggtggcggtcagggcgttgctttaaccattgaacgcgactgatcctgcgcc

SEQ ID NO: 37218 - DNA, 822 bp, Salmonella paratyphi A
atggagcctcaacccccacgtcttaaacccggaaaaatccttgacactctgggtgctatgcaaaaaagcctgacacgtgcctcccagcgtattgtgcaatatattttagccttccccagacaggtgacacagtcatctattgccgatttgtcgcgcgacacacaggccggagaagccacggttattcgcttttgtcgcaccctgggctataaaggttttcaggattttaaaatggacctggccattgaacttgccactaccgagtctgatgacagtagtcctctactggatgccgaagttagcgaatccgacgatgcccacgccattggtttaaaattgcagaacaccattagtaatgtattatctgaaacgctaaatctgcttgatatgcaacaagttctcggtgtcgtggacgccctacgtcactgtcactcagtttatatctttggtgtgggctcatcggggatcacggcgctggatatgaaacacaagctaatgcgtattggtttacggggcgatgcggtaagcaataaccattttatgtacatgcaggctacgctattaaaagcaggcgatgtcgcgatgggtgtcagtcactcgggcacatcgccagaaacagtgcattcactccgattggcccgacagctggcgccaccacagtcgccattacccataatctgggttctccattatgtgaagaggccgatttttgcctgatcaatggtaatcggcaaggaatgttgcagggtgactcgatcggtacgaaagccgcgcacgttttcgtctttgaacctgctctatacccttctggtacaggtcctc

SEQ ID NO: 37219 - DNA, 1220 bp, Salmonella paratyphi A
tggtatagcgagataactcgtccacaaaaaaatgctttattttcagcatggctgggttacgtttttgatggcttcgactttatgctgattttctacattatgtatctgatcaaggctgacttaggattgacagatatggagggcgcattccttgccacagcggcctttattgggcgaccatttggcggggcgctatttggtctgctggcagacaaatttggccgtaagccgttgatgatgtggtcgatagttgcctattctgtaggtacagggttaagtggcctggcttccggtgtaattatgctgacgcttagtcgcttcattgtcggtatggggatggcgggggagtatgcttgcgcttctacttatgccgtggaaagttggccaaagcatttaaaatctaaagcgagcgcatttctggtttcaggtttcggtattggtaacatcatagcagcctattttatgccgtcatttgccgaagcgtatggttggcgtgctgctttttttgtcggtttgctacccgttcttttagtaatctacatccgggccagggctcctgaatctaaagagtgggaagaagccaaactcagtggtcccggaaagcattcacaaagtgcctggtcagttttctctttgtcaatgaaagggctatttaatcaagctcaatttccactaacattatgtgtatttattgttctgttctctattttcggcgcaaactggccgatctttggtctactgcctacatatttggcgggagagggctttgatacgggcgtggtctctaatttaatgacggcggcggcattcggcactgtattgggaaatatcgtttggggtctgtgcgcagatagaattggtttgaagaaaacgttcagcattggtcttctcatgtcctttttattcattttcccgttattcagaattccgcaagataattatttactgctgggcgcatgtttattcggtttaatggcgactaacgtaggtgttggcgggttggttcccaaatttctctacgactactttcctcttgaggttcgtggtttgggtaccgggctgatttataatcttgctgcgacatcaggcacattcaattcaatggcggcgacctggcttggaataacaatggggctagggctgcgctaacgttcattgttgctttctggaccgcaacaattctactcattattggcctatccattccggatagactaaaa

SEQ ID NO: 37220 - DNA, 1531 bp, Salmonella paratyphi A
gacagcctgatccacccgctgttgatgcgtaacggcgacagtcgtccattacagcgtccgacgacgccgctgccttcgttagatcttctgacgccgccgccgagcgaagttgaaccggtagatacctttgcgctggaacaaatggcgcgtctggttgaagcgcgtctggcggatttccgcattaaagctgatgtggtgaactattcgccaggcccggtcattactcgctttgaactgaatctggccccgggcgttaaagcggcgcgtatctccaacctttcccgggatctggcgcgctccttgtcaacggtagccgtacgtgttgtggaagtcattccaggcaaaccttacgtagggttggaattgccgaacaagaaacggcaaaccgtttatctgcgcgaagtgttggataacgccaaatttcgcgagaatccgtcgccgcttaccgtggtgttaggtaaggatatcgcgggcgatccggtagtggcggatctggcgaaaatgcctcacctgctggtggccggtacgaccggttccggtaagtcggtcggggttaacgccatgatcctcagtatgctgtataaagcgcagccggaagacgttcgctttatcatgatcgacccgaaaatgttagaactctcggtctatgaaggtataccgcatctgctgacggaagttgttaccgacatgaaagacgcggctaacgcgttacgctggagcgtcaatgagatggagcgtcgctataagctgatgtccgcgctcggcgtgcgtaatctggctgggtataacgagaaaatcgccgaagcggcccgcatgggacgcccgattccggacccgtactggaagccgggcgacagtatggatgttcagcatccggttctggaaaaactcccgtatatcgtggtactggttgatgaatttgccgacctgatgatgaccgtcggtaaaaaagttgaagagctgatcgcgcgtctggcgcagaaagcgcgccgcggggattcacctggtactggcgacgcagcgtccgtcggtcgatgtgattactggtttaattaaagccaacattccaacccgtatcgcttttaccgtatccagcaagatcgactcccgcaccattcttgatcagggtggcgctgagtcgctattgggaatgggggacatgctctattccggaccaaactccaccatgccggtacgtgtccatggggcgtttgtgcgtgaccaggaagtccatgcggtggtgcaggactggaaagcgcgcggtcgtccgcaatatgtggatggcattacctccgacagcgaaagcgaaggtggcggtggcggttttgacggcggcgaagaattagatgcgctattcgatcaggccgttaatttcgtcacccagaagcgtaaagcgtccatttccggcgttcagcgtcagttccgcatcggctataaccgtgcggcgcgtattatcgaacagatggaagcgcagggtattgtcagcgctcaggggcataacggtaatcgtgaagtgctcgtccgccgcctt

SEQ ID NO: 37221 - DNA, 1340 bp, Salmonella paratyphi A
gtgagcaatctgtcgctcgatttttctgataatacgtttcaaccgctggccgcgcgaatggcgcggaaaatttagcgcagtatatcggccagcagcatttgctggcgcaggtaagccgttgcctcgcgctattgaggccgggcatctgcactccatgattttatgggggccgccagggacggggaaaaccacgctcgctgaagtgatcgcccgctacgccagcgccgatgtcgagcgtatttccgccgtcacttctggggtaaaagagattcgtgaagctatcgagcgcgcccgccagaatcgtaatgccggtcgccgtaccatcctgtttgtcgatgaagtgcatcgctttaacaaaagccaacaggacgcctttttaccgcatatcgaagatggcactatcacctttatcggcgcgaccacggaaaatccctcttttgagctgaactcggcgctattgtcgcgagcgcgggtctatctgctgaaatcgttgaccactgacgatattgagcaagtactggaccaggcgatgcaggacaaaacgcgtggttacggcgatcaggatatcgtgttaccggatgagacacggcgagcgattgctgagttggtcaatggcgacgcgcggcgcgcttaaatacgctggaaatgatggctgatatggcggaggcggatgacagcggcaaacgcgttttattgcccgccttgttgaccgagatcgccggcgagcgcagcgttttgataacaaaggcgatcgcttctacgatcttatttccgccttacataaatcagtgcgcggcagcccggatgccgccctctattggtatgcccgtatcattaccgcgggaggcgatccgctgtacgtggcgcgtcgctgcctggcgattgcctcggaagatgtgggtaatgccgatccgcgcgcgatgcaggtcgccattgccgcgtgggattgtttcacccgcgtcggcccggctgaaggcgaaagggcgatcgcgcaggctatcgtttatctcgcctgcgcgccgaagagcaacgccgtctataccgcctttaaggctgcgctggccgatgcgcgcgaacgtcctgattatgacgttcctgtccatctgcgtaatgcgccaaccaaactgatgaaagagatgggctatggccaggagtaccgctatgcccacgatgagcccaatgcctatgctgcgggtgaagtgtacttcccgccggaaatcgcgcaaacgcgctattatcatccgacaaatcgtggtctggaaggcaagattggcgaaaagctcgcctggctggctgaacaggatcaaaatagccccacaaaacgctaccgctagtgtaaa

SEQ ID NO: 37222 - DNA, 1296 bp, Salmonella paratyphi A
  misc_feature (262)..(262): n=g, a, t or c
atgctcgatcccaatctgctgcgtaatgagccagacgcagtcgctgaaaaactggcacgccggggctttaagctggatgtagataagctgcgcgctcttgaagagcgtcgtaaagttttgcaggtcaacacggaaaacctgcaggcggagcgtaattctcgatcgaaatccatcggccaggcgaaagcgcgcggggaagatatcgagcctttacgcctggaagtgaataaactgggcgaagagctggatgcggcgaaagcgnctggataccttgctggcggagatccgcgatatcgcgctgacatccaaacctgcctgcggatgaagtgccggtagtaaagatgaaaacgacaacgtgaagtcagccgctgggggtacccgcgtgagtttgattttgaaatccgcgatcacgtcaccttaggggaaatgcactccggcctcgactttgccgccgcggttaagctgaccggctcccgttttgtggtgatgaaaggacagattgcgcgtatgcatcgcgcattgtcgcagttcatgttggatctgcatacggaacagcacggctatagcgaaaactacgtgccgtatctggttaaccacgacacgctgtatggcaccggtcaactgccgaaattcgcaggcgacttgttccatacccgtccgctggaagaagaagcagacagcagcaactatgctttgatcccgacgggcgaggttccgctgaccaatctggtacgcgatgaaatcatcgacgaagatcagctgccgattaaaatgacggcgcatacgccttgtttccgttctgaagcaggttcttatggtcgtgatacccgtggcctgattcgtatgcatcagtttgacaaagtggaaatggtgcagatcgttcgcccggaagattctatggctgcgttggaagagatgaccggtcacgcggaaaaagtgctccagctactgggactgccgtaccgtaaaattattctgtgcactggcgatatgggcttcggcgcctgcaaaacctatgacctcgaagtctgggttccggcgcagaatacctaccgcgagatctcttcctgctctaacgtctgggacttccaggcgcgtcgtatgcaggcacgctgtcgcagcaagtccgacaaaaagacccgtctggtccataccctgaatggttctggtctggcggtaggtcgtaccctggtggccgtgatggaaaactatcagcaggctgatggccgcattgaagtgccggaagtattacgtccgtacatgaacggactggaatatatcggctaatcctcgctt

SEQ ID NO: 37223 - DNA, 2413 bp, Salmonella paratyphi A
gaggtgagccgtcgtggtttagtcaaaaccaccgcgttaggcgcctggcgatggccagtagcgcatttaccctgccatttacccgcatcgctaacgccgcagaggcaataagcccggcgaaaaccggcgagaaagtcgtctggagcgcctgtacggtaaactgtggcagccgttgtccgctacgtatgcatgttgtggatggcgaaatcaaatatgtagaaacggataataccggaaacgatgattacgatggcctgcatcaggttcgcgcctgcctgcgcgggcgttccagtcgctggcgcgtttatagcccggatcgcattaagtatccgatgaaaagagtgggaaaacgcggcgaaggtaaatttgagcgtattagctgggacgaagcctacgatatcattgccaccaatatgcagcgtcttatcaaagagtatggcaacgagtccatttatctgaactatggcacgggaacgctgggcggcactttgacacgttcatggccgccgggaaaaacgctggtcgctcgtctgatgaactgctgcggcggttatcttaaccactacggtgattactcttccgcgcaaatcgcagcgggtctgaactacacctatggcggctgggcggatggcaatagtccatccgacattgaaaacagtaagctggtggtgttgtttggtaataaccctggcgaaaaccccgcatgagcggcggcggcattacctggtttctggagcaagcgcgtgaacgctcaaatgcgcgcatgatcgtgatagatccgcgctataccgataccgctgccggacgtgaagacgagtggataccgattcgccccggcaccgatgccgcgctggtggcgggaattgcctgggtattaattaacgaaaatctcgttgaccagccttttctcgacaactattgcatcggctacgatgaaaagacccttccggctgacgcgccccccaatggccattataaggcttatattttgggccagggcgaggacggtatcgcgaagacgccggagtgggcggcgcaaattaccggtatcccggcggatcgcattattaagctggcgcgagaaatcggcagcgctaaacccgcctatatttgccaggggtggggaccacaacgtcatgctaatggagaaatcgccacgcgcgccatctcgatgctggcgatcctgacgggtaatgttgggattaacggcggtaacagcggcgcgcgcgaagggtcttatgccctaccatttgaacgtatgcccacgttggaaaatccggttgaaaccagcatctccatgtttatgtggaccgatgccattgaacgcggcccggaaatgacggcgctgcgtgatggcgtgcggggtaaagataagctggacgtgccgatcaaaatgatctggaactatgctggcaactgtttgattaaccagcactctgagattaaccgcacccacgaaatcctgcaggatgacaagaaatgcgaaatgatcgtcgttatcgactgtcatatgacctcgtcggcaaaatacgccgatattctgttgcctgattgtactgcttctgagcagatggactttgcgctggatgcctcctgtgggaacatgtcttacgttatcttcactgaccaggcgattaaaccgcgcttcgagtgtaagacgatttatgagatgaccagcgaactggcgaaacgtcttggcgtggaacaacagtttaccgaaggacggacgcaagaagagtggatgcgtcatctgtacgaacagtcgcgtaaatccattccgaatctgcccacctttgaggagttccgtaagcaaggcatcttcaaacagcgtgaccccgaaggccaccatgtcgcctataaagacttccgcgaagatccgcaagcgaatccacttacaacgccatcgggcaagattgaaatctattcacaggcgttggcggatatcgccgccacttgggagctgccggaaggcgacgtgatcgatccattaccgatctacacgccaggttttgaaaactataacgatccgctaacggataaattcccgctgcagttgacgggtttccactataaagcgcgtgtgcattccacttatggcaacgtagacgtactgaaagccgcctgtcgccaggaaatgtggattaacccaatggatgcgcagaaacgcggtatcaacaatggcgataaagtccgcatcttcaacgatcgcggcgaagtacacatcgaggctaaagtgacgccgcgcatgatgccgggcgtggtcgccctgggagaaggcgcatggtatgacccggatgcaaaacgcgtggatcagggcggatgtattaacgtactgacgacccaacgtccttctccgctggcgaaggggaacccgtcacatacgaacctcgttcaggttgaaaaggcgtaagga

SEQ ID NO: 37224 - DNA, 955 bp, Salmonella paratyphi A
atgtacaatggcttttcaggcagagacataacctggaggttatagcgaatggcgaactgggcgcagaaattgaaattacatcacctgcaaacgctggttgcgctgggcgaacagggcaacctgacgcacgtcgcccggatgatgaatatctcccagccggcgctatcgaagtggctatctcaactcgaagatgagataggcatcacgctttttgagcgccacagtaaagggctacggccctcggaaggcggtaaattactgatccagcacgcccagcgcctaattaacgatctggagcgttcacagtatgaaatcgcccgtttcaagcagggcggcctggttggcagcctgaagatcggctgttcgcccgtggcgactgactgcgtatcacaggcgattctgagcctgcttaacgaaatgccgacgctgcatctgaatattgaagagaaggtaatgacgccgctgctgcacgatttgcttgccggtcaggtggatgtggtggtagggcgtgtcggcggccgcgccctgcaactgccgcttaattatcaggtactttataccgagccggtctgctttgtggcgcgtccgcaccatcagctggccggcgagcgcagatcgcctggagcgatctggcgcactggcggtggatagtctggccaaccggcacccctattcgcatcagtattgataacgccctcgtcgataatggcgtcatgctcccggaaaacaccattgaatcggcgtcaatgaacgtcagcaccaatttcggcaaagcagcgatatgatctctattctttctttacgcgtggcgcaacgctatgccagccaggggcaactggcgattttaaacttgccaagaattgagcaaaaaggcagcgtagggatgttctggcgtaagaatgagacgccgtctttggccctgagtcgctttttgtattttttagcccaggtttaa

SEQ ID NO: 37225 - DNA, 1489 bp, Salmonella paratyphi A
gaatatttgttggaaatgcgtggcattaacaaatcatttcccggcgtgaaagcgcttgataatgtcaacttaaacgttcgtccgcactctattcatgcattaatgggtgaaaacggcgcaggcaaatcaacattattaaaatgtcttttcggtatttatcaaaaagactccggcagcattgtatttcagggaaaagaagtggacttccattcggcgaaagaagcgctggagaatgggatttcgatggtacaccaggagttaaatctggtattacaacgttcggtcatggataacatgtggttgggacgttatcccaccaaaggtatgtttgtcgaccaggataaaatgtaccaggataccaaagcgatatttgatgagctggatatcgatattgacccgcgcgcgcgtaggaacgttatccgtttcgtaaatgcagatgatcgaaattgcgaaggcgttttcctataatgctaagatcgttattatggatgaaccgacctcatcgttaactgagaaagaggttaatcatctgttcaccattattcgcaagctgaaagaacgcggctgcggtattgtttatatctcgcataaaatagaagaaatttttcaattgtgcgatgaaattactatcttgcgcgacggtcagtggattgccacccagccgctggaagggctggatatggataagatcattgcgatgatggtcgggcgttccctgaaccagcgcttcccggataaagaaaataagccgggcgacgtgattctggaggtacgtcacctgacctcgctgcgccagccttccattcgcgatgtctcctttgatttgcacaagggcgaaattctgggcattgccggtctggttggggcaaagcgtaccgatatcgtcgaaacgctgtttggcattcgtgagaagtcgtccgggacaatcactttacatggcaagaaaattaataatcacactgcgaacgaagcgattaaccacggttttgcgttggtgacggaagagcgtcgttccaccggaatttacgcctatctggatatcggatttaactcattaatttcgaatatccgtaattataaaaataaagtgggcttactggataattcccgtatgaaaagcgacacccaatgggtcattgattccatgtgggtaaaaacgccggggcatcgcacgcaaattgactcactttccggcggcaatcagcaaaaggtgatcattggacgttggctattaacgcagccggaaatattaatgctggacgaaccgacccgcggtattgatatcggcgcaaaatttgaaatttatcagcttattgcggaactggcgaaaaaaggcaaggggatcatcattatctcttctgaaatgccggagctgttagggattaccgatcgtatcctggtgatgagtaacggtctcgtttccggcattgtcgatactaaaacaacaacgcaaaacgaaattttgcgtcttgcttctttgcacctttaa

SEQ ID NO: 37226 - DNA, 241 bp, Salmonella paratyphi A
atggatgtacagacgatatttgtcatattagcctttctgctactcccgcttttttgcttctgtgaggcctggaaaggctggcgaaccggcgcggtagataaagttgtcaaaaatgcgcgaaaaccggtttatgtctatcgccatgccgatcccgtacaatattggtcttatctttttctttataccggttgccggtttttaatttactggaatgattatttatcttcttttttatcgttaa

SEQ ID NO: 37227 - DNA, 757 bp, Salmonella paratyphi A
atgaagattaaaactggcgtaggcatcctcgcattatccgcacttacgacgatgatgatttccgccccggctctcgccaaaattgaagaaggtaaactggttatctggatcaacggcgacaagggctataacggtctggccgaggtcggtaaaaaatttgagcaagacaccggcattaaagtgaccgttgagcacccggataagctggaagagaaattcccgcagggtggctgccaccggcgacggtcctgacattatcttctgggcgcacgaccgttttggcggctacgcgcagtctggtctgctggcggaggttactccggataaagcgtttcaggacaaactctatccgtttacctgggatgcggtacgttataacggcaagctgatcgcctaccccatcgccgttgaagccctctccctgatttataacaaagacctcgtcccgaacccgccgaaaacctgggaagagatcccggcgctggataaagagctaaaagcgaaagggaagtcggcgataatgttcaacctgcaagagccgtatttcacctggcctttgatcgccgctgacggcggttacgcgttcaaatttgaaaacggcaagtatgacgtgaaagacgttggcgtcgacacagcccggcgcgaaagcaggtctgactttcctgatcgatatgatcaagaacaaaaatatgagcgccgataccgattactccatcgccgaagcagccttcaataaaggcgaaacggcaatgaccat

SEQ ID NO: 37228 - DNA, 210 bp, Salmonella paratyphi A
atgatgaataaagacgaagccggcggtaactggaaacagtttaaaggtaaaatgaaagaacaatggggcaaactgaccgatgacgatatgaccgttatcgaaggtaaacgcgaccaactggtaggtaaaatccaggagcgttacggttaccagaaagatcaggcggaaaaagaggttgttgactgggaaacccgtaacaactatcgctgg

SEQ ID NO: 37229 - DNA, 1115 bp, Salmonella paratyphi A
atggcgagcgtacagctacgaaatgtaacgaaagcctggggtgacgtggtggtatcgaaagatattaacctcgatatccatgacggggagttcgtggtgtttgtcggaccgtcaggctgtggtaaatcgaccttgctgcgtatgatcgccgggcttgaaactatcaccagtggcgacctgtttatcggggaaacccgtatgaatgatattccgcctgtcgagcgcggcgtgggcatggtattccagtcttatgcgctctatccccatctctccgttgcagaaaacatgtctttcggcctcaagctggcgggcgccaaaaaagaggtaatgaatcaacgcgtcaatcaggtggcggaagtactgcaactggcgcatctgctggaacgtaagccaaaagcgctttccggcggtcagcgtcacgccgtagcgattggccgcacgctggtggcggagccgcgtgtgtttttgctggatgaaccgctctctaacctggatgccgcgctacgcgtgcagatgcgcattgaaatttctcgcctgcataaacgtctgggccgcacgatgatttacgtcacccacgatcaggtcgaggcgatgacgctggccgacaaaatcgtggtgctggacgctggtcgcgtcgcgcaggtcggtaagccgctggagctgtaccactatccggcggaccgctttgtcgcgggctttatcggctcgccgaagatgaacttcctgccggtgaaagtgaccgccaccgcaattgaacaagtccaggtcgaactgccgaatcgccagcaaatctggctgcccgtcgaaagtcgcggcgtgcaggtcggcgccaatatgtctctaggcattcggctgtaacacctgctgccgagcgatatcgccgatgtcactcttggaagtgaagtccaggtggtcgagcagttagggcacgatacacaaattcatatccagatccccgccatccgtcaaaacctggtttatcgccagaatgacgtggtgctggtagaagagggcgccacattcgctatcggcctgccgccagagcgctgtcatctgttccgcgagatggcagcgcatgtcgtcgtctgcatcaagagccgggtgtttaaggcctc

SEQ ID NO: 37230 - DNA, 1264 bp, Salmonella paratyphi A
ttccacggttacgcccgttccggtattggctggacgggaagcggcggcgaacaacaatgtttccaggtgaccggtgcacaaagtaaataccgtctcggtaacgaatgtgaaacctatgcggaactgaaactgggccaggaagtgtggaaagagggcgataagagcttctatttcgacaccaacgtcgcctattcggttaaccagcagaacgactgggaatcgaccgatcccgccttccgcgaagaaacgtgcagggtaaaaacctgattgaatggctgccgggctctaccatctgggccggtaagcgcttctatcagcgtcatgacgtacacatgatcgacttctactactgggatatttcaggtcctggcgcaggtatcgaaaatatcgatctgggcttcggtaagctttcgctggcggcgacccggtctactgaagcgggcggctcttacaccttcagcagccagaatatttatgatgaagtaaaagataccgctaacgacgtctttgacgtacgtctggctggtctgcaaacgaacccggacggcgtactggagttgggcgttgactacggtcgcgccaatacgaccgatggttataagctggttgatggggcatcgaaagacggctggatgttcaccgccgaacacacgcaaagcatgttgaaaggctataacaagtttgtcgtgcaatatgccaccgatgccatgaccacgcagggtaaaggccaggcgcgcggttccgacggttcttcatctttcactgaagaattgcctgatggaaccaaaattaattatgccaataaggtcatcaataataatggcgatatgtggcgtattttggatcatggcgccatctcgcttggtgataaatggggtttgatgtacgtcggtatgtaccagaatatcgattgggataataacctgggtactgagtggtggaccgtgggcgtacgtccaatgtacaagtggacgccaatcatgagtaccctgctggaagtcggctacgacaacgtgaaatctcagcagaccggcgatcgtaacaatcaatataaaatcaccctggcgcaacagtggcaggcgggcgacacgatctggtcgcgtccggctatccgtattttcgccacctacgcgaaatgggatgagaaatggggctatatcaaagacggcgataacatttcccgttatgccgcagcgactaactccggcatttccaccaacagccgtgcacctacgatgagtggaccttcggcgcccagatggaa

SEQ ID NO: 37231 - DNA, 996 bp, Salmonella paratyphi A
atgcagcctgaaacccagtcctccgctttacctgcttatcgcttctccatcgcgcctatgctcgactggacggacagacattgccgctatttcctgcgtttgctgtctcgccagacgctgctctacaccgaaatggtgaccacgggcgcgattattcacggtaagggtgactatctggcttatagcgaagaagagcatccggtcgctctacagcttggtggaagcgatccggctcagcttgcgcattgtgcaaagctggcggaagcgcgtggctacgatgaaattaacctcaacgtggggtgcccttccgatcgcgtgcaaaatggtatgtttggcgcctgtttgatgggcaatgcgcaactggtcgccgattgtgttaaagccatgcgtgatgtcgtctcgattccggtgacggtaaaaacccgcattggtattgacgatcaggacagttatgcgttcctgtgtgatttcattaatacggtttccggtcagggcgaatgcgagatgtttattatccatgcgcgcaaagcctggctttctggcttaagcccgaaagaaaatcgtgagatcccgccgctggattacccgcgcgtctatcagctaaagcgggattttccgcacctgaccatgtccattaacggcggcatcaaatctctggaagaggcgaaggagcacctgcgccatatggatggcgtcatggttggccgcgaacgttatcagaatccgggtatactggccgcggtggatcgggagatctttggcgccgataccaccgatgccgacccggttgcggtggttcgcgcgatgtatccctatattgagcgtgaattgagccagggagcgtatctggggcatatcactcgccatatgctggggttgttccagggcatccccggcgcgcggcagtggcgtcgctatctgagcgaaaacgcccataaagctggcgcggatgttgctgtactggagcaggcgctaaaactggtggcagacaagcgt

SEQ ID NO: 37232 - DNA, 366 bp, Salmonella paratyphi A
atggccaataataccactggattcaccagaattatcaaagcggcaggatattcctggaaaggatttcgcgccgtatggactcacgaagcggcgtttcgccaggaaagcctcgcggtattgctgggcgtcatcatcgcctgctggctggatgtggatgcgattacccgtgtgttattgataggttccgttttacttatcatgattgttgaaatcctcaacagcgctattgaagcggtcgttgaccgcatcggttctgaataccatgagctttccggccgtgcgaaagatatgggatcggctgcggtgctactgtctattttcgttgccctgatgacctggggcatcctgttatggtcacattttcga

SEQ ID NO: 37233 - DNA, 2023 bp, Salmonella paratyphi A
atggaaccaatcgaacaacaactgacagaactgcgaaccacgctcgccatcatgaatatctgtatcatgtgatggatgcgccagagattcccgacgccgaatatgaccgcctgatgcgggaactgcgagagctggaggcgcaacgtccggaccttatcacgccggattcgcccacgcagcgcgttggcgcggcgccgctgacggcattcaaccagattcgccatgaagtaccgatgctgtcgctcgataacgtatttgatgaagaaagcttcctggcgtttaacaagcgagtgcaggatcgtctaaaaagcacggaaaatgtcatctggtgctgcgagctaaagctggatggctggcggtcagcattctgtatgaaaacggcgtgctggtgagcgcagcgacgcgtggcgacggcaccaccggtgaagatatcacttcaaacgtgcgcacgattcgcgccattccgttaaagctgcacggcgataacattccggcgcgtcttgaagttcgcggagaggtatttttaccgcaggccgggtttgaaaagatcaatgaagacgcgcccgcactggcggcaaagtgtttgctaacccgcgtaacgcggcggcgggctcgctgcgtcagctcgatccgcgtattacggcgaagcgaccgctaacatttttctgctacggcgtcggtattctggaaggcggcgagttgccggatacgcatctgggacgtttgctgcaatttaaagcgtggggttaccggtcagcgagcgcgtgacgctgtgcgattctccccaggcggtactggatttttatcacaacgtcgaaaaagatcgccccacgctcggttttgatatcgacggcgtggtgattaaggtcaactcgctggctttgcaggaacagctgggctttgtgcgcccgcgcgcgctgggcggtggcgtttaaattccctgctcaggagcagatgacttttgtgcgcgatgttgagtttcaggttgggcgcactgggcgatatacgcggtggcgcgtctggaaccggttcaggtggctggtgtgctggtcagcaatgccacgttgcataatgccgatgaaattgagcggcttggcttgcgcattggcgataaggtggttatccgtcgggcaggcgatgtgatccctcaggtggtcaacgtggttctgtccgaacgccctgaagagacgcgtccgattgtgtttccaacgcactgtccggtgtgcggatcggacgtagagcgcgtcgaaggcgaagccgttacccgttgtaccggtgggctgatttgcggcgcgcagcgtaaagagtcgctgaaacattttgtgtcgcgccgggcgatggatgtagacgggatgggcgataagatcatcgaccaactggtggaaagggagtatgtccatacgccagcggatctgttccgtctgacggcgggtaaactgaccggcctggaccgaatggggccaaagtccgcgcaaaatgttgtaaacgcgctggaaaaagccaaagcgacgacctttgcgcgttttctctatgcgctgggcatccgtgaagtgggtgaagcgacggcggcggggttggcggcttatttcggcacgctggaggcactacaggccgccaccattgacgagttgcagaaagtacctgacgtggggattgtggtcgctacgcacgtctttaacttttttgccgaagagagcaatcgtgatgtgattgtgcagctactggcggaaggggttcactggcccgcgccggtagtcattaatgtgcaagagatcgatagcccgtttgccggtaaaaccgtggtactaaccggtagcctgagccagatgtcccgcgatgacgctaaagcgcgtttagtggcgctgggcggaaagtggcaggcagcgtatcgaagaaaaccgatctggtgattgccggtgaagcggcgggttccaaactggccaaagcgcaggaactgggcatcaatgtcattgatgaagcggaaatgatccgcttactgggtgcctgagatggaaaaagagca

SEQ ID NO: 37234 - DNA, 1245 bp, Salmonella paratyphi A
atgactgacaatcgcgtagagaatagcagcggacgggcggcgcgcaagctaaggctcgcattaatgggacctgcgttcattgccgcgattggttatatcgatcctggtaacttcgcgaccaatattcaggccggcgccagctttggctaccagctactctgggtggtggtctgggcgaacctgatggcgatgctgattcaaatcctctcggcaaaactcggaatcgccacgggcaagaacctggcggagcaaattcgcgaccattatccgcgcccggtagtctggttttactgggtacaggcggaaatcatcgcgatggccaccgatttagctgaatttatcggcgcggcaataggttttaagctgatcctgggcgtctctttattacagggcgcggtattgaccggtatcgcgacgtttctgattttaatgttacagcgccgcggtcaaaaaccgcttgaaaaagtcatcggcggtttactgctttttgtcgccgctgcttacattgtggagctgtttttctctcagcctgatatggcgcagctcggcaaaggaatggttatcccggcgctaccgaacccggaagccgtattcttagccgccggcgtgcttggcgcgacgattatgccgcacgtgatttatctgcactcgtcattaacacagcatctgcacggcggaacgcggcaacaacggtactcagcaacgaaatgggatgtcgctattgctatgacgattgccggttttgtcaatctggcaatgatggcggaaccgcggcggcgtttcattttagcggccacaccgcatcgccgacctcgatcaggcatacctgacgctggaaccgttactaacgcatgcggcggcaacggtgtttggtcttagtctggtagcggcagggctttcctccactgtggtagggactctggcggggcaggtggtgatgcaagggtttgtccgttttcacattccgctgtgggtacggcgcaccattaccatgctgccctcatttattgtgattttgatggggcttgaccctacccgaattctggtgatgagccaggtgctgctgagttttggtattcgcgtggcgctggtgccgctcctgattttcaccagtaacctacgctaatgggcgagctggtgaacacgcggcgagtaaaacagattggctggataattgtcgtgctggtcgtcgccctgaatatctggttactggttggaacggtgatggggttgtcataaagacag

SEQ ID NO: 37235 - DNA, 983 bp, Salmonella paratyphi A
atgatgcaggatttgcgtctgatattaatcattgttggcgcgatcgcataatcgctttactggtacatggtttctggaccagccgtaaagaacgatcttctatgttccgcgatcgtccactaaaacgcatgaaatcgaaacgcgacgacgactcgtatgacgacgatgtcgaagaagacgaaggcgtgggtgaagttcgtgttcaccgcgtaaatcatgcccccggccagtcgcaggagcatgatgcccctcgtcagtcgccgcaacaccagtaccagccgccttatgcgtctgcgcaaccgcgtccagcgcgccgcgagccgcaagcgccgatgcaacagccggttcagcaaccggtccaacctgcgccgcagcctcagcaggttcagccatctgcgccgccggtacagccgccgcaacagcagcctgcaccgccgtcgcaagcgccgcagcctgttgcgcagcccgcgccgccgccatcagcgcaaaccttccagcctgcggaacctgtggttgaggcggaaccggtagtggaagaagcgccggttgtggaaaaaccgcagcgtaaagaggcggtcatcattatgaacgtcgcggcccatcatggcagcgagcttaatggtgaagtgttactgaacagtattcagcagtcaggctttaaatttggcgatatgaatattttccatcgtcatttgagcccggacggcagcggcccggccttgttcagtctcgcgaatatggtcaatccgggaacgttcgatcctgaaatgacggacttcactacgcctggcgtcactatctttatgcaggtaccgtcttacggcgatgcgctgcagaatttcaagctgatgctgcaatccgcgcagcatatcgctgatgaggtcggtggcgtcgtgctggatgaccagcgtcggatgatgacgccgcagaaactgcgcgaatatcaggaccgcatccgcgaggtgatggacgctaacgcctga

SEQ ID NO: 37236 - DNA, 1441 bp, Salmonella paratyphi A
  misc_feature (653)..(653): n=g, a, t or c
  misc_feature (1306)..(1306): n=g, a, t or c
atgaaaatcaaaactcgcttcgccctagcccgacagttatctgcacgtcggcggcgcgcgtactgctctttattcctggcttttcgcacgtcaccacggcggtgagttcgtgctgcgtattgaagacaccgatcttgagcgttccacgccggaagccattgaagccatcatggatggtatgaactggctgaacctggaatgggacgaaggccctatttccagaccaaacgttttgatcgctataacgcggtgattgacgagatgctggaggcgggaacagcctataaatgctactgctctaaagagcgtctggagcaactgcgtgaagatcagatggcgaaaggcgagaagctgcgttatgacgggcgttgcgtcacagtcacgaacatcatgccgacgatgaaccatgcgtggtgcgctttgccaacccgcagacggttccgttatttttgatgatcagatccgtggcccgatcgaattcagcaatcaggagctggacgatctgatcattcgtcgtaccgacggcctccccgacctacaacttctgtgtggtggttgacgactgggatatggaaattacccatgtgattcgtggcgaagaccatatcaacaatactccgcgccagattaacattttgaaagcgttaaacccncggtgccgatgtacgcgcatgtgtcgatgattaacggcgacgaggtaaaaagctgtctaaacgtcacggtgcggtgagcgtgatgcagtatcgcgatgacggttatctgccggaagcgttgctgaactatctggtgcgtctgggctggtccagcggcgatcaggaaatcttcacccgcgaagagatgattaaactgttctccctcggtgcggtgagcaagtctgcgtagcgcgttcaacaccgataaactgctgtggctgaaccaccactatatcaatacgctggcgccggaatatgtggcgacgcatttgcagtggcatatcgagcaggaaaatatcgacacccgtaacggcccgcagcttgctgaactggtgaagttgctgggcgagcgctgcaaaactctgaaagagatgtcgcagagctgccgctacttctatgaagacttcagcgagtttgacgccgatgcgcgaaaaaacacctccgcccggtggcgcgtcagccgctggaagtggtgcgcgacaagctgtcggcgattacggactggtcagcagaaaacgtccaccacgcgattcaggccacggcggatgagctggaagtggggatgggtaaagtggggatgccgctgcgtgtggctgtgaccggtgccgggcagntcgcctgcgctggatgtcaccgtacatgcgattggtaaaacccgcagcattgagcgcatcaacaaagcgctgggctttatcgccgagcgtgaaagccagcagtaacgccagctgaaacagaataaacggcaggca

SEQ ID NO: 37237 - DNA, 1315 bp, Salmonella paratyphi A
atgccattagtcatcgttgctatcggtgttatcttgttacttcttctgatgatccgcttcaaaatgaacggatttatcgcccttgtcctggtagcgctcgctgtcgggttgatgcagggaatgccgctggataaagtcatcggctccatcaaagccggtgtcggcggtacgcttggcagtctggccctgattatggggttcggcgccatgctgggcaaaatgcttgccgactgcggcggcgctcaacgtatcgccactaccctgatcgcgaaatttggtaaaaagcatattcagtgggccgtagtgttaaccggctttaccgtcggcttcgctctgttctatgaagtgggcttcgttctgatgctgccgctggtattcaccattgccgcagcgggaattatcccgttactgtacgtcggcgtggcatggccgcggcgctcctccgtcacacacggcttcctgccgctcgcacccgggtccaaccgcgatcgccacgattttccatgccgatatgggtaaaacgctgctgtttggtacgattctggcgatcccgaccgtgatccttgccggaccggtttacgcccgttttctgaaaggcatcgataagccgatcccggaaggcctgtacagcgcgaaaacctttacggaagaagagatgccgggctttggcgtcagcgtctggacgtcgctggttccggtgattctgatggcgatgcgtgcggttgccgagatgattctgccaaaaggccacgctttcctgcccgttgccgagttcctgggcgacccggtaatggctacgttgattgccgtactgattgcaatgttcacctttggcctgaaccgcgggcgttcaatggatcagattaacgatacgctggtctcttccatcaaaattatcgccatgatgctgctgatcatcggcggcggcggcgcgttcaagcaggtgctggtcgatagcggcgtggataaatacatcgcttcaatgatgcatgaaaccaatgtctctccgctgttgatggcgtggtctatcgcggcggtgctgcgtatcgcgctgggctctgcgactgtcgcggcgattaccgcaggcggcattgcggcgccactgatcgccacgaccggcgttagtcctgaactgatggttatcgcagtcggttccgggagcgtgattttctctcacgtcaacgacccaggcttctggctgttcaaagagtatttcaatttgactatcggcgagaccattaaatcctggtcgatgctggaaacgatcatctccgtctgcggcctgatcggctgtctgctactgggtatggtggtt

SEQ ID NO: 37238 - DNA, 2133 bp, Salmonella paratyphi A
attgcgggtgaaatccaggcaaatgccgggcaggttgaagctgccgttcgcctgcttgacgaagggaacaccgtgccgtttatcgcacgttatcgtaaagaaatcaccggcggtctggatgacacgcagttgcgtaacctggaaacgcgtctgggctatctgcgtgagctggaagacaggcgtcaggccatcctcaagtccatttccgaacaaggcaaactgaccgatgagctggctggcgccatcaacgctacgttaagtaagaccgagctcgaagacctctacctgccctataaacctaaacgccgcacccgtggacaaatcgccattgaagccgccttgacgctggccgatctgctctggaacgaaccgtcccacgatcctgacgtgaaagcggcaaagtacattgatggcgacaaaggcgtggcggacacgaaagcccggctcgacggcgcacgctacattctgatggagcgctttgccgaagacgccgcattgctggcgaaagtgcgtgattacctgtggaagaatgcccatctggtcgccacagtcgtgagcggcaaagaggaagaaggggcaaaattccgcgactatttcgaccatcatgagcccattgctaacgtcccgtctcaccgtgcgctggccatgttccgtggtcgtaacgaaggcattctgcaactttcgctcaatgccgacccacagtttgatgagccgccgaaagagagctactgcgagcaaatcatcatggaccatctcggcctgcggctaaataacgccccggcggatagctggcgcaaaggcgtagtgagctggacgtggcgtatcaaagtcttaatgcacctcgaaaccgaactgatgggcaccgtgcgcgaacgtgcggaagacgaagcgattaacgtgtttgcgcgtaacctgcacgacctgctgatggcagcccccgcaggcctgcgcgccacgatgggccttgatcctggcctgcgtaccggcgtaaaagtcgctgtcgttgacggcaccggcaagctggtggcgacggataccatttatccgcataccggtcaggcggccaaagcggctaccgtgatcgccgcgctgtgcgaaaaataccacgtcgaactggtcgcgattggcaacggtacggcttcgcgtgaaaccgaacgtttctatctcgacgtacagaaacagttcccgaacgtgacggcgcagaaagtgatcgtcagcgacggtggcgtccgtgtattccgcttctgagctggcgtcgcaggagtttccggatctcgacgtctccctgcgcggcgcgtctctatcgcgcgtcgtctgcaggatccgctggcggaactggtgaaaatcgatccgaaatcgatcggcgtcggccaatatcaacacgatgtcagccagacccaattggcccgtaaactggatgcggtggtcgaagactgcgtaaacgccgtcggcgtcgatttgaataccgcctccgtaccgctgctgacccgcgtcgcaggcttaacgcgcatgatggcgcaaaacatcgtcgcctggcgcgatgagaacggtcagttccagaaccgccagcaactgttgaaggtgagccgtctggggccgaaagcgtttgagcagtgcgcgggcttcctgcgtattaaccacggcgataacccgctggatgcctccaccgtccacccggaagcctatccggttgtcgaacgcattctggcggcgacgcagcaagcgctaaaagatctgatgggcaacagcaacgaattgcgtcacctcaaggccgctgattttaccgacgataaattcggcgtgccgaccgtgagcgatatcatcaaagagctggaaaaaccgggccgcgacccgcgtcctgaatttaaaaccgcgcaattcgccgatggcgtcgaaaccatgaacgacctgctgccggggatgattctggaaggggcagtcactaacgtcactaacttcggcgcgtttgtcgatatcggcgttcatcaggatggcctggtccacatctcttccctgtcgactaagttcgtcgacgatccacacaccgtggtaaaagctggcgacatcgtgaaggtgaaagtgctggaagtggatctgcaacgtaagcgtattgcgctgacgatgcgtctggac

SEQ ID NO: 37239 - DNA, 225 bp, Salmonella paratyphi A
atgcaattcactcctgacactgcgtggaaaatcaccggctttgcgcgtgaaatcagcccggcgtatcgtcaaaaactgctttcgctcggcatgttgcccggctcttcatttaatgttgtccgcgtcgcgcccttaggggatccgatccatatcgaaacacgacgcgtgagtctggttttgcgtaaaaaggatttggcgttaatagaagtggaagcggtttcctgt

SEQ ID NO: 37240 - DNA, 1375 bp, Salmonella paratyphi A
acaatgcgataccgttttcccgataacttctggtggggcagcgcctgctcagcgttgcaaaccgaaggggatagtctgaatggcggtaaaagccagaccacgtgggatgtgtggttcgagcgccagcctgatcgttttcaccagggcgtcggtccagcggaaacctcaacgttctatcgccactggaagcaagacatcgcgctactgaaacagttaaaacataacagttttcgcacctcgctaagctgggcgcggctcattccagacggcgtaggcgaggtgaatccacaagcggtgagcttctacaatcacgtcatcgacgagctactggcgcagggcatcacgccgtttattacgctgctccattttgatatgccgatggtcatgcaggagaaaggcggctgggaaaatcgcgacgtcgtagaggcgtttggtcggtacgcgcaaacgtgttttaccttgtttggcgaccgcgtgaagcactggtttacctttaacgagccgattgtgccggtggaaggcggctatttgtacgacttccactatcccaatgtggtggattttaaacgtgcggccaccgtggcgtaccataccgtgctggcgcactcgaccgccgtggcgccgggcgtacgacggtgaaatcggcatagtactgaatctgacgccgtcctacccacgctcacagcatcccgccgatgtgcaagccgcgcaccatgcggatctgttattcaaccgcagttttcttgacccggtattaaagggagaatacccggcggatctggtggcgctgctgaaaacctatgaccagctgcctgcctgtcagccaggcgaccgtcagcttattgccgacgcaaatcgatttactggggattaactattatcagccgcgccgcgtgaaatgccgtgatacggggtgaatccgcaagcgccgtttatgccggagtggttatttgactattacgacatgccggggcgcaagatgaacccttaccgcggctgggaaatttacgcgccaggaatttacgacatcatcaccaacctgcgggataattacggcaatccgcgctgttttatctccgaaaacgggatgggcgttgagaacgagcaacgttttgtgcaagcgggacagattcacgatgattaccggattgactttatctctgagcatcttaaatggctgcataaaggcattagcgagggctgtcactgtcttggctaccacatgtggacctttatcgataactggtcatggctgaacggctataaaaatcgctatggttttgtacaactggatttagccacccaaacgcgcacggtgaaaaaaagcggagaatggtttgccgccaccgcagagcataacggttttgattaagca

SEQ ID NO: 37241 - DNA, 741 bp, Salmonella paratyphi A
atgaaaacattgagtaaaagttcacacatcccactgtatcaacaggttgtggagtggataagggaaagtatttatagcggagaattggttgaggatgaccggataccttcagagtttcaaatcatggatatgctggaggtgagtcgcggtaccgttaaaaaagcggttgaccaacttgtccgggaaggtgttcttgtgcaagtgcagggtaaaggaactttcgtaaagaaggaaaatgttgcttacccactgggtgaaggtttgctctcctttgctgaagccttagccagccagaagataaacttcacaaccagtgttataacctcccgactggagcccgctaaccgctttgtagcagagaaactgagtatcaaaccgggacaagatgttttatttcttaaacgccttcgttgtattggcgatgaaaaagtcatgttgattgaaaatcgtatcaacattgatctctgccccggtattattgatgtagattttaccagggagaatttattttcagcaatagaaagattatctgataagaaaataagtttttctgaaagccgttacgcagctaaattaattggtaatgagcgaggccattatcttgatattggtgaagacgcacctgttttgcatttggaacagttggtatttttctctagaggattggccattgattttggtaacgtctggttaaaaggtaataaatattatcttggcactattttacagcgcctggatgcc

SEQ ID NO: 37242 - DNA, 1187 bp, Salmonella paratyphi A
  misc_feature (991)..(991): n=g, a, t or c
  misc_feature (993)..(993): n=g, a, t or c
  misc_feature (1086)..(1086): n=g, a, t or c
gacacacgttttgaaagttgtattaaatgtacagtgtgcaccaccgcgtgcccggtcagccgcgttaatcctggctaccctgccctaaacaggccggaccggatggcgaacactgctctgaaagacggcgcgctgtatgatgaggcgctgaaatattgcattaactgcaaacggtgtgaggtcgcctgtccgtcggacgtgaagattggcgatatcatccagtgcgcccgcgcgaaatacgatacgacgcgcccgtcattgcgtaactttattctcagccataccgatctgatgggcagcgtttcaacgccgttcgcgccggtggtcaataccgccaccgcattaaagccagtgcgccagttgcttgattacgcgctcaaaatcgatcatcgccgcaccttaccaaaatactctttcggcaccttccgccgctggtatcgtagcgtggcggcgcagcaggctaaatacaaagatcaggtcgcctttttccatggctgttttgtgaattacaaccatccgcagctcggaaaagatctgattaaggtgctgaacgcaatgggtaccggcgtacagttactgagtaaagagaaatgttgcggcgtgcgggactgcgctaacggttttacggataaagctcgcaagcaggctatcagcaatgtggagtcgctacgacggcgattgccgtcaaaggtattccggtcatcgccacgtcatccacctgtacgtttgcgttgcgcgatgaatatcctgaagtgctggacgtggacaacgccgggctgcgcgaatcatatcgagctggccacccgctgctatggcgcaaactggatgccgggaaaacgctgccgcttaatcctttgccgctgaaagtggtctaccatacgccgtgtcatatggaaaaaatgggctggacgctttacacgcttgaattattgcggcaaattccggggcttgaattgacggtacttgattcacagtgctgcggcattgcttnancgttatggatttaaaaaggaaaactatccgacatcacagtccatcggcgcgccgctgttccgccagattgaagagagcggcccgacattgtgntcaccgattgtgaaacctgtaagtggcaaattgagatgtctacaagcaaacgctgcgaacaccccattacgctactgggaaacgctcggctaagtaaaaag

SEQ ID NO: 37243 - DNA, 603 bp, Salmonella paratyphi A
gtgctggcatttaccctacgctttattaaaaacaaacgctatctcgcgactctggcgggggcgttggttattatcgccgggttgacctcacaacatgcctggagcggtaacggtctaccgcagattaacggtaaagcgctggcggcgctggcgaagcagcatccggtagtcgtgttattccgccatgccgagcggtgcgatcgttccgataatacctgcctgtcagacagcacggggattacggtcaacggtgcgcaagatgccagagcgctgggtaaagccttcagtgccgatatacaaaattacaatctctattccagtaatacggtgcgcaccatccagtcggcaacctggttttccgcgggcaggtcgtttacggtggataaaaaaatgatggattgcggcagcggtatttatgcttcaatcaatacgttactgaaaaagtcgcagaataaaaatatagtcatttttacccataatcattgtttgacgtatattgcaaaaaataagcgcggcgtaaagtttgatccggactatcttaatgcgctcgttatgcatgcggaaaacggaaaactctttttagatggtgaatttgttcccggc

SEQ ID NO: 37244 - DNA, 1020 bp, Salmonella paratyphi A
atgaatatatgtgtaaattcactttaccgattgagcacaccgcaatttcacagtttatattcagaagaggtgagcgatgagacgcttgcgttgttgattggcgaagtagagaacggtaatcagaattgtattgatctgttatgcaatcttgcgttacgcaacgataacctgggacataaagttgagaaattactttttgatctctttagcggaaaaagatcgggctcaccagatatagacaaaaaaatcaatcaggcttgccttgtattacatcaaatcgccaataacgatataacaaaaaataatactgagtggaaaaagctacatgccccttccagattactttatatggccggttccgcgacaaccgacctttctaaaaaaatagaaatagcacataaaattatgggcgaccagttcgctcagacagatcaagaacaggtaggagttgaaaatctttggtgtggtgcgcgaatgttgtcgtcagatgagctagcagctgcaacgcaaggtctggctcaagaatcacctcttctctcggtaaactatcctattgggctgattcatcctaccaccaaagaaaatatattaagcactcagctacttgaaaagattgctcaatcaggattatctcacaatgaagtcttcctggtaaatacaggagatcactggcttctctgtttattttataaacttgcagaaaaaataaaatgccttatatttaatacttattatgatttaaatgaaaatactaagcaagagattatagaagcagcaaaaattgcaggcatatcagaaaacgaagatattgattttattgaaactaatttacaaaataatgtacccaacggctgtggtctattttgttaccatacaattcaactcttatcgaatgcaggacaaaacgatcctgctaccacactacgagagtttgcggaaaatttcttaacgctttcagtagaggaacaaacactatttaacacccaaacccggcgacaaatatatgaatacagtctccag

SEQ ID NO: 37245 - DNA, 801 bp, Salmonella paratyphi A
atgaacgcattgttatcaaatccttttaaagaaggattacgtaaaggggatacgcaaattggtttgtggctcagttcaaccacctcttatatggcggagattgcggcgacgtcgggttatgactggttgttaatagatggcgagcacgcgcctaatacggtgcaggacttgtatcatcagttacaggccatcgccccatacgccagccagccggtgattcgcccgatcgagggaagtaaagcgctcattaaacaggtactggatatcggggcgcaaacgctactgatcccgatggttgataccgcagaacaggcgcgccaggtcgtttccgctacccgatacccgccgttggggcaacgaggcgttggcgcgagcgtggcgcgtgcggcgcgctgggggagaatcgacaactatatggcacaggccaatgagtcgctctgcctgttggtgcaggttgaaagcaaagtggcgctggaaaaccttgacgcgattctggaggttgaaggcattgatggcgtctttatcggtccggcagatctctctgcttcattgggttaccccgataatgccggacacccggaagtgcagcggatcattgaagcgtgtatttatcgtattcgcgccgccggaaaagcggcgggttttttggcggtcgatccggcaatggcgcagaaatgtctggcgtggggcgcgaattttgtcgcggtcggggtagatacgatgctctacaccgaggcgctggacaacaggttggtgatgtttaaatctgttcagtcagtaagcacggcaaaacgtagttat

SEQ ID NO: 37246 - DNA, 1022 bp, Salmonella paratyphi A
gtaaacggtattcgcgttctcatcctcggcgtcaacggttttatcggcaatcatttgaccgaacggttactggatgaagagaattacgaggtctacggtatggatatcggcagcaacgccattagccgattcctgctccaccctcgctttcatttcgtggagggagatatcagcatccactcagaatggatcgaatatcatgtcaaaaaatgcgatgtcgtactgccgctggtagcaattgcaaccccgattgaatacacccgcaacccgctgcgcgtctttgaacttgattttgaagaaaacctgcggattatccgttattgcgtgaaataccgtaaacgcgtggttttcccgtctacctctgaagtgtacggcatgtgtacggacgcctcttttgacgaagacaaatcgaatctgatcgtcgggccggtgaataagccgcgctggatttactccgtttccaaacagcttctcgaccgggtgatttgggcttatggcgaaaaagagggattgcgcttcacgcttttccgtccctttaactggatggggccgcggctggatagcctgaacgcggcgcgtatcggcagttcacgcgcgataacgcagttgattctgaacctggtagaagggacgccgatcaagcttatcgacggcggtcagcagaagcgctgtttcaccgatattcgtgacgggatcgaagcattattccgcattattgtgaatgagggcgatcggtgcgatggcaaaatcattaatatcggcaaccctgacaacgaagccagtattcaggaactggcgacgctgttgctcgacagttttgataagcatccgctgcgctgccatttcccaccatttgccggtttccaggtcgtcgaaagccgtagttattacggcaagggttatcaggatgtcgcacaccggaaaccagtatcgacaatgccaggcgctgtctggactgggagccgtctattgcgatgcgtgatacggttgaagaaacgctggacttctttctgcgtacgtcg

SEQ ID NO: 37247 - DNA, 1005 bp, Salmonella paratyphi A
  misc_feature (650)..(650): n=g, a, t or c
atgagtaatcttagcggtaccgataaaagtgtcattttgttgatgaccattggcgaagaccgggcggcagaggtgtttaaacacctctccactcgcgaagtacaggcgttaagtacggcgatggctaacgtgcgtcagatctccaacaaacaactgacggacgtactatcagagtttgagcaagaagcggagcagttcgccgcgctgaatattaacgccaacgaatacctacgctccgtactggttaaagcgctgggcgaagaacgcgcctccagcctgctggaagatattctggaaacgcgcgataccaccagcgtatcgaaacgctcaactttatggaaccgcagagtgccgccgacctgattcgcgacgaacacccgcagattatcgccaccattctggttcacctcaaacgcagtcaggccgccgatattctggcgctgtttgacgagcgtctgctcatgatgtgatgctgcgtatcgcgacatttgacggcgtacagcaggcggcgctggcggagttgaccgaagtgctgaatggcctgctcgacggtcagaacctgaaacgcagcaaaatgggcggcgtcaagaaccgcggcggaaattatcaacctgatgaaaacgcagcaggaagaagcggttattaccgtngtgcgcgaattcgacggcgaactggcgcagaaaatcatcgacgagatgttcctgttcgaaaatctggtggatgtggacgatcgcagtatccagcgtctgttgcaggaagtggattccgaatcgctgctgatcgctctgaaaggcgccgaaccgccattacgcgagaagttcctgcgcaatatgtcaccagcgcgccgccgatatcctgcgcgacgaccttgccaaacgtggcccagttcgtctgtctcaggtggaaaacgagcagaaagcgattctgcttattgtgcgtcgtctggcggaaaccggcgaaatggtgattggcagcggcgaggatacctatgtctaatgaaattgc

SEQ ID NO: 37248 - DNA, 1056 bp, Salmonella paratyphi A
atgagcgagaaaacagaacagcctacagaaaagaaattacgtgatggccgtaaggaagggcaggttgtcaaaagtattgaaataacatcattatttcagctgattgcgctttatttgtattttcatttctttactgaaaagatgattttgatactgattgagtcaataacgttcacattacaattagtaaataaaccattttcttatgcactaacgcaattgagtcatgctttaatagagtcactgacttctgcactgctgtttctgggcgctggggtaatagttgctactgtgggtagcgtgtttcttcaggtgggggtggttattgccagcaaggccattggttttaaaagcgagcatataaatccggtaagtaattttaagcagatattctctttacatagcgtagtagaattatgtaaatccagcctaaaagttatcatgttatctcttatctttgcctttttcttttattattatgccagtacttttcgggcgctaccgtactgtgggttagcctgtggcgtgcttgtggtttcttctttaataaaatggttatgggtaggggtgatggctttttatatcgtcgttggcatactggactattcttttcaatattataagattagaaaagatctaaaaatgagtaaagatgacgtaaaacaggagcataaagatctggagggcgatcctcaaatgaagacacggcgtcgggaaatgcagagtgaaatacaaagtgggagtttagctcaatctgttaaacaatctgttgcggtagtgcgtaatccaacgcatattgcggtttgtcttggctatcatcccaccgatatgccaataccacgcgtcctggaaaaaggcagtgatgctcaagctaactatattgttaacatcgctgaacgcaactgcatccccgttgttgaaaatgttgagctggcccgctcattattttttgaagtggaacgcggagataaaattcctgaaacgttatttgaacccgttgcagccttgttacgtatggtgatgaagatagattatgcgcattctaccgaaacacca

SEQ ID NO: 37249 - DNA, 1079 bp, Salmonella paratyphi A
attatttttggaccgttaatcgtcctgtgtatgctccttatcgtgaagcgtctggtcttcgggttgggctccgtttccgacctgaacggcggtttcccgtggggcgtctggattgcctttgacctgttgatcggcaccggctttgcctgcggcggttgggcgttggcatgggcggtgtatgtctttaaccgtgggcaataccatccgttggtgcgcccggcgttgctggcaagcttgtttggttactcgctgggcggcctgtcgatcactatcgacgtcggtcgttactggaacctgccgtacttctacattccaggtcacttcaacgtgaactcggtactgtttgagacggcggtctgtatgaccatctacatcggcgtgatggcgctggagtttgcgcctgccttgtttgaacgtctgggctggaaagtgtcgctcaagcgtctgaataaggtgatgttctttattatcgcgctgggcgcgctgctgccgacgatgcaccagtcctcaatggggtcattgatgatctcggcgggctataaagtgcatccgctatggcaaagctatgaaatgctgccgctgttctcggttctgaccgcgtttatcatgggcttctccattgtcatatttgagggttcgctggttcaggcaggcctgaaaggaaacggtccggatgagaaaaatttgtttgttaagctgacgaataccatcagcgtgctgctggcgattttcgtcgtcctgcgctttggcgaactgatttatcgcgacaagctgtcctatgcgtttgccggcgatttttactccgctatgttctggattgaagtcgtcctgatggtcttcccgttagtggtgctgcgtgtggcgaaactgcgtaatgactctcgtatgctgtactgtcggcgctgagtgcgctgttgggttgcgcgacgtggcgtctgacctattcgctggtggcattcaacccgggtggcggctaccactacttcccaacctgggaagaattgttgatttctattggttttgtggctattgagatttgtgcatacatcgtactcattcgtctactgccgatacttcct

SEQ ID NO: 37250 - DNA, 1546 bp, Salmonella paratyphi A
  misc_feature (1540)..(1540): n=g, a, t or c
atgagccagagaattactattgatccggtaacccgtattgagggtcatttacgcattgactgcgaaattgagaacggcgtcgtatccaaagcatgggcgtccggcaccatgtggcgcggtatggaagagatcatgaagaaccgcgatccgcgcgatgcgtggatgattgtgcagcgtatttgcggcgtttgtacgacaactcacgcgatctcctccgttcgtgcggcggaaagcgcgctgaatattgatgttcccgtcaacgcgcagtatatccgtaatattattctggcggcgcataccacccatgaccatattgtccatttctaccagctctctgcgctggactgggtggacattacctctgcgctgaaagccgatccggaaaaagcctccgcgatgctggatggcgtgtcgagctggcacctgaacagcgcgcaagagttcacgaaagttcagaacaagatcaaggatcttgtcgccagcggtcagttaggtattttcgccaatggctactgggggcacccggcaatgcagttaccgccggagtcaacctgattgcggtcgcccactatctgcaggcgctggaatgtcagcgtgacgctaaccgcgtggtggcgttgctgggcggtaaatcgccgcatatccagaacctggcggtcggtggggtggcgaacccgatcaatctcgacagcatcggtacgttgaacctcgaacgcctgatgtacatcaaatcgtttatcgataagctgagcgattttgtcgagcaggtgtataaagtggataccgcagtcatcgcggcctactatccggaatggctggagcgcggcaaaggcgcggtgaactacctgagcgcgccggaattcccgaccgacggtaaaaacggcagtttcctgttcccgggcggttacattaccaatgccgatctgtcgacataccgtccgatcacctctcactccgacgaattcctgattaaaggtattcaggagagcgcgaagcacgcctggtataaagatgaagcgccgcacgccgtgggaaggcactacgatcccggcttatgacggttggtcggatgacggtaaatactcatgggtcaagtcgccgacattctacggcaaaaccgtcgaagtcgggccgctggcgaacatgctgtgtaaactggctgcaggtcgtgaatccacgcagaccaagctcaatgaaatcattgcgctttatcagaagctgaccggcaaaacgctggaaatggcgcaacttcactctacgctgggtcgtatcatcgggcgtaccgttcactgttgtgaactgcaaaacgtattgcaggatcaatacaacgcgctgattgtaaatatcggcaaaggcgattacaccacgtttgtgaagccgaacattccggcgacggcgagttcaaaggcgtgggcttcctggaggcgccgccgttaatgctgtctcactggatggtgattaaagacggcattatcagtaactatcaggcggtggtgcatccacttgaactcaggtccgcgtaactacacgatgacgtggngccgta

SEQ ID NO: 37251 - DNA, 888 bp, Salmonella paratyphi A
atgtctcatctatatgaccctaccacgcagtattacaccggcgagtatcctaagcaaaaacagccggcgcccgtggccaggcgaaaatgacgcctgttcctgactgtggtgaaaaaagttatgtcggcagtggtcgccttaaagatcgtaaggcgctggtgacagggggcgactccgggattgggcgcgctgcgctatcgcttacgcgcgtgaaggcgcagatgtcgcgatcaactatctgccagcggaagaagaggacgcccagcaggttaaagcgctgattgaggagtgcggccgtaaagcggtgttattgccgggcgatcttagcgacgaatctttcgcccgttcgctggtccataaggcgcgcgaagcgctgggcgggctggacattctggcgctggtagccggtaaacagacggcaatcccggagataaaagatctaaccagcgagcaatttcagcaaaccttcgccgttaacgtttttgccctgttctggataacccaggaagcgattccgctgctgccaaaaggcgccagtattatcacaacgtcgtctatccaggcctatcagcccagtccgcacctgctggattatgcggcaaccaaggcggcaatccttaattacagccgcggcctggcgaaacaggtggcggaaaaaggaattcgcgtgaatattgtcgcgcctggccctatctggacagcgctgcaaatttccggcggccaaacacaggataaaattccgcagtttggccagcagacgccaatgaagcgggccggtcaaccggcagagtggcgccggtgtatgtctatctggcaagccaggaatcaagttacgttaccgcagaagtgcacggcgtgtgcggcggggaacatttaggctaacgcatg

SEQ ID NO: 37252 - DNA, 1403 bp, Salmonella paratyphi A
cagagcacattcctcttccacgattacgaaaccttcggtacgcatccggccctcgacagacctgcgcaattcgccgcgctccgtacggataacgacttcaacgttattggcgagccggaggtgttttattgcaaacccgccgatgattatctaccgcagcccggcgcagtgctgattaccggcatcacgccgcaggaagcgcgtgagaaaggagaaaacgaagccgctttcgccagacgcattcatgcgctgtttaccgttcctaaaacctgcgttgtgggctacaacaatgtacgttttgatgatgaagtcacgcgcaatattttttatcgcaacttttacgatccctacgcctggagctggcagcatgataattcacgttgggatctattggatgtcatgcgcgcctgttatgcgctgcgcccggagggaattaactggccggaaaacgacgacggcctgcccagctttcgtctggaacatttaacccaggcgaacgggatcgaacacagcaacgcgcatgatgcgatggcggatgtctacgccactattgcgatggcgcaactggtgaaaacacgccagccgcgactgtttgattatctttatagccaccgcagtaaacataaactggcggcgctgattgacgttccgcaaatgaagccgctggtgcatgtctccggcatgtttggcgcgtggcgcggtaatacaagctgggtcgcgccgctggcgtggcatcctgaaaaccgtaacgcggtgatcatggtcgatttagcaggcgatatttctcctcttcttgagctggacagcgacacccttcgcgagcggctttatacggccaaagccgatcttggcgatcacgccgcagtgccggtaaagctggtgcatatcaataaatgtccggtactggcgcaggcgaataccttgcgcccggaggatgccgaccggctgggaattaaccgccagcattgcctggataacctgaaagtgctgcgtgaaaacccgcaggtccgcgacaaagtggtggcgattttcgccgaagccgaaccttttgccacctcggataacgttgatgcccagctctatgatggttttttcagcgatgccgatcgcgcagccatgaaaatcgtactcgaaaccgagccgcgtaacctgcccgcgctggacattacctttgtcgataagcgcattgagaagctgctgtttaattaccgcgcacgcaattttcccggtacgctggatgacgcagagcagcagcgctggctggagcatcgccgtcagtactgacgccagagtttttacaacagtatgccaatgaattgcagatgctttctcagcagtatgcggaagataaaacgaagctggggctgctgaaatcactgtggcagtacgcaactgagattgtg

SEQ ID NO: 37253 - DNA, 1793 bp, Salmonella paratyphi A
cagaaagccggagaaactcttacgcccgcagatcgcgatttttcaaacgcagatttccgtaatattacattcagcaaaatattgcccctcagcttcatggagcgagacggcgatattattaagaggttcaacttttcaaattcaaaatttacttattctgatatatctcatttacattttgacgaatgccgattcacttattcgacactgagtgatgtagtctgcagtaatacaaaatttagtaattcagacatgaatgaagtgttttacagtattcaattactacacaacaacagccctcttttattgatacaacattaaaaaatacgcttatacgtcacaaagccaacctctctggcgttattttaaatgaaccggataattcatcacctccgtcagtatcagggggcgaaaattttattcgtccaggtgatatctggccgcaaatgccactcctttggactgagaacgctgtggatggatttttaaatcatgagcacaataatggtaaaagtattctgataaccattgacagcctgcccgataaatacagtcaggaaaaagtccgggcaatggaagacctggttaagtcattgcggagtggccgcttaacagaggcatgtatccggccagttgaaagttcgctggtgagcgtactggcccccccctatacgcaaagtacgcttatcagcgagtggctcgggcctgttcaggaacgtttttttgcccaccagtgccagacctataatgacgttcccctgccggctcctgacacatattatcagcagcgcatacggcctgtattgctggattcgtttgacaggaacaacgccgccatgaccactcacagcgggctctttaatcaggtgattttacactgtatgacaggcgtgggctgcactgatggcacccgccagaaagctgcagcgctttatgaacgatatcttgctcacccaacggtgtctccccacatccataatgggctcttcggcaattatgacggcagcccggactggacaacccgcgctgcagataatttcctgctgctttcctcccaggattcagacacggcgatgatgctctccactgacacgctgttaacaatgctaaaccctactcctgacactgcatgggacaacttttacctgctgcgagccggagagaacgtttccaccgcgcaaatctctccggtagagttattccgtcatgactttccggtgtttctcgccgcatttaatcagcaggccgtgcagcgacgctttggggaactgattgatatcatcctcagcgctgaagagcacggggagctgaaccagcagtttattgccgccacgacccagaaacattccaccgtgaagttgattgatgatgcctcagtgtcgcgtctgaacaccatttttgcccccctgcttcctgaaggcaaactcagcccggcacactaccagcacatcctcagtgcttatcacctgacggacgccaccccacagaagcaggcggaaaccctgttctgtcttagtaccgcattcgcacgctattcctccagcgccattttcggcactgagcatgactctccgccggccctgagaggctatgcggaggcgctgatgcagaaagactgggagctgtctccggcgatcttcccgtccagcgaacagtttaccgactggtccgaccgttttcacggcctccatggcgcctttacctgtaccagcgttgtggcggatagtatgcaacgtcatgccagaaaatatttcccgagtgttctgtcatccatcctgccactggcctgggcc

SEQ ID NO: 37254 - DNA, 910 bp, Salmonella paratyphi A
atggactttacgcagcagctacaggcttgcgtaacgcaagcgaatcaggcgctgagccgttttatcgcgccactgccctttcagaacactcccgtggtcgaagccatgcagtatggcgcattattagcggtaaacgctgcggccatttctggtttacgccaccggtcaaatgtttggcgtcagtacggcaacgctggatgcgccagctgcggcggtcgaatgcattcatgcctattcgctgatccatgacgacctgccagcaatggacgatgacgatttgcgtcgcggcctgccgacttgccatattaaatttgcgaagccaacgcaatctggcgggagacgcgttgcaaacgctgcgtttgccattatcagcgacgcgccgatgccggaagtcgccgatgcgatcgtatcgcgatgatcgccgaactgcaaacgccagcggtatcgccggtatgtgcggcggtcaggcattggatctggcggcagaaggccagcggatcactctggacgcgctggaacgcattcatcgccataagaaggcgctcattcgcgccgccgttagacttgggcgttgagcgcgggcgataaaggacggaatactctgccgatacttgaccgctatgcagagagtattcgccttgccttccaggttcaggatgacattctggatgtggtgggcgatactgcaacgttaggtaaacgtcagggcgcagaccagcagcttggcaaaagtacctaccctgcacttctgggtcttgagcaagcccggaataaagcccgggacctgatagaggacgcccgtcagtcgttacatcagctggccgcgcaatcactggacacctcggcactggaagcgctagcgaactacataatccagcgtgataaataaaccccatatccaatgagcttg

SEQ ID NO: 37255 - DNA, 1109 bp, Salmonella paratyphi A
atgacttcgcgtaactatctgttgctgactcctggcccgctcaccacctctcgtaccgtgaaagaagcgatgttgttcgatagctgtacctgggatgatgattacaatatcggcgtggtggaacagatccgccagcagctaaccgcactggcaacggcctccgaaggctacacctccgtactgctgcaaggcagcggcagctatgctgtggaagccgtactgggcagcgcattggggccgcaggataaggtgctgatcgtcagcaacggtgcatacggcgcacgaatggtcgagatggccggccttatgggtatcgcccatcacgcttacgactgcggcgaagttgcgcgcccggatgtgcaggcgatcgacgcgatcctcaacgtcgacccgacgatcagccatatcgccatggtgcatagcgaaacaaccaccgggatgctcaaccccattgatgaggtggcgctctggcgcatcgctatggcaaaacctacatcgttgacgccatgagcagcttcggcggcatccccatggatattgcagcattacatatcgactatctgatcagtccgccaataaatgcattcagggcgtgccgggttttgcctttgtgattgcccgcgagcaaaaactggccgcgtgcaaaggcgttcccgctcgctgtcgttagatctctacgcccagtggcgctgcatggaggataaccacggcaaatggcgttttacttcgcccacacataccgtcctggcgtttgcacaggcgctgaaagagctggcgaaagaaggtggcgtggcggcacgtcatcaacgctatcagcaaaatcagcgcagcctggtggccggaatgcgggcgctgggctttaacacgctgctggatgacgaacttcattcgcccattatcaccgccttttattcaccggaagacccgcagtatcgctttagcgaattttatcgccgcctcaaagagcagggctttgttatctatccaggcaaagtgtcgcaaagtgactcttccgcatcggcaacattggcgaagtatatgccgccgatatcactgccctgctgaccgccattcgtaccgccatgtactggacgaaataaggaaccatg

SEQ ID NO: 37256 - DNA, 1847 bp, Salmonella paratyphi A
  misc_feature (849)..(849): n=g, a, t or c
  misc_feature (1563)..(1564): n=g, a, t or c
  misc_feature (1710)..(1710): n=g, a, t or c
atgagttttgatatagccaaataccctaccctggcattggtcgactccacccaggagttacgactgttaccgaaagagagtctgccgaaactctgcgacgagctacgccgctacttactcgacagcgtaagccgttccagcgggcatttcgcttccgggctgggcacggtagaacttaccgtggcgctgcattatgtctacaacaccccgtttgaccagctaatctgggatgttggacaccaggcttatccacataaaatccttaccggtcgtcgcgacaaaatcggcaccattcgccagaaaggcggtctgcatccgttcccgtggcgcggggaaagtgaatacgatgtgctgagcgttgggcattcctccacctccatcagcgccggtatcggtattgccgtggcggcggagaaagaaggcaaagtatcgccacaccgtctgtgtgattggcgacggcgccatacaccgcccggtatggcgtttgaagcaatgaatcacgcaggcgatatccggcccgacatgctggtcattctgaacgacactgaaatgtcgatttcgacaaacgtcgcgcgctcaacaaccatctgcgcagctactttccggtaagctttactcttctctggcgaaggcggaaaaaaggtcttcctccgtaccgccaattaaagaactgctcaagcgtaccgaagaacatattaaaggcatggttgtgccgggaaccctgttcgaagagctgggctttaactacatcgggccggtcgatggtcacgatgtcatggggcttatcagcacattgaagaacatgcgcgacctgaaaggcccgcagttcctgcatatcatgaccaaganaggcgcggctatgagcccgcggaaaaagatccgatcactttccatgcggtgcctaaatttgatccttccagcggatgtttgccgaaaagcagcggcggtctgccaggttattcaaaaatcttcggtgactggctgtgtgaaaccgccgccaaagacagcaagctgatggcgatcaccccggcaatgcgcgaaggttccggcatggtggaattttcacgtaaattcccggatcgctattttgacgtcgccatcgccgagcagcatgccgtcaccttcgccgcaggcctggcgattggcggctataagcccgtcgtggcgatctactctactttcctgcaacgcgcctacgatcaggttatccatgacgtcgctatccagaaactgccggtcatgttcgccatcgatcgcgccggtatcgttggcgcggatggacaaacgcaccagggcgcgttcgatctctcctatctgcgctgcatcccggatatggtgatcatgacgccaagcgacgaaaacgaatgtcgccagatgttatttaccgggtatcactataacgacggcccgacggcagtacgttatccacgcggtaatgcgcagggcgtggcgctaaccccgctggaaaaactgcctattggtaaaggccttgtgaagcgtcatggcgaaaaactggcgattctgaactttggcaccttaatgcctgaggcggcgaaagtcgtnnagcgctgaacgccacgctggtcgacatgcgctttgttaagccgctggacgacacgttaattctggagatggccgcgcacatgacgcgctggtgacgctggaagaaaacgccattatgggcgcgctggcagcgcgtaaacgaatgcntaatggcccatcgtaaacctgtacctgtgctgaatatcggtcttccggatttatttatcccgcaaggaacgcaggaagaagcccgcgcggaactggggctcgacgccgcaagttgaagccaaaatcaaggcctggca

SEQ ID NO: 37257 - DNA, 975 bp, Salmonella paratyphi A
atggcatgtggcgagttttccctgattgcccgttattttgaccgtgtaagaagctctcgtcttgatgttgaaaccggtattggcgacgattgcgcgctcctgaatattcctgaaaagcagacccttgcgatcagtaccgatacgctggtggcgggcatccatttcttacctgatatcgatcctgccgatctggcgtataaagcgctggcggtgaatttaagcgatctggccgcgatgggcgccgatccggcatggttaacgctggcgctcacgcttcctgatgtcgatgaggcgtggcttgctgcgttcagcgacagcctgtttgaacaactggattactacgacatgcagctcattggcggcgataccacgcgcggcccgctgtcgatgacgctgggaatccacggttatatcccggcagggcgcgcgctcaagcgatctggcgcgaagccgggcgactggatttatgtcaccggtacgccgagcgacagcgctgccgggctggcggttttgcaaaaccggctacaggtgtcggaggagaccgatgctcactatttaattcaacggcatttacgcccgacgccgcgtattttacacggccaggcgctgcgtgacatcgccagcgcggctatcgatctttccgatggtctgatttccgatctggggcatatcgtcaaggccagcggctgtggggcaagagtggatgttgatgcgttgccaaaatccgatgcgatgatgcgccatgttgatgacgggcaggcgctgcgttgggcgctttccggcggcgaagactatgagctgtgctttacggtgccggaactgaaccgtggcgcgctggatgtcgccattggtcaactgggtgttccctttacctgcataggccaaatgagcgcagatattgaagggctgaattttgtacgtgacggaatgcctgtcaccttcgactggaaaggatatgaccattttgccacgcca

SEQ ID NO: 37258 - DNA, 168 bp, Salmonella paratyphi A
gtgctgcgtattgcgttgtttgagctgtcaaaacgcagcgatgtgccttataaagtggccatcaacgaagcgattgaactggcgaaaacctttggcgctgaagacagccacaaattcgtcaacggcgtactggataaagcagctccggtgattcgtcccaacaaaaag

SEQ ID NO: 37259 - DNA, 1607 bp, Salmonella paratyphi A
cgcgcgctaagccaatgggcgcaggccatcagctatgtcgccggtcattatcgcgttgcctgttctcccggttcaattcaggccaacgccccgtggtttaggggtaaaagcagaacgaccgccttaacgcagctcgcgcggcaggcgggtttatcctttcatgcgccggacatagacaaaacggcatttagtcagtggcgattgccgttggttgtcgagctccgggacgggcagttattggtcatcgaacatgttaatggcgaagaggcggcggacgtttttgtgattgaagaagaaggtcagcgtaaccgcctgacgttcagcgagttattgccggagatcccctatgttgccgcgctacgcccgctatcggcactcaaggatagccgcgtcgatcgctatatctcccgctttaaacccgactggatgcgcgagctggttctgcaggatattcgcccttatttaccggtaatggtcgccgcctttctgattaacgtgctgtcgctggccgggattgtgttctctatgcaggtttacgatcgggtgatccccgctcagtcatatcctaccctgtacgtgctctcttcggcgtgctggtagcggtgctgttcggttttctgctgcgtgaagcgcgtacgcacattatggacgtgctcggtaaacgcgccgatatgcgcatttccgatcgggtattcggtcatgcgttaaggctcgcaacagcgctatcccccgttccaccggcagttttatctcgcagttacgcgaactggagcagatccgcgagatgattacctcttcaacgctggcgaccattgtcgatctgcctttctttttcctgtttatgatagtcctggcgattattgccccaccgctggcatggataggcccgtggcggctctgctgatgatcctgccgggcgtggcactgcaaaaaaaactggctgtcctcgccaaccaggccgcccacgaagcgacgtacgcaatgcagtcttggtcgaaagcgttcaggggctggaagatattaaactgatgcaggcggagaaccgttttcttcagcagtggaatagctatatccgtattaccggcgagtcgggcctacgcacccgcaaactcacgcaagggcttatcagttgggggatgtcggtacaaagtctggtgtatgccgcggtgattatgttcggcgcgccgatggtcattgaaggcagtatgactcatcgcgccgtggtcgccgcgtcgatgctcggctcgcggatgatcgcgccaatggctaacctgtgcggcgtgtggcgcgctggcagcaggtgaaagcggcaaagatgggtctcgacaacattatgcaactgcccaccgagacacagcatgacgatagcctgatacaccgcgacatcctccacgggcattacctctttgaaaacgctcagtttcgttaccataacgacgatcaacgcatacctgcgcctcgtacgtctggagatcatgccaggcgagcggattgcgatactggggcgtaacggcgcgggtaaatccacacttttacaggcgatggcgggcggcctggagatgattcagggagatgcccggcttgataatctcacgttgtcgcacatc

SEQ ID NO: 37260 - DNA, 482 bp, Salmonella paratyphi A
atgacgaagaaaaaagcacataaaccgggctcagccaccatcgcgctgaataagcgcgcccggcacgaatactttatcgaagaagagttcgaggctggtctcgccctgcaaggctgggaagtaaaatctctgcgcgcaggaaaagccaatatcggcgacagttacgttatcctcaaagatggcgaggcctggctgtttggcgcaaactttacgccgatggcgtcgcctcgacacatgtcgtatgcgacccaacccgaacccgcaaactgttgttaaatcagcgtgagcttgattcactgtatggccgtattaatcgtgaaggttatactgtcgtcgcgctttctctgtactggaaaaatgcctggtgcaaagtgaagatcggcgtggcgaaaggtaaaaaacaacatgataaacgttccgatcttaaagaacgtgagtggcaactggataaagcacgcattatgaaaaatgcaggccgataa

SEQ ID NO: 37261 - DNA, 821 bp, Salmonella paratyphi A
atgaataatcgagtccatcagggccatttagcccgtaaacgcttcgggcaaaactttctcaacgatcggtttgtgatcgacagtattgtttctgctattaatccgcaaaaaggccaggcgatggttgaaatcggccccggtctggcggcgctgacggagccggtcggcgaacgactggataagctcacggtcattgaacttgaccgcgatctggcggcgcgtttgcaaacccatccgttcttagggccgaagctgactatttatcagcaggacgccatgaccatgaactttggcgaactgtctgcgcagttgggccaaccgctgcgtgtgttcggcaatctgccctataatatctccaccccgctgatgttccatctctttagctatactgatgccattgccgacatgcactttatgttgcaaaaagaagtggtaaatcgtctggttgcagggccgaacagcaaagcgtatggtcgtttaagcgtgatggcgcaatattactgtcaggtgatcccggtgcttgaagtgccgccatccgccttcacgccgccgcccaaagtgactccgccgtggtgcgtctggttccacacgcaacaatgccttacccggttaaagatattcgcgtgttgagccgtattaccaccgaggcctttaaccagcgccgtaaaacgatccgtaacagtctcggcaatctttttagcgttgagacattgacggaaatgggtattgacccggcaatgcgcgcggaaaatatctctgtcgcgcagtactgccagatggccaactatctgtcggaaaacgcgcctttgaaggagagttaa

SEQ ID NO: 37262 - DNA, 479 bp, Salmonella paratyphi A
atgatcagtctgattgcggcgttagcggtggatcgcgtcatcggtatggaaaacgccatgccgtggaacctgcctgccgatctcgcctggtttaaacgtaacacgttaaataaacctgtcgtcatgggacgtcacacctgggagtccatcggacgccccttaccgggacgtaaaaatattgttatcagcagccagccgggcaccgacgatcgcgtgcagtgggtgaattctgtcgatgaggcgattgccgcttgcgcgatgcgccggaaattatggtcattggcggcgggcgcgtgtacgagcagttcctgccaaaggcgcagaagctttatctgacgcatattgatgcggaagtcgaaggcgatacccattttccggattatgaaccggatgactgggaatcggtattcagtgagtttcacgatgccgacgcgcagaattctcacagctattgtttcgagattctggaacgtcgttaa

SEQ ID NO: 37263 - DNA, 1347 bp, Salmonella paratyphi A
atgttgaaatcccccctgttgtggaaaatgattacgttaggcggcgccatgatcctgctgttaattcccctgatgatggtacggcacaccatcgtggagcgtgctgattatcgaagccatgtagaagccgctattcgtcagagtaccagcggcccgcaaaaggttgtcggcccgctggtggcggttccggtgacagagctctataccgtgctggaagaggagaaagaggtccagtataagcgcagctatctctatttttggctgccggagtcgctattggtcgaaggcaatcaaaacgttgaagcgcgaaaaataggtatttatcaggggcaggtgtggcataccgatatggcgataaaggcggagtttgatgtggcccgtctgcatgagctgaacagaccgaacattacccttggaaagccctttatcgtcgtgggcgtcggcgatgcgcgcggtatcagcgcagtaaaagcgccgcaggtgaatggtgaaatgctcactgtagaaccggggaccggcttactggaaagtagagagtgcattcatatcccgctgccggacagtcagtgggcgacgcgtaacctgacgttggcgatgtcgttaaatttaagcggaaccggcagcttttcactggttcccgtcgggcgtagcagtgaaatgaccctgaccagtaactggccgcatccgaattttgtgggggattttcttcccggtaaacgcgaaatcagcggttcaggatttcaggcccagtggcaaaccaaccagtttgccacgaatctcggcgaacagtttgctgatgcgcaaaaggtggattgggacaacttaccggcgtttagcgtcgctgtatcgacgccagccgatcagtatcaactgacggacagagcgacgaaatatgccattttgttgattacgctaacgtttatggctttctttgtcttcgaaaccctgacgggacagcggttacacctgatgcagtatctgctggtggggttatcgctggtgatgttctacctgctgttgctggcactgtcggaacatatcggtttcacgccagcctggatcgccgccagcctggtgggcgcgttgatgaatagcgtttatttgcaggcggtgctgaaaggatggcgcaatagcgtgctgtttacgttagcgttattggcgctggatggcgtgatgtggggattgctgcgttcggaagatagctcgttgcttctgggtaccggcgttctgctactggcgcttggcggcgtgatgttcctgacgcgccatctggactggtattcgctctcttgtcagcaacgtaagtcattaccgccagtaaaagatgacgaattacgtttgtggaaa

SEQ ID NO: 37264 - DNA, 2406 bp, Salmonella paratyphi A
gtggagaatgtcgatctatcggttttcgaaaagggggggcaggcagaaggcacctataatgttgatatttatattaataacaccagtgttgaaacaaaaaatattgcctttaaaaataaaaaatcagcagataataagctctccctacagccgtgtcttagcgttgaacaactcaagcagtggggcgtaaaaacagaaaacttccccgagcttaaaaatgacccaaacgggtgtaccgatcttagtctgctggctggcgctgtagcaaagtttaatgtcatcggtaaccggctggatttagcgatccctcaaattgcgttgatcgccgacccgcgagaattcgtccctaccagcgaatgggatgaaggcattaatgcttttttgctgaactacagttttaccggatcgcaggatcacgatattgatgaaaaccggacggaaaatagcgaatacgctaacctgcgccctggtattaacattggcgcatggcgttttcgcaactactcaacctggaatcatgatagcgatgggcaaaatagctgggattctgcctacacctatgtttctcgcgatatcgaatttttaaaaggacagctgatcgccggggaaaataacacgcccgcggacgtctttgacagtatttcatttaagggcgtacagatctcttctgatgacgatatgttgccggacagtatgaaagggttcgccccggtcattcgcggggtggccaaaagcagcgcgcaggtaaccgttgaacaaaacggttataccatctacaaaactaacgttccggcgggtccattcgccattaatgatctttatccaaccggcggttcgggcgacctgtacgtcaccatcaaagaatccgatggttctgaacagcatttcattgtgccctacgccagcgttccggtcttacagcgtgaaggccacctgaaatacgacctgacggtaggccgcacgcgttcatcagatacgcattccgcacaacaaaatttcgcagaactgacggccttatacggattagcaggcggcataacctcctatggcggaatagagagtacgctgagcaatgatgtttatcatgcggcgctcatcgggacaggtttaaaccttggcgatctgggcgcattgtctttagacgtcaccaactcatggtcaaaaattaaagcaggcgatgtggttagcgatacgcttaccggacagtcctggcgtattcgttacagcaaagatattcagtcaacaggcaccaatttcactgtcgccggttaccgttattcgaccaaagattactacgctcttgaggatgtgctggatacctatagcgataatagtcactatgatcatgtacgtaatcgcaccgacctgtcgttgtcgcaagacattatctacggttccatttcactcactttatataatgaagattactggaatgacactcataccacatcattaggtattggctataacaacacatggcataacgtaagctatggcattaactattcttatacgctgaacgccgataattctcaggatgaagacgacgatacggaagacagtaatgaccagcaaatttcaatcaatattagtattccgttagatgcctttatgccgtcaacgtatgccacctacaatatgaactccgcgaaagacggcgataccacgcatactgtcggtttaaacggcactgcgctggcacagaaaaatctctcatggagcgttcaggaaggttattcctctcaagagaaagccaccagcggtaatgtgagcgcaacctataacgggacgtatgcggatattaacggcgggtatagctacgataatcatattcgtcgcctgaattatggcgttcagggcggcgtactgctacatcgaaatggcctgacactatcccagccaatggacgacgccatcatattggttaaagcccctggcgcagcgggtgtccccgtgaataacgaaacgggcgtggacaccgattttcggggttatgccgtcgtaccttatgcttcgccttaccatcgtaatgaagtgtctttagatacgacaggtattagaaaaaatattgagctcattgataccagtaaaacgctggtgcctacccgtggcgcggtggtcagggctgaatataaaaccaatattggctacaaggcattgatggtattaacccgcataaacaatctgcctgttccttttggcgcgaccgtctcgtctttaacaaaaccagacaatcacagcagttttgttggtgatgcggggcaagcctggttaaccggactggaaaaacaagggcggttattagtgaagtgggggccaacagcagcagaccggtgtcaggtctcttatcgtataccgagctccccctccgcttctggcgtagaaatcttacacgagcaatgccag

SEQ ID NO: 37265 - DNA, 420 bp, Salmonella paratyphi A
atgaagcgttatacacctgacttcccagaaatgatgcgtttgtgcgaaaccaatttttcgcaattgcgccgcctgctgccgcgcaatgacgcccccggtgaaacggtgagctatcaggtgggcaacgtacaatatcggttaacgattgtggaatcgacccgatacactacgcttgtaacgattgagcaaacggcgccagccatcacctactggagcctgccgtcgctgacggtgcgcctctaccatgatgcgatggtggctgaagtgtgttcaagccagcagatctttcgcttcaaagcgcggtatgattatccaaataaaaagttgcatcaacgcgacgaaaagcatcaaattaatcagtttctggccgactggctacgattctgtttagcacatggagcgatggcgattccggtttat

SEQ ID NO: 37266 - DNA, 827 bp, Salmonella paratyphi A
ttggaaagcctgttaaccctacctctggctggtgaggcccgagtcaggattttacaaattacagatactcacctgtttgccgaaaagcatgaaacgctgttaggcgtcaatacctgggaaagttaccaggccgtgctggaggctattcgggcgcaacagtatgaatatgatctgatcgtggccaccggcgatctggcgcaggatcaatccgctgcggcttatcagcattttgctgagggtatcgcaagctttcgcgcgccttgcgtttggctaccgggcaatcatgattttcagccggcaatgtacagcgcgctgcaagaggcggggatttccccggctaaacgcgtgttaatcggtgaacaatggcagattttgttgctggatagccaggtgtttggcgtcccgcatggcgaactgagcgagttccaactggaatggcttgagcgtaacgcgccgatgcgccagagagacagacattgctcctgttgcaccaccatccgttgccggcagggtgcagttggctggatcagcacagcttgcgtaatgctggtgagctggatagcgtgctggcgaatttcccgtgtgtaaaatatctgttatgcgggcatattcaccaggagctggatcttgactggaacggtcgccgtctgttggcgtcgccgtcaacctgcgtacagttcaaaccgcactgcgcgaactttacgctggatactatcgcgccgggctggcgtacgctggagctccaggcgaacggcgtcctggagacggaagtgcatcgcctgcaggatacccggttccgacccgataccgcttcggaaggatactga

SEQ ID NO: 37267 - DNA, 720 bp, Salmonella paratyphi A
atgggcggtagcgctattatggcgaaagtgcggccttatatcggcacaaccacgacctggtttgtcggtcaggcggcgcatatcggacgctttatgatgcactgcgccctgatgctgttgtttagcgccctgctttactggcgcggcgaacaagtggcgatgggtatacgccattttgcctgtcgtctcgcggctaaacgcggcgatgcggcggttctgctggctgcccaggcgatccgcgccgtggcgcttggcgtggtggtcaccgcgctggtacaggcggtacttggcggcgtcgggctggcgatttccggcgtgccttacgctaccctgttgacggtagtgatgatcctttcgtgtctggttcagttggggccattgccggtattgattccagccattatctggctttactggacaggcgacaccacctggggcaccgtgctgctggtttggagcgccgtcgtcggcactctggataacgtgattcgcccggtactcatccgcatgggcgccgatttaccgctgcttctgatcctttccggggtaatcggcggcctgattgcattcggtatgattggtctgtttattggaccggtgcttctggccgtgacctggcgtttgttctccgcatgggtacatgaagttccggcgccgacgaatgaaccagaggagctccttgaagagctggatgacatcgaggaagccaacaagcagtca

SEQ ID NO: 37268 - DNA, 756 bp, Salmonella paratyphi A
atgaaaaccgtcaccgtaaaaaatcttatcattggcgaagggatgcccaaaattatcgtgtcgttgatgggaagagacatcaatagcgtgaaagcggaggcgctggcctaccgcgaagctacattcgatattctggagtggcgcgtggatcactttatggatatcgcatcgactcaatccgttcttaccgctgcgcgtgttatccgcgatgcgatgcctgacattccgttactgtttactttccgcagcgccaaagaaggcggcgagcagacaataaccactcagcattatctctcgcttaatcgtgccgcaatcgacagcggcctggtcgatatgatcgatcttgagctatttaccggtgatgctgacgttaaagccactgtcgattatgcccatgcgcataatgtttatgtcgtgatgtctaaccacgattttcaccagacgccgtccgcagaggaaatggttctgcggctacgtaaaatgcaagcgctcggcgcggatatacccaagattgccgttatgccgcaaagcaaacatgatgtattaacgttactcactgccacgctggagatgcagcaacattacgccgaccgtccggtaattactatgtcaatggcgaaagagggtgtcatttcacgtctggcaggggaagtgtttggctctgccgccacgtttggcgcggtgaagcaggcttcagcgccggggcaaatcgccgtaaatgatctacgcagtgtattaatgattctgcacaacgcc

SEQ ID NO: 37269 - DNA, 744 bp, Salmonella paratyphi A
atgttaagcattaaagatttacaggtcagtgtggaagaaaaagcgattttgcgtggcctgaatctggagattcgccccggcgaagttcacgccattatggggccgaacggttccgggaaaagcacgctttccgccaccctggcgggacgtgaagattatgaggtcaccggcggctcggttacgttcaaaggtaaagatctgcttgaactgtcgccggaggaacgggcgggcgaagggatttttatggccttccagtacccggtagaaatccccggcgtcagtaaccagtttttcctgcaaaccgcgctgaatgccgtgcgcgcctaccgcgggcaggcgtcgttggatcgctttgattttcaggatctgatggaagagaagatcgcattgctgaaaatgccggaagatttgctgacccgttcggtaaacgtcggtttttccggcggggagaaaaagcgcaatgatattttgcaaatggcggtgctggagccggaactgtgcatccttgatgagtcggactccggactggatatcgatgcgttgaaaattgtggcggaaggcgtcaacgcgttacgcgacgataaacgcgcttttattatcgtgacccactatcagcgcatactggactacatcaagcccgattacgtccacgtcctctatcaggggcgaattgtccgatccggcgattttactctggtcaaacaactggaggagcagggttatggctggcttaccgaacagcag

SEQ ID NO: 37270 - DNA, 1074 bp, Salmonella paratyphi A
  misc_feature (73)..(73): n=g, a, t or c
  misc_feature (337)..(337): n=g, a, t or c
ctcaacatcgtcgaagtgggcgagcagatccgtaaagacatcaccgtggtgatgggtgcaccgaagtgcccgngcaccgaagtacgtgaagaatacaagcgtggcttcggtgtgccaacgctgatcgccgttcacccggaaaacgatccgaaaggcgaaggtatggcgattgctaaagcctggctgcgccacggcggtcaccgtgcgggcgtactggaatcttctttcgtggcggaagtgaaatctgacctgatgggcgagcagaccattctgtgcggtatgctgcaggccggttctctgctgtgcttcgacaagctggtggcagaaggcaccgacnccatacgccgaaaaactgattcagttcggctgggaaaccatcaccgaagcgctgaagcagggcggcatcaccctgatgatggaccgtctgtctaacccggcgaaactgcgtgttacgcgctgtccgaacagctgaaagagattatggcgccgctgttccagaaacacatggatgacatcatctccggcgaattctcttccggcatgatggctgactgggcgaacgacgataagaaactgctgacctggcgtgaagagaccggtaaaaccgcgttcgaaaccgcgccgcagtttgaaggtaaaatcggcgagcaggagtacttcgataaaggcgttctgatgatcgcgatggtgaaagcgggcgttgagctagcgttcgaaaccatggtcgattccggcatcatcgaagaatccgcttactacgaatcactgcacgagttgccgctgattgccaacaccatcgcccgtaagcgcctgtacgaaatgaacgtggttatctccgataccgcagaatacggtaactacctgttctcttacgcttgcgtaccgctactgaaaccgtttatggcggaattgcaaccgggcgatctgggtagtgctatcccggaaggcgcggtagacaacgcacagcttcgcgacgtgaacgacgcgattcgtagtcatgcgattgagcaggtaggtaagaaactgcgcggctatatgacggatatgaagcgtattgcggtagcgggttgatat

SEQ ID NO: 37271 - DNA, 918 bp, Salmonella paratyphi A
atgtttggcctctcggattactacataccgcacttatcgctatatcttatttgcgctggtgtattggtttttgttggtgcgatggatgaccgttttgatatcagtgtaaaaattcgtgctgtggttcaggctgttattgcggttgtaatgatggttatcgcaaaacttcacttaggtagccttggttacatctttgggccttgggagttagtgcttggcccctttggctatttccttactctgtttgcggtatgggcggcgatcaacgctttcaatatggtggacggtattgacggcctgctgggtgggttatccagcgtctcatttgcggcgatggggctgattttatggtttgatggtcagactagtctggcaatgtggtgctttgccatgatcgccgcgattctgccttacattatgcttaatctcggtattttggggcggcgttacaaagtctttatgggcgatgccggtagtacactgattggctttaccgtcatctggctcttactggaaacgacgcaggggaaaactcactctatcagcccggttaccgcgctatggattatcgctattccattgatggatatggtggcgattatgtatcgccgtctgcgtaaagggatgagccccttttcccctgatcgccaacatattcatcatttggttatgcgagcagggtttacttcccgccaggcatttgttcttattacgctcgcagcggcgattctggcgggagtaggcgtaacggcagaatactctcattttgttcctgaatgggttatgttggtgctctttttgctagcattcttcctctatggctactgcattaagcgggcctggaaggtggcgagatttattaagcgtgtgaagcgtcgcctgcgcaggcaacgtgagaaccggccaaacttaaccaag

SEQ ID NO: 37272 - DNA, 1257 bp, Salmonella paratyphi A
atgaatcttaccgaattaaagaatacgccggtttctgagctgatcactctcggcgaaagtatggggcttgaaaacctggcccgtatgcgcaagcaggacattatttttgccatcctgaagcagcacgcaaagagtggcgaagatatctttggcgacggtgtgctggagatattgcaggatggatttggtttcctccgttctgcagacagctcctacctcgccggtcctgatgatatctacgtttcccccagccaaatccgccgtttcaacctccgcactggtgataccatttctggtaagattcgcccgccgaaagaaggtgaacgctattttgcgctgttgaaagttaacgaagttaactacgacaaaccggaaaacgcccgtaacaaaatcctctttgagaacttaaccccgctgcacgcaaactctcgtctgcgtatggagcgtggtaacggttctaccgaagacttaacggcgcgcgttctggatctggcttcgccgatcggtcgcggccagcgcggtctgattgtcgcgccgccgaaagcgggtaaaaccatgctgctgcagaacatcgcgcagagcatcgcgtataaccacccagactgcgtgctgatggtgctgctgattgacgaacgtccggaagaagtaaccgagatgcagcgtctggtgaaaggcgaagtggttgcgtctacctttgacgaaccggcatcccgccacgttcaggttgccgaaatggttatcgagaaggcgaaacgtctggttgaacacaagaaagacgttatcatcctgctcgactccatcacccgtctggcgcgtgcctacaacaccgtggtgccggcttccggtaaagtattgaccggtggtgtggacgctaacgccctgcatcgtccgaagcgtttcttcggcgcggcgcgtaacgtggaagagggcggtagcctgactatcatcgcgacggcgctaatcgataccggttccaagatggacgaagttatctacgaagagtttaaaggcaccggtaacatggagctgcatctctcgcgtaagatcgctgaaaaacgtgtcttcccggctatcgactacaaccgttccggtacccgtaaagaagagctgctcaccactcaggaagagctgcagaaaatgtggatcctgcgtaaaatcatccatccgatgggtgaaattgacgcgatggaattcctcattaacaaactggcgatgaccaaaactaatgacgactttttcgagatgatgaagcgctca

SEQ ID NO: 37273 - DNA, 2025 bp, Salmonella paratyphi A
atgcgtttaaatcctggccaacaacacgctgtcgaattcgtcaccggaccctgcctggtgctggcaggagcgggttctggtaaaactcgcgtaattaccaataaaatcgcccacctgatccgcggatgcggctatcaggcccggcatattgcggcggtgacgtttaccaacaaggcagcgcgtgagatgaaagaacgtgtcgggcagacgctcggccgtaaggaagcgcgcggtttgatgatctccacctttcatacgctagggctggatattattaagcgcgagtacgctgcgctggggatgaaatcgaacttttcattgtttgacgataccgaccaggtcgccttgctcaaagagctgaccgaaggcctgatcgaagacgacaaggttctgttgcaacagttgatctccacgatctccaactggaaaaacgatctcaaaacgcctgcacaggcagcggcgggggcgaaaggtgaacgcgatcgtatttttgcccactgctacgggctttacgacgcccatatgaaggcatgtaacgttctcgattttgatgatttgattttgctgccgacgctgctgctgcaacgcaatgacgaggtgcgagcgctggcagaataaaattcgttatctgctggtggatgaatatcaggatactaacaccagccagtatgagttggttaagctgctggttgggcaacgcgcgcgctttacggtcgtaggcgatgacgatcagtctatctactcctggcgcggggcggtccgcaaaacctggtgttactgagccaggattttccggcgctgcaggtgattaagctggagcaaaactatcgttcttcgggccgcatcctgaaagcggcaaatattctcatcgccaacaatccgcacgtctttgaaaagcgcctcttttccgaactcggttacggcgcggaactcaaagtgttaagcgcaaacaatgaagagcatgaagctgagcgcgttaccggcgaactgattgcccatcactttgtgaacaagacccagtacaaggattacgccattctgtatcgcgggaatcatcagtcgcgggtatttgaaaaattcctcatgcagaaccgcattccgtacaaaatttccggcggcacctcatttttctcccgtccggagattaaagacttgctggcctatctgcgggtgttgaccaacccggatgatgacagcgctttcctgcgcatcgtgaatacgccaaaacgcgaaatcggtccggccactctgcaaaagctgggtgaatgggcaatgacgcgtaataaaagcctttttaccgccagctttgatatggggcttagccagaagctgaccggacgtggttacgattcattgacgcgttttacccactggctgggggaaatccagcgtctggccgaacgtgagcctgtcgccgccgtgcgcgatctcatccacggtattgactatgaatcctggttgtacgaaacctcgccgagccccaaagcggcggaaatgcgtatgaaaaacgttaaccagctctttagctggatgactgagatgctggaaggcaacgaactcgatgagccgatgacgctcaccctggtggttacacgctttacgctgcgcgatatgatggagcgcggcgagagcgaagaagagctggatcaggtacagttgatgacgcttcatgcgtcgaaaggactggaattcccgtatgtctatatggtgggaatggaagaaggatttttgccgcatcaaagcagcattgacgaagacaatattgaggaagagcgtcggctggcctatgtcgggatcactcgtgcgcagaaagagctcacctttacattatgtaaagagcgccgtcagtatggggaactggtgcgcccggaacccagccgcttcctgttagaactaccgcaggatgatttaatctgggagcaggagcgcaaagtggtaagcgcggaggagcgaatgcaaaaagggcaaagtcacctggctaatctgaaagccatgatggcggcaaagcgagcgaaatcgtaggcc

SEQ ID NO: 37274 - DNA, 1151 bp, Salmonella paratyphi A
atgcaacgtaaaaagatactaattgtaggtgcgggcctttcagggcagtaatagcacgccagttagccgagcagggacatgtagtcaatattattgatcaacgttcgcatatcggtggtaacgcttatgatgcccgagatgagcacacgggtattatggtgcacgtttatggtcctcatatttttcatactgataatgaaactgtatggaattatgtaaataaatacgctgagatgatgccttatatcaataaggttaaggccacagtaaatggtcaggtattttctctacctatcaatcttcataccatcaatcaattttttggtgtcgcctgctcacctgatgacgccaggaaattactgcttcaaaaatgtgatagcaccattctggaaccacaaaattttgagcaacaggccttgcgtttcattggtaaagagttatatgaagccttttttaaaggttataccattaaacaatgggggcttcatccttccgcgttacccgcttctgtattgaaacgtatccctgttcgctttaattatgatgataactatttcaatcataagtttcagggaataccaaaatttggttatacacaaatggtcaagtccattgtcgaacacgaaaatatcgctgttgaactatgtcgctccttcactcaggaaatgcggacagattatgatcatgtttttttcagtggcgcgctggatgccttttactcctgtcaatatggccgactggaatatcgtacattagactttaaaaaaataatttgccagagtgattatcaaggatgcgcagtaatgaattattgttcaatagatactccttatactcggattactgagcacaaatatttttctccgtgggagagacatgaagcttcaatatgttatcaagaatatagtcgggaatgtgaagctggtgatataccctactatcctgttcgcagggcagataaaatggatttactgaataaatatctgtcgcgggctaaaaaagaaaaaaatattactttcattggtcgtcttggcacttatcgttatctcgatatggacatcacgatagctgaagcattacagacggcggacgtatacttaacgtcgctatatgaacaaaaagaaatgccagcttttacagttaccgtttga

SEQ ID NO: 37275 - DNA, 708 bp, Salmonella paratyphi A
atgaaaatctcttgcaaaaacgttggcgtaatactccctatatttaactccagccaccgttcatttaaaaaaacttttttacaggctgcttcaggtggacgaattggctcatcgaataccgggattattgaagtagaggcattaaaaaaaattgattttacgcttaccgaaggtaaccgtcttgcgcttattggacacaatggttcgggcaaaaccactcttctgagagtacttgcaggggcctataaaccaacttcagggaagtatgaatgtatcggtcgagtcaccagcctcattgatcccatgatgggaatggatggtgagcttacaggcctggaaaatataaaactgaggggtctatttctcggtctgtcaaaaaatgaaataaaaaatattacagaagatgtcatcgagttcagcgagttaggtgattttattaaaatccccgttagaacgtattctagtggtatggttctgaggcttggtttttctatttctactgcaattaatcctgaaattttactgatggatgaatggatgagcgtgggtgatagtgattttaaaagaaaagcagagatgagattaaatagctttatctctaaagcgggcattatggtaatggccactcacgatgatgaactggctaaatctgtatgtaataagttcatcaggcttgagcacggtgagatagttagcaaaggcggattt

SEQ ID NO: 37276 - DNA, 641 bp, Salmonella paratyphi A
atgagtaagcctgttattgtgctgtggtcggatgcgaactttttctctccctacgtcttgtccgcctgggtggcattacaagaaaaagggctttcctttactctgaaaactcgcgatctggaccagggagaacatctgcaacctggctggcgaggatatgcgctgacgcagcgcgtaccggtgcttgaggccgacaattttgagctgagcgagtcgtccgctattgcggaatacctggaggagcgtttcgcgccgccgcagtgggagcgtatctacccgcacgatttacaaaaacgcgcgcgcgacagattcaggcgtggctacgcagcgatttactgccgcttcgcgaagaacggcctaccgacgtggtgtttgccggggcgaaaaaagcgccgttaagcgaggctggaaaagccagcgcggcaaaactgtttgcgacggctgaagcgctattggggcaggggacgcaaaatttatttggtgaatggtgcattgccgataccgatctggcattgatgatcaatcgtctggcgctgcatggcgatgacgtgccggcgtcgctggcggcgtatgcgacattccagtggcagcgtgcttccgtacagcgttttattgcgctttcctcgaagcgttcaggctga

SEQ ID NO: 37277 - DNA, 1378 bp, Salmonella paratyphi A
aattctggcttacttggcatcaaagacattgtctttatgaatgtcatcgctattctgagtttgcggcaaatccctaacgtggcgccttacggggcatcggccatgttgctatgggtgatagccgcattctgcttgttttttcctttagcgatggtatgcggcgagctgtcaaccggctggccgaaagatggcgggatatttgtctggattaaagaggcatttggtaaacgtattgcatggattgtcgtggtttgttttctcttttcctgcgtactgtttttcccattaatgctgcaattcggctttaccgcgttgggctatatgatcggcggcggctggcggaaaataaagcgtttatcggtattggttccgcggtaattttctggctattaacgctgatgaatatccgcgggatggaatggacaaaaattattaatagcatcagcgcctggtgcggcgtatttattccctccgccaacctcattttgctggcggtggtatggctatgtaccggacaccagatgcagacggactacactacagcgaaaaactggattccggatctcggacactgggatacgatcgttttcttatccagcatgatgtttgcgtttgccggactggaggtcgctccgatgattgccgggcgtacccgtaatccacaacgtgattttccgcgagcgatggcctctccgccgccgttatcgttgggatctatatggtcggcacttgggcgctaaatacgcttttacccgccgggaaaaccgacattgtggcaggcgtcatgcaggctatgcatgctgctgcggatacgctgcatatgccgtggttaattcctgttatggccatctgtatgttttttggcgctctcgggcagattaactcctggctggtggggccgatttatatgctccaggaagcctcgcgtgaagataatctgctgggggaccgaatcggcaaattacatccggtgtggaaaacgcccgcctttgccttgactgtacaggcgattattgtcacggtcctgtgtttttcgacttttatttcgccaagcgttgcggcggcttactggatgttaacggcgctaacgaccatcacctattttattccttacctggtgatgttcccggcgttctggcgtttacgtaagacccagccggatacgccaagaagttttaaaattccgggcaaggttttaccggctattttacccgcgctgggctttctttctatcgcctttgccgttgcgctgttatttattccgccttctcaaattgatatgggcggatatttccagtacgccgggaaaattattggcggagccgtgctggcggttgtcgtcgcggagtacatttaccatcgggcgcagaaacgtaat

SEQ ID NO: 37278 - DNA, 894 bp, Salmonella paratyphi A
atgcagattctgattaccggcggtacgggcctgatagggcgtcatctcattccccggctgttaacactggggcaccaggtgacggtcgttacgcgcaatcccgataacgcgcgtcagattctcgattccagagtgacattatggaaagggctggcggaacgtgagcacctcaatgagattgatgccatcatcaatctggcgggcgaaccgattgccgacaagcgctggacgtcgcaccaaaaagaacggttgtgccaaagccgctgggctatcacgcaaaagttggtggatttaattcatgccagcgcaacgccgccctcggtgttgatatccggctccgcacgggctattacggcgatctgggcgacgttgtcgtcactgaagatgagccgccgcacaacgaatttacgcataaactttgcgcccgctgggaacagattgcctgtcgtgcgcagagcgaccagacccgcgtctgcctgctgcgtaccggcgttgtcctggcgccgcaaggcgggattctggggaaaatggttccgccgtttcgcctcggactcggcggtccggtgggtaatggtcggcaatatctggcctggattcacattgacgatatggtcaacggcatcctgtggctgctggataacgatcttcgcggtcccttcaatatggtctcgccgtatcccgtccataatgagcattttgctcatgcgctgggtcgcgcgctgccgcccggcgattattcgcattccggcgacggcaattcgcttattgatgggagagtcgtcagtgctggtgctgggcggacagcgggcgctgccaaaacggcttgaagccgccggattcgcatttcgctggtatgatttagaagaggcgctggcggatgtgattcgctagttc

SEQ ID NO: 37279 - DNA, 682 bp, Salmonella paratyphi A
atgttgtacgggttttcaggcgtaattttacagggcgcgatcgtcacgctggaactggcgctcagttcgtggtgctggccgtgcttatcggtctcgtcggcgcgggggcgaaactttcgcaaaaccgggtaacggggcttatttttgaagggtacaccaccctgattcgcggggtgccggatctggtattaatgctgctgatattttacggattgcaaatcgcgcttaacgtggtgaccgattcgctgggtatcgaccagatagatattgatccgatggtggccggtattatcacccttggtttcatctacggcgcctattttaccgaaacctttcgcggcgcgtttatggcggtaccgaaaggccatatcgaggcggcgacggcctttggttttacccacgggcaaaccttccggcggattatgttcccggcgatgatgcgttacgccctgccggggatcggcaataactggcaggtgatactcaaagcgacagcgctggtgtcgctgctgggcctggaagatgtcgtcaaagccacgcagcttgccggtaaaagcacctgggagccattctattttgccgtggtctgtggacttatctacctggtatttaccaccgtttccaatggtgtgctgctcttacttgagcgtcgctattccgtgggcgtgaagagggccgattt

SEQ ID NO: 37280 - DNA, 782 bp, Salmonella paratyphi A
atgaaaaaactggcgttatccctttctctggtgctggcattttccagcgctaccgcagcatttgccgctattccacaaaagattcgtatcggtaccgatcctacatacgcgccgtttgaatccaaaaatgcacaaggtgaattggtcggctttgatatcgatctggccaaagaactgtgcaaacgtatcaacacacagtgtacgttcgtggaaaacccgctggatgcgctgattccgtctttaaaagcgaagaaaattgatgccatcatgtcctcgctgtccatcactgaaaagcgccagcaggaaatcgcgtttaccgacaagctttacgccgctgattcccgtctggtggtggcgaagaactctgatattcagccgaccgtcgcgtcgctgaaaggcaagcgcgtcggcgtgctacaggggacgacgcaggagaccttcggcaatgagcactgggcgccgaaagggattgagatcgtctcttaccaggggcaggacaacatttattccgacctgacggctggccgtattgatgcggcgttccaggacgaggtcgcggccagcgaaggtttccttaaacagcccgtcggaaaagactataaattcggcggcccggcggtgaaagatgagaagttattcggcgtaggaaccggtatggggctgcgcaaagaggataacgagctcgcgaagcgctgaacaaagcctttgctgaaatgcgtgctgacggtacttacgaaaagttggcgaaaaagtactttgattttgatgtttatggcggttaa

SEQ ID NO: 37281 - DNA, 2286 bp, Salmonella paratyphi A
atggaagattatatccgcgagaaaacgcacaaaagcagtgataagaatgaccgggaggataacgtttcgcgttataaagggctgccttcgcgcaacctttccgttgcgatccgtgagtatgcgccgggcgcggagattatccttgatggtcgggtattccgctcggccggtgtttcgctgcactggcataaccttaacgccgatactaacgaagcccagcgtctggacagcgcctggcgttgccataaatgcggtactttaggctatgaggaaggtattggtggctcgggggatttattctgtaccaatagcgcgtgcggggagcggatcacgctggataaccgacgtcaggtattacagcccgccggttttgtcaccgatgcccatactcccgttacgaacaacattgaaacaatgaaattcatcccggtggtgcctgcctgggtgtttgtgaaagcagaacgcgtgccactgccaaacccgctgatgggttttatggcgtcaggcgcggatggtcatgttttccagcagagcatgggcgaaggtggacacggttatgcgctgtgcctgagctgcggccgggcggagtcaatgctcaatgccaccgatacgccgaaatcgatggaagcgcattatcctccgcgccccggtaaatctgatcgcgacagccagaatcagcggattatctgccctggctccacggcgctgaataagaatgtcacgctgggtgcgctggcgcgcaccgatgtgtttgaactcattttgcgccgtccgcaaaacggggagtatatccccgataattctgatgaaggccgtattgtggccatgacgctggcggttgcactacgtcgagcgctggccagcgtgctgggggtatcggcgacagaactgggctatgcggtgcgtccggtcagactggataatgagcaatcggtcctggcggtgcagctttacgacattatcagcggcggtgcggggtttgcttccagtgcgccattgcatattgaagcggtcctcaaagggatggtgaaacagctgggatgccgccactgtgataccgcctgtagcgaatgtctgctcgattcgcagacccgccacgatcacgatcagctggatcgtaaagccgcgcaggcctggctgggggaggatttcagtcactatatcggtttgccggaggcggaaaaattctccctggccgacgcgcagtattgcccaggcagcattgaggatgctatccgtcgtgccattaacgacggggcgcgcaaactcacgttgtggatgaatgggccgcttaacgagtgggatttgtatgcccgccagttccgaacggcgatccagaactatcggctgaaagatgaggttgaggttacgctggttgtgcccggtcatattgaagatccggagcttttacaggagattgcgcagtttgccgccattggtgtgcagctttgccagtctgagctgaatacggatacgccggttgtcgcacaggtagcattcaacgatcgcctgatgacgttgatttctcgcagcccagaggccaccatccccggcccgaactggcatctgaatagccagatggttattcgcagccatgcgtttgagccgataacgcttagtaaagcagagctattatccgatgccgcaggtagcagaggcctggtcaacgatattgagatccataagcagcttaatggcccggtttctcagtttggtcagcgtttctggggcgtgttaaccggggcgcaggaagatattcagacgctgctgaaggaaaaccaggtgacgcgcattcactatagcgatcgttatctgcaaaacccggtggcgctggcgttattaggcgggctgttaaaaccgctgaaatcgatcctggcgcaggatgcgcaagtgacgattgatacgctgtttaagagtaaagagcggccaggcaacaagccgttccatgactggatgagtgaagcggattttcaggattttgccgaccagtggtttgcggcatctatgggcagagccgtcgtggttaacaccgttggctcgccgcgtgatattccacaccatcgtaaactgatggtgaccttcagtaatggtcaggcgctgaagatccgttttgaccaagggatgggatactggcgcatcgtctttgcgcgagcgtatcgcgattttgattttaacgatgatgtggctttccagctcgggaatatggcaaaagcctgcgttgaaggtcaggtggtcaacagcgaggaaagttgggcaaccgatgtgctggtgcaggtgatagtccct

SEQ ID NO: 37282 - DNA, 360 bp, Salmonella paratyphi A
atgcggcaaattccacaaaatcatattcatacacgttccacgccattctggaacaaagagacggcgcctgccggaattttcgaacgccaccttgataagggaacgcgacccggcgtttatcctcgcctctcggtgatgcagggggcggtcaaatatctcggatacgctgatgaacattgctctgagccggaagagatcatggtgatcaatgccggcgagtttggcgtgtttcctccggaaaagtggcacaatattgaggtcatgacggatgatacctattttaacatcgacttttttgtcgcgccggaagtactgatggaaggggcgacctcacgaaaagtcattcatgccgggagagaa

SEQ ID NO: 37283 - DNA, 180 bp, Salmonella paratyphi A
atgggaaaagccacttataccgtcacggtcacgaataatagcaacggcgtctctgtggactatgaaacggaagcaccgatgacgttgctggtacctgaagttgcagcagaagttgtgaaggatttggtcaataccgtgcgttcctacgataccgaaaacgaacacgacgtttgcggttgg

SEQ ID NO: 37284 - DNA, 246 bp, Salmonella paratyphi A
atgggcattctttcatggattatttttggacttattgcgggtattttggctaagtggatcatgccaggtaaagatggcggcggattctttatgacgatcattctggggatcgttggtgcggtagtcggaggatggatcagtacgttctttggctttggcaaagtggatggtttcaacttcggcagctttgcagtcgcggtgatcggcgcgattgtcgtgctgttaatctacagaaaaatcaaaagc

SEQ ID NO: 37285 - DNA, 927 bp, Salmonella paratyphi A
atggaaaatgtaacctttgtaagtaatagtcatcagcgtcctgccgcagataacttacagaaattaaaatcacttttgacaaatacccggcagcaaattaaaagtcagactcagcaggttaccatcaaaaatctttatgtaagcagtttcactttagtttgctttcggagcggtaaactgacgattagcaataatcacgatacgatttactgtgacgaacctgggatgttggtgctcaaaaaagagcaggtagttaacgtgacgcttgaagaggtcaatggccacatggatttcgatatactcgagataccgacgcaacgacttggcgctctctatgcacttatcccaaacgagcagcaaacaaaaatggcggtacccacagagaaagcgcagaaaatcttctatacgcctgactttcctgccagaagagaggtatttgaacatctgaaaacggcgttctcctgtacgaaggatacaagcaaaggttgcagtaactgtaacaacaagagttgtattgaaaatgaagagttaattccttattttctgctgttcctgcttactgcttttctccgactcccggagagttatgagatcatccttagctcggctcagataacgttaaaggagcgcgtttacaacattatatcttcgtcacccagtagacagtggaagcttacggatgttgccgatcatatatttatgagtacgtcaacgctcaaacggaaacttgcagaagaaggtaccagctttagcgacatctacttatcggcaagaatgaatcaggcagcaaaacttttacgcataggcaaccataatgttaatgctgtagcattaaaatgtggttatgacagcacgtcctacttcattcaatgtttcaaaaaatattttaaaactacgccatcgacattcataaaaatggcgaaccat

SEQ ID NO: 37286 - DNA, 1167 bp, Salmonella paratyphi A
atggagcatctgcacatgaaaacccgtactcaacaaatcgaagaattacagaaagagtggacacaaccgcgctgggaaggcatcacccgcccgtacagcgcggaggaggtggtgaaattacgcggctcggttaacccggaatgcacgctggcgcagctcggcgccgcgaaaatgtggcggctgttgcacggtgaagcgaaaaaaggctatatcaacagcctgggcgcgctgactggcggtcaggcgctgcagcaggcgaaagccggtattgaggcgatttatctttcaggctggcaggtggcggcagatgccaacctggcatccagcatgtatccggatcaatcgttgtacccggcaaactctgttccggcggtagtggatcggatcaacaacactttccgtcgtgcagatcagatccagtgggcatccggtattgaacccaacgatccgcgctatgtggattacttcctgccgatcgttgctgatgcggaagccggttttggcggcgttctgaatgccttcgaactgatgaaatcgatgattgaagccggtgcagcggccgttcacttcgaagatcagctggcgtcggtgaagaaatgcggccatatgggcggcaaggtgctggtccccacgcaggaggcgattcagaaactggttgctgcgcgtctggccgctgatgtgatgggcgtcccgacgctggtgattgcgcgtactgatgcggatgcggcagatctgatcacctccgactgcgatccctatgacagcggtttcattaccggcgaacgcaccagcgaaggtttctaccgcacccatgcgggcattgagcaggcgatcagccgcggtctggcgtatgccccgtatgccgatctggtgtggtgcgaaacctctacgccggatctcgaactggcgcgtcgttttgccgatgctatccacgcgaagtatccgggcaaactgctggcctataactgttcgccatccttcaactggcagaagaatctggacgacaagaccattgccagcttccagcagcagttgtcggacatgggttacaaataccagtttattacccttgcgggcatccacagcatgtggttcaacatgttcgacctggcgcatcatacgctcagggcagggcatgaacactatgttgagaaggttcacaacccg

SEQ ID NO: 37287 - DNA, 374 bp, Salmonella paratyphi A
gttggctcgcagaaactggtggacctgcgggagcttaaattacatggcgattcgtatcgctggaagaactgcgccgtatattacgcccatggctacgaatgccggagccgcctgacacggtcgttctggggtgtacgcattcccctctattacgggacgagcttttgcaagtcctgcccgaagggacgcggttagtggattccggcgcggcgatagcgcgtcgtacagcctggctgttggaacatgaagcgccggatgcgaaatcaaccgatgccaatattgcttattgcatggcaatgacgccaggagctgaacaattattacccgttttacagcgttatggctttgaaacgctcgaaaaactggcggtttaa

SEQ ID NO: 37288 - DNA, 252 bp, Salmonella paratyphi A; identical to SEQ ID NO: 36540

SEQ ID NO: 37289 - DNA, 406 bp, Salmonella paratyphi A
ggaatattaacccgtttcccatcgactacgcctttcggcctcgccttaggggtcgactcaccctgccccgattaacgttggacaggaacccttggtcttccggcgagcgggcttttcacccgctttatcgttacttatgtcagcattcgcacttctgatacctccagcaaccctcacaggccaccttcacaggcttacagaacgctcccctacccaacaacacctgagtgtcgctgccgcagcttcggtgcatggtttagccccgttacatcttccgcgcaggccgactcgaccagtgagctattacgctttctttaaatgatggctgcttctaagccaacatcctggctgtctgggccttcccacatcgtttcccacttaaccatgactttgggaccttagctgg

SEQ ID NO: 37290 - DNA, 419 bp, Salmonella paratyphi A
atttcactgagtctcgggtggagacagcctggccatcattacgccattcgtgcaggtcggaacttacccgacaaggaatttcgctaccttaggaccgttatagttacggccgccgtttaccggggcttcgatcaggagcttcgcttgcgctgaccccatcaattaaccttccggcaccgggcaggcgtcacaccgtatacgtccactttcgtgtttgcacagtgctgtgtttttaataaacagttgcagccagctggtatcttcgactgacttcagctccatgagtaaatcacttcacctacgtgtcagcgtgccttctcccgaagttacggcaccattttgcctagttccttcacccgagttctctcaagcgccttggtattctctacctgaccacctgtgtcggtttggggtacgat

SEQ ID NO: 37291 - DNA, 366 bp, Salmonella paratyphi A
atgctttcagcacttatctcttccgcatttagctaccgggcagtgccattggcatgacaacccgaacaccagtgatgcgtccactccggtcctctcgtactaggagcagcccccctcagttctccagcgcccacggcagatagggaccgaactgtctcacgacgttctaaacccagctcgcgtaccactttaaatggcgaacagccatacccttgggacctacttcagccccaggatgtgatgagccgacatcgaggtgccaaacaccgccgtcgatatgaactcttgggcggtatcagcctgttatccccggagtaccttttatccgttgagcgatggcccttccattcagaaccaccggatcac

SEQ ID NO: 37292 - DNA, 1459 bp, Salmonella paratyphi A
  misc_feature (426)..(426): n=g, a, t or c
gtaacgacttttttacgccaacgacacggacaatttattgcaggtgaacgtcaggccggaaacggcacgaacttttcggtcactaacccagccaccggcaaaatcatcgccgacgttgtgtcggcaacccctacgcaggcagaagaggccatgcagagcgccagacgggcgtttgatgtctggcgtaaaatgccaacgttacaacgcggcgcattactgctgaaactggctgatactcttgccgctcatcgtgaagagttggctcaactggaaagcgtctgttcaggtaaaacgattctgctgtcgcgcggtcttgaactcgatcagtcagtggccttcctgcgttactttgccggttgggcaggaaaaataaccggtgaaacgctgaatgtctccctgccatcaatgggagaagagagatacacnacgtttacccaacgccaacccattggtgtggtcgtcggtattgtgccgtggaatttctcaattatgattgttatctggaaactggccgccagcgctggtatgtggctgcaccatcgtcattaaaccaagtgaatataccccgctgacactgctgcgagttgctgaactggctaaagaggcaggtttccctgatggcgtaattaacgtggtaaacggtgctggcggtgagatagcgcaacagctgatcgcgcatccagattgcgccaaagtgagtttcaccgggtcagtcgcgacaggtgagaaagtccggcgttcggcaacatcgtcaggaaaacgcgttaccctcgaaccgggaggtaaaaatgcggcgctgtttctcaatgatctcacggaacaagccatggtcaacggtattcttgaagccggttatctgaatcaagggcaaatttgtgctgccgcagagcgtttttatctgccccaggaaaaactggatacggtcatgacgctcctcaggcaacggttatcggagatcgtgcccggctcgcctttagatgaaaaaacagtgatgggcccgctggcgaatcaggttcagcttgaaaaagtgctgcgtctgattcaacgcgcacgggaagaaggggataccattgtttacggcggtgaaactttacccggcgaagggtactttttacagccgacagcggtaaaagtgcgtagtaaaaacagtacgctgatacacgaggagacctttggccctgtctgtagctttatcggttatcagaatgaaaaagaggcgctttcgcatatcaacgattcgccattcggccttgctgcaagtgtgtggtcggaaaatatgtctaaggcattacactacgctgaagatattgatgctggcatggtgtgggtcaatatgcataccttcctcgatcccgcggtaccctttggagggatgaaaggatcgggcattggtcgtgaatttggcagcgcgtttattgatgactataccgaacttaaatcggtcatggtccgttattaa

SEQ ID NO: 37293 - DNA, 1869 bp, Salmonella paratyphi A
agtcaggatgcccccttcgggacattattgggttacgcccccggcggcgtagcgatctactcttcagattacaattccctcgatccgtgggacgacgacgacgcagcttttcgtagctacatcgacgatgaatacatggggcataaatggcagtgcgtggaatttgcccgccgttttctctttctgaattatggcgttgtttttactgacgtcggcatggcctgggaaattttctcgctgcgttttctgcgcgaggtcgtgaatgacaatattttgcctttgcaggccttcccgaacggttcgccgcgccgccggagggggcgttgctcatctggcaaaagggcggcgagtttaacgaaaccgggcacgtcgcgattatcacccaactcctggataacaaaattcgcattgctgagcaaaacgttatccacacgccattgccgccaggcagcagtggactcgcgaactggaaatggtcgtagaaaacgggtgttacaccctgcgcgacacctttgatgacacgacgattttaggctggatgatccagaccgacgacacgcaatacagtttgtcacagcctgacatcgcgaatcagtcgctgcgattcgcggccaaggctgcctgagaaaggtcagtttgacggtccgtggctggatgagagcgatccgttacaaaaagcctatgtacaggcgaacggacacgttatcaatcaggacccgtaccagtattttaccatcaccgagagcgctgaacaggagcttatcaaagcgactaatgagttgcatttgatgtacctgcacgccacggacaaagttttaaaagacgataatttgtggcgctattcgatatccccaaaattctttggccgcgcctgcgcctctcctgcagcgccgtcgtcaccatatgatcaccggtcgtatggatttctgcatggatgaacgcgggctgaaagtctatgaatacaatgccgattccgcatcatgccataccgaagcgggattaattctcgaaaaatgggctgagcagggctataccggtaaagggcataacccggcggagggcttaattaacgagctggcgggcgcctggaaacacagtaaagcgcgtcctttcgtccatatcatgcaggatgatgatatcgaggaggactatcacgcgcagtttatgcagcaggcgctgcatcaggccggtttcgcgagcaaaattctccgcgggctgggcgagttgcgctgggatgacgccgggcagttgatcgatggcgacgggcggctggtgaattgtgtctggaaaacctgggcgtgggaaacggcgatggagcagatacgcgaagtcagcgagacggagtacgccgcagtgcctattcgtaccgggcacccggaaaatgaagtccggctgattgatgtattactgcgcccggaagtgttggtgtttgaaccgctgtggacggtgatcccgggtaacaaagcgatcctgcccatcctgtggtcgctcttcccacatcatcgctatttgctcgacacggattttaccgttaacgatgagctggtgcagaccggctatgcggtaaaaccgattgccggacgttgcggtagtaatattgatttggtgagccatcaggaagagctcctggataaaaccagcggcaagttcgccacgcagaaaaatatctatcagcagttgtggtgcctgccgaaggtcgccgggaagtatattcaggtctgtacgtttaccgtgggcggtaactacggcggtacgtgcctgcgcggcgatgattcattagtcattaaaaaagagagcgatattgaaccgttaatcgtcatcaaagcgtaacggggtcattctcgtcgggatatcggcgttggcggcata

SEQ ID NO: 37294 - DNA, 1461 bp, Salmonella paratyphi A
atcgccaccgcccaggtttccgtcgcccgcccaaactggacaaatcacgtctggtatcccgtattgtgcatctgggctgcggggcgtttcaccgcgcgcaccaggcgctctttacccatcatctactggaaaagagcgacagcgactggggcatttgtgaagtgaacctgatgccgggtaacgacgcgcggctgatcgcgaacctgaaagcgcaaaatctgctgtacaccgttgcagaacgcggcgcagaaagcactgaactgaaaattattggttcaatgaaagaagcgctgcaccctgaattcgacggtcatgcagggattctggcggcaatggcgcgcccggaaaccgccatcgtctccttaaccgtgaccgaaaaaggctactgcaccgacccgccagcggcgagcttgatgtcaataacccgctgatccaaaacgatcttgcccatccacaacagcctaaatccgccattggctatattgtcgaagcgctaaacatgcgccgggagcaaggactgaaagcttttaccgtgctgtcgtgcgataacgtgcgcgagaatggtcacgtcgcgaaggctgccgtcctcggcctggcaaaagctcgcgatgccgccctcgccgcatggattgccgataatgtgaccttcccctgcaccatggttgaccgcattgttccggcagcgaccgaagagacgctacagctggttgccgaccagttaggcgtttatgatccctgcgctatcgcctgcgaacccttccgccagtgggtcatcgaagataactttgtgaatggtcgcccggactgggacaccgtcggcgcgcaattcgttgcagatgtcgtaccgtttgagatgatgaagctgcgtatgcttaacggcagtcactctttcctcgcctatctgggttatctcggcgggtatgacactatcgccgataccatgaccaacccggcttaccgtcgcgcgcgctgcgcgtgatgcttgatgaacaagcgccgacgttatcaatgccggaagaccgatctggaagggtatgcgaatttgttgattgcgcgtttcactaacccctcgttgaaacaccgcacctggcagatcgcgatggatggcagtcagaaactgccgcagcgtttgttggacgcggtacgtctgcacttgcaacaggcgatgactatcgccgcctgacgctgggcgtcgccggatggatgcgttacgtcggcggtgtcgatgaacaaggtaaaaccattgatgtcgtcgatccgctgctagcgcagtatcaggcgattcatcagcaatatcagacgccggaagaagccgttcgcgggctactggccatcgagtctatctttggcagcgacctgccgaagaacctcgaatttgtgcaagccgttaccgacgcttaccaacagctattgcagaatggcgcgaaagccacggtagaagcgctggctaagtaaggagat

SEQ ID NO: 37295 - DNA, 780 bp, Salmonella paratyphi A
atgttacgtttctctgccaatctttctatgctgtttacggaatatgatttcctggaacgctttgataaagcggcgttgtcgggatttcgcggcgtggaattcatgtttccctacgataacgacatcgaagtgttaaaacgtaagctcagggataataatctggaacatacgttacataatttaccggctggcgactgggcggctggcgaacgtggaattgcctgtattcctgggcgcgaagaagaatttcgcgatggcgtagcggccgcaatccgttatgcacgtgcgttaggcaataagaaaataaattgtctggtgggtaaaacgccgtcaggattctccgcaacggagatccacgacacgttggtcgaaaacctgcgctatgcggcaaatatgctggcgaaagaagacattttattacttatcgaacctattaatcactttgatatgccgggattccatctcaccggcactcaacaggcgttagcattaattaaggatatcggcagtcgataatatcaaaattcagtatgatatttatcacatgcaacgcatggaaggggaattaacgcaaaccatgacggcatgggccgataaaataggtcatttacagattgctgataacccgcgtcgcgcgagccggggaccggggaaatcaattatgactttatttttaatgtcattaaacagtctgattatgatggctgggttggctgtgaatataaaccactgactaccacggaagcgggattatcgtggattaatcagtaccgttaaaac

SEQ ID NO: 37296 - DNA, 879 bp, Salmonella paratyphi A
atgaaactgggatttattggcctgggaattatgggctcgccaatggctatcaatttggcacgcgccggtcatcaattacacgttacgactattggtccggtcgcggacgaactgctctcgctgggggcggtaaatgttgagactgcacgtcaggtaactgaatttgcagacatcatcttcataatggtgccggatacgccgcagttgaagaggtgttatttggcgaacacggttgcgccaaaacatcgcttcagggaaaaaccatcgtcgatatgagttctatttctcctatcgaaaccaaacgttttgcccagcgcgttaatgaaatgggcgctgattacctggatgccccggtttccgggggagaaatcggggcgcgtgaaggcactctgtcgattatggtcggcggcgagcagaaagtctttgaccgcgttaaaccgctctttgacatcctgggaaaaaatatcaccctggtgggcggcaatggggatgggcaaacctgtaaggtggctaaccaaattattgttgcgctgaatattgaagcggtttctgaagccttagtgtttgcttcaaaagcaggctccgatccggtacgcgtgcgccaggcgttaatgggcgggttcgcctcttcacgcattctggaagttcacggcgagcggatgatcaaccggacgttcgagcctggtttcaaaatcgcgcttcatcagaaagaccttaatcttgcattgcaaacggcaaaagctggcgctgaatttaccgaatacggcgacctgccaggaattattcaatacctgtgcggcaaatggcgggagccagcttgatcattcggcaatggtacaggcgctggaattaatggccaatcataaattgtcctaatta

SEQ ID NO: 37297 - DNA, 1456 bp, Salmonella paratyphi A
atggaacatcaaagagagctataccagcagcgcggttatagcgaagacttattacctaaaacagaaacccaacgaaactggaaggcatttaactatttcaccttatggatgggatctgtacataacgtgccaaattacgttatggtcggcggtttttttatactggggctatcaacatttaatatcatgttggccattattatcagcgcattatttattgcggcggcgatggtaatgaatggcgcggcaggcagcaaatatggcgttccttttgctatgatattgcgaggttcttacggcgtccgcggcgcgctattccctggattattgcgagggggaatcgcggcaattatgtgattcggcttacagtgttacgcgggatcgctggcatttcttattttgattgggaagatctggccaggatttctgacattaggcggagatttcaagctgctgggtctttcactgccaggactaattacttttctaattttttggattattaacgttggcatcggttttggcggtggtaaagtattaaataaatttaccgctatcctcaatccatgtatttacattgtctttggcggcatggctatttgggcaatatcgctggtcggcattggccgattctggactatctgccttcagcgtgcaaaaagcagagcacagcgtctttctgttcctggtggtgattaacgccgtagtcgccgtctgggctgcgccagcggtaagcgcgtccgatttcacgcaaaacgcgcattcatttcgcgctcaggcattgggacaaacattggggcttatcgtagcgtatatattattcgccgtagccagcgtgtgcattattgccggagccagtattcattatggtatggatacctggaacgtgctggatattgtgcagcgctgggacagcctgtttgcttcattctttgcggtgctggtgattctgatgacgacaatttcaaccaacgccaccggtaatattatacctgcggggtatcaaattgcggcgcttgccccgacaaagcttaactataaaaatggcgtaatgattgccagtattatcagtctactgatttgtccatggaaattaatggagaatcaggacagtatttatctgttcctcgatattatcggcggtatgcttggcccggtaatcggcgtaatgttagctcattattttgtggtaatgcgtggaaaaattaatcttgatgagctgtacaccgccagcggtgattacaaatattatgataatggatttaacctgactgcattttcagtcaccctggtcgcagtcattctgtcattaggcggcaagtttataccatttatggagcctttatcccgcgtgtcctggtttgtaggcgtaatagttgcgttcgttgcttatgcgctattgaagaaacgcacgggttttgaaaatacaggagagaaaaaactcgccggttaaata

SEQ ID NO: 37298 - DNA, 1363 bp, Salmonella paratyphi A
atgtcttttgatttaattattaagaacggtactgtcatcttagaaaacgaagcgagagttatcgatatcgccgtccagggcggaaaaatcgccgcgattggcgaaaacctgggggaagcgaaaaatgtgctggatgcgacgggattgatcgtttcgccgggcatggttgacgcgcatacccacatttctgaaccgggccgtacccactgggaaggctatgaaaccggtacccgcgcggcggcgaaaggcggtattaccacgatgattgagatgccgctcaatcagctgccggcgacggtagatcgtgagacgattgaactcaagtttgacgcggcaaaaggtaaattgactatcgacgccgcgcagttgggcggtttggtttcttataacctggatcggctgcatgagctggacgaagtgggcgttgtcggcttcaagtgctttgtcgccacctgcggcgatcgtggcatcgataatgattttcgcgacgttaatgactggcagttttacaaaggcgcgcagaaactgggggagatggaccagacggtactggtacattgcgaaaatgctctgatttgcgatgagctgggcgaagaagctaaacgcgaaggtcgcgtaacggcgcatgattatgtcgcctcacgtccggtatttactgaagtggaagccattcgtcgcgtgctgtatctggcgaaagcggcaggttgccgtctgcacgtttgtcatatcagcagcccggagggggtagaggaagtaacgcgcgcgcgtcaggaaggccaggatgtcacctgtgaatcgtgcccgcactattttgtcctcgataccgatcagttcgaagagattggcaccctggcaaaatgttctccgccaattcgcgaccaggaaaaccagaaagggatgtgggaaaaactgtttaacggcgaaatcgactgcctggtatccgaccactctccatgcctccggaaatgaaagcaggcaatatcatgcaagcatggggtggaattgccggactgcaaaactgcatggacgtcatgtttgatgaagcggtgcaaaaacgcggtatgtcgttgccgatgtttggcaaattaatgcgaccaacgccgccgatatttttggtctgaaacataaaggacgtattgcccccggcaaagatgctgacctggtctttattcagcctgacagcagctatgttctgaaaaatgaagatctggaatatcgccataaagtcagtccgtatgttggccgtactattggcgcgcgtattaccaaaacgattttgcgcggcgatgttatttatgacatcgagcatggcttccctgtgccgccaaaaggtcagtttatccttaaacatcagcagtaatcc

SEQ ID NO: 37299 - DNA, 368 bp, Salmonella paratyphi A
atgctttcagcacttatctcttccgcatttagctaccgggcagtgcattggcatgacaacccgaacaccagtgatgcgtccactccggtcctctcgtactaggagcagcccccctcagttctccagcgcccacggcagatagggaccgaactgtctcacgacgttctaaacccagctcgcgtaccactttaaatggcgaacagccatacccttgggacctacttcagccccaggatgtgatgagccgacatcgaggtgccaaacaccgccgtcgatatgaactcttgggcggtatcagcctgttatccccggagtaccttttatccgttgagcgatggcccttccattcagaaccaccggatcactat

SEQ ID NO: 37300 - DNA, 1050 bp, Salmonella paratyphi A
atggcaagcggcatacagcccgatgctgggcagatcctcaattcgttaatcaacagcgtgctggtggtcgacgacgcgctggcaatccattacgccaaccctgccgcgcagcagttgctcgcgcaaagctcacgcaaactgttcgggacgccgttacctgaactgttgagctatttttcgttaaacattgacctgatgcgcgaaagtttagcggcaggacaaggctttaccgataacgaagtgacgctggtgattgatagtcgctcgcatattctctctttgaccgcccaacgtctgcccgacgattttatactgctcgaaatggcgccgatggataaccagcgtcgtctgagtcaggagcagttgcagcacgcgcagcaaatcgccgcccgcgatctggtgcgcggtctggcgcacgaaatcaaaaatccgctcggcggcctgcgcggcgcggcgcagctactcagcaaggcgctgcccgacccggcgctaacggaatataccaaagtcatcattgaacaggccgacagcgtacgcaaccttgtcgatcgtttgctggggccgcagcacccgggaatgcacattaccgagagcatacataaagtcgcggagcgcgtggtggcgctggtgtcgatggaactgccggataatgtccggcttatccgcgattacgaccccagtctgccagaactgccgcacgacccggaacaaattgagcaagtactgctgaatattgtccgcaatgccttgcaggcgctggggccggaaggcggcgaaattacgctgcgtacccgtaccgccttccagttaacgctgcatggcgacacgcctaccggcggcgcgtatagacgttgaagacaatgggccgggcattcctccccatttacaggatacgctgttctacccgatggtcagcggtcgcgaaggcggcaccgggcttgggttatctatcgcccgcaatcttatcgatcaacacgccggcaaaattgaatttaccagttggccggggcataccgagttttcggtttacctccgattcggaaatagagg

SEQ ID NO: 37301 - DNA, 1409 bp, Salmonella paratyphi A
  misc_feature (1251)..(1251): n=g, a, t or c
atgtccgctgaacacgttttgacgatgctgaacgagcacgaagtgaagtttgtcgatctgcgcttcaccgataccaaaggcaaagaacagcacgtcacgattcctgctcatcaggtaaatgccgaattctttgaagaaggcaaaatgtttgacggctcctctatcggcggctggaaaggcattaacgaatccgacatggtgctgatgccagacgcatccactgcggttatcgacccgttcttcgcggactctaccctgattatccgttgcgacatcctggagcctggcactctgcaaggttatgaccgtgacccacgttccatcgcaaaacgtgcggaagactacctgcgcgcgaccggtatcgccgataccgtcctgtttgggccggaacctgaattcttcctgttcgacgacatccgcttcggcgcatctatctccggctcacatgtggcgattgacgatattgaaggcgcctggaactcctctaccaagtacgaaggcggcaacaaaggccatcgtccgggcgtgaaaggcggttatttcccggttccgccagtcgactccgcgcaggatatccgttctgaaatgtgtctggtcatggagcagatgggcctggtcgttgaagcgcaccaccacgaagtagcgaccgcaggtcagaacgaagtggcgacccgctttaataccatgaccaaaaaagccgacgaaattcagatttacaaatatgtcgtgcataacgtggctcaccgcttcggtaagaccgcgacctttatgccaaaaccgatgttcggcgataacggttccggtatgcactgccacatgtcgctggcgaagaacggcaccaacctgttctctggcgacaaatatgccggtctgtctgagcaggcgctgtactacatcggcggcgtcatcaaacacgccaaagccatcaacgccctggcgaacccgaccaccaactcctacaagcgtctggtcccgggttacgaagcgccggtgatgctggcctactccgcccgtaaccgttccgcctccatccgtattccggtggtggcgtctccgaaagcgcgccgtatcgaagttcgcttcccggacccggcggctaacccgtatctgtgctttgccgccctgctgatggccggtctggacgggattaagaataagattcacccgggcgaagccatggacaaaaacctgtatgacctgccgccggaagaagcgaaagagatcccacaggtagcgggttctctggaagtnacgtgaacgcgctggacctggatcgcgagttcctgaaagcaggcggcgtgttcacggatgaagcgatcgatgcgtatattgcgctgcgtcgcgaagaagatgaccgcgtgcgtatgactccgcacccggtagagtttgagctgtactacagcgtttaa

SEQ ID NO: 37302 - DNA, 984 bp, Salmonella paratyphi A
atgaacgacaacgcttttactttccagacgctacacccggaaaccatcatggatgcgctgtttgaacaggggatcagggtggattccgggctgactccactaaacagttatgaaaaccgcgtctatcagtttcaggatgaagaccgtcgacgttttgtcgttaagttttatcgtcctgaacgctggtctgttgatcaaattcgggaagaacaccaattcgcgcttgaactggtgaaggatgaggttccggttgctgctccgctcgcgtttaatggccagacgctgttagcgcatcagggctatcattatgccattttccccagcgtaggcggtcgtcagtttgaagcagacaatatcgatcagatggaggcggtagggcgttatcttggccgattgcatcagacggggcgaaaacgtcctttcactttccggcctgacattgggcttgcagagtatctttttgaacctcgccaggtattcgaagatgccgcactgattccctccgggcaaaaagcggctttcctgaaagccactgatactctactgtctgcggttaccgaatgctggcgcaccgatttcgccacgctgcgattgcacggcgattgtcatgccggcaacattctatggcgtgatggaccgctgtttgtcgatttagatgatgcccgtaacggcccggcgatacaggatttatggatgctgctgaacggcaacaaagccgaacagcgaatgcagcttgaaaccattattgaagcttatgaagaagttagtgagttcgatacggctgaaattggtctcattgaacctttacgcgccatgcgtttagtttattatcttgcctggttgattcgtcgttggggcgatcctgcgtttccaaaaaattttccctggttaacaggggaagattactggcagcgacagacaacgacttttattgagcagactaaaattttgcacgaaccccctttacaattaacgccaatgtat

SEQ ID NO: 37303 - DNA, 2791 bp, Salmonella paratyphi A
atggttcagatcccagaaaacccacttattctcgtagatggctcatcctatctctatcgcgcctatcatgcgtttccgccgttaaccaacagcgcgggagaacctacgggcgcaatgtatggtgtcctcaacatgttgcgcacgctgatcatgcagtatcagccgacgcatgctgcggtggtgtttgacgccaaaggaaaaaccttccgtgacgagctctttgaacactacaaatcgcatcgtcctccgatgccggatgatctgcgtgcgcaaatagagccgttacatgccatggttaaagccatggggttacctctgctggcggtctctggcgtagaagcggatgacgttatcggtacactggcgcgagaagcggagaaggtggggcgtccggtattaatcagcaccggcgataaagatatggcacagttggtgacgccgaatattacgctgatcaacaccatgactaacaccatcctcggcccggatgaagtcgttaataagtacggcgtgccgcctgagctgattatcgactttctggcgctgatgggggactcctcggataatattccaggcgtaccaggcgtgggtgagaagacggcgcaagctttgcttcagggattgggcggcctggatacgctgtacgccgagccggaaaaaattgccggtctcactttccgcggcgccaaaacgatggccggtaaattagcgcagaataaagacgtagcgtacctgtcttataaactcgccaccattaaaacggatgttgaactggagctgacctgcgaacagcttgaagtgcagcagccgattgcggatgaactgctgggcctgtttaaaaaatatgagtttaagcgctggacggcggacgttgagtcaggcaagtggctacaggcaaagggcgcgaaaccggcggccaaaccgcaggaaacggtcgttattgatgaatcgcccagcgaaccggcagcggcgctctcttatgaaaattatgtcacgattctggacgacgttacgctggaaagctggattgaaaagctgaaaaaagcgccagtttttgctttcgacacggagaccgacagtctggataatatcgccgccaacctggtgggcctctcgtttgctatcgaacctggcgttgccgcgtatgtacctgtcgcgcatgattatctggacgctccggatcaaatctcccgccagcgtgctctggaactgctgaagccgctgctggaagatgaaaaagtgcgcaaagtggggcaaaacctcaagtacgatcgcggcgtcttgcaaaattacggtattgagctgcgcggtatcgccttcgataccatgcttgagtcttacattctgaacagcgtcgccggacgccatgatatggacagtttgtccgatcgttggctgaagcacaaaactatcacctttgaagacattgccggtaaaggtaaaaaccagctcacctttaaccagatcgcactggaggaagcggggcgctatgcggcagaagatgcggatgtcacattacagttgcatctcaaaatgtggccagagctccagcagcacaaaggcccgctgaatgttttcgaaaacatcgaaatgccgctggtgccggtactgtcacgcgttgagccaatggcgtaaaaatcgatcctgccgtcctgcacaaacattcggaagaaatcacactacgtctggcggaactggaaaagaaagcgcatgacattgcgggcgaggcgttcaacctgtcctcgacgaagcagttgcagaccatcctgtttgaaaagcagggtattaagccgctgaagaaaacgcctggggcgcgccgtcaacgtcggaagaggtgctggaagagctggcgctggactatccgctgccgaaagtgattctggagtatcgtggtctggcgaagctaaaatccacctataccgataagctgccgctgatgattaacccgaaaaccgggcgcgtccatacgtcctatcatcaggcggtaacggcgacgggacgtttatcgtcaccgatccgaacctgcaaaatattccggtgcgcaatgaagagggccgccgcattcgtcaggcatttattgcgcctgaggattatctcatcgtgtctgcggactattcacagattgagctgcgtattatggcgcatctttcccgtgataaagggctgctcacggcgttcgcagggaaagatattcaccgcgcaacggcggcggaagtctttggcttgcgctggatagcgtgaccggggaacagcgccgaagtgcgaaagccattaactttggcctgatttacgggatgagcgccttcggtctttctcgccagcttaatattccgcgtaaagaggcgcagaagtatatggatctctacttcgaacgctaccctggcgtgctggaatatatggagcgcacccgcgctcaggcaaaagaacaaggctatgtggaaactctggaggggcgccgcctttacctgccggatattaaatccagcaacgcgcgcggcgcgcgggggcggaacgcgcggcgatcaatgctcccatgcaaggaacggctgccgatatcatcaagcgcgccatgattgccgtcgatgcctggctacaggccgagcagccgcgcgtgcggatgattatgcaggtacacgatgaattagtgttcgaggtgcataaagacgacttagatgcggtagcaaaacgtatccatcagttgatggaaaactgcacgcgtattgatgtgccgttgctggtggaagtcggtagcggagaaaattgggatcaagcgcactaagcatttaaggaa

SEQ ID NO: 37304 - DNA, 1068 bp, Salmonella paratyphi A
atgtttagcgaaataatgcgttatatcctcgacttaggcccaacggtgatgttgcctctggtgatcatcgtgttctctaaactgctgggaatgaagcttggggattgttttaaatcgggtttgcatattggtatcggcttcgtgggtattggtctggtcatcggcctgatgctggattctatcggccccgcggcgaaagccatagcggaacatttccaaatcaatctccacgttattgacgtcggctggccaggttcatcgcccatgacctgggcgtcacaaatcgcgctggtcgcgatccctgtcgccatcggggttaacgtcctgatgctggtgacccgcatgacccgcgtggtgaatgtcgatatctggaatatctggcacatgaccttcacgggcgccatgctgcatctggcgaccggttcatactggctggggattctgggcgttgtggttcatgccgcctttgtctacaaactgggggactggtttgccaaagatacccgcgactattttggcctcgaggggattgcaatcccacacggctcatccgcgtacctgggccccgtggcggtgctcgttgataccattatcgaaaaaattccgggtctcaatcgtattcactttagcgcagacgatgtccagaaacgcttcggaccgtttggcgagccggtgactgtcggcttcgtgatggggctggtgattggtgtactggcaggctacgacgccaaagccgttctgcaactggcggtcaaaaccgcagcggtgatgctgcttatgccacgcgtcattaaacctattatggatggcctaacgcctatcgccaaacatgcgcgtaaacgtctacaggccaaatttggcgggcaggagttcctgataggccttgatccagcgctactgctcggtcatacctctgttgtctccgcgagcctgatattcattccgctgaccatcctgattgccgtcttagtaccggggaaccaggtgctgccgttcggcgacctcgcaccatcggtttctttattgcgatggcggttgcggtacaccagggcaacctgttccgcacgc

SEQ ID NO: 37305 - DNA, 1031 bp, Salmonella paratyphi A
atgaaatcagtggttattcacgctgagggagacgtgcgcgttgaagaacgtcccttaccacaactgcaagccgaggacgatgtgttggtcaaggtcgttagctcagggctttgcgggtcagatatcccgcgtattttcgcgcagggcgccattattatcctattacgttaggccatgaattcagcggctacgttgaatcctacggcacaggcgtaacggatatgcagcccggcgatgcgtcgcttgtgtcccgcttcttccctgctttcactgtccgcaatgcgaacgcggttacttttctttatgcaaacagtatcagtttgtaggatcgcgcagcgaaggtggtaatgcggaatatgtggtggtcaaacgggccaatcttttccgcttgccgtctgatatgccgattgaagatggcgcgtttatcgaaccgattaccgtgggcttgcacgcctttcatctggcgcagggctgcgaggggaaaaacgtaattatcgtcggggccgggacaattggcctgctggccttacagtgcgcgcgggaactgggcgccgaagcgtaacggcgattgatatcaatccgcagaaactggaactggcgaaacgctcggcgcaacgcatacctgtaatagccgggaaatgaccgccgacgacatccagacagcgttgtccgacattcagtttgatcaactggttctcgaaacggcaggaactccccagaccgtctcgctggctatcgatatcgccgggccgcgcgcgcaactggcgctggtggggacgttacatcacgatctcaccctgacaacgcgcacattcgggttaattttgcgtaaagagctcacgctcctcggcagttggatgaactactccgcgccatggccaggagaagaatgggaaaccgcagcggccctgttggctgaaaaacgtcttcaactgacccctctcattgcccatcgcggcgatgcggaaagctttgcagaagcagtcaaagcgcttaatgcagcgcccatgcagggcaaagaatcttacttc

SEQ ID NO: 37306 - DNA, 854 bp, Salmonella paratyphi A
atgttcattatttccagtaaaaatatgctccagaaggcccagcatgcaggctatgccgtgccagcctttaacatccataacctggaaaccttgcaggtggtggtagaaaccgccgcagaaatgcgctcaccgctgatcgttgccggaacaccaggcacgtttagctatgccggaatgggtaacattgtggcgatcgcgggcgatctggctcgtgaatacaatctgccactggccattcatctggatcatcatgaatcgttagccgatattgaaagcaaagttatggcagggatccgttcagtcatgatcgatggttcccactttccctttgaagagaatgtggcgctggtgaaaagcgtggtcgatttttgccatcgctacgacaccagcgtggaggcagaactgggccgccttggtgggatcgaagatgatttagtggtagacagcaaagatgccctttacaccaatccacagcaagcacgtgagtttgtggcgcgcaccggcattgattcgctggcggttgctatcggcacggcacactgcatgtatgctgctgaacctaaactcgattctgagcgactggcagaaatacgcgctctggtggatatccctctggtattgcatggggcatctggtttgccggaaagcgatattcgccagccatcagccttggggtatgcaaagtcaatgtcgccaccgaactgaaaatcgccttctccgacgccttaaaagagtatttcctacaaaacccgaaagccaatgatccccgccactatatgcaaccagcaaaacaggcgatgaaagaggtggtacgcaaagtaatccatgtttgcggctgtgaagggcaactgtga

SEQ ID NO: 37307 - DNA, 861 bp, Salmonella paratyphi A
atgaaacaaaacgaatcggcggataattctcagggccaactctttattgtacctactcctatcggtaatctggcggatatcacccagcgtgcgttggaggtgttacaggctgtagatctgattgccgccgaggatactcgtcacaccggtttattgctgcaacattttgggattaatgcccgattgttcgcgctgcacgaccataacgaacaacaaaaagcggaaacgctggtcgcgaagctaaaagaagggcagaacattgcgctggtttccgacgccggtacgccactaattaatgaccccggctatcacctggtgcgtacctgccgtgaagcggggattcgcgtggtgccgctaccagggccatgtgcggcgattgccgccctgagcgccgctggcctgccatctgaccgtttctgctatgaaggctttttaccggcgaaatccaaaggccgccgtgatgcgctaaaagccattgaaacggaaccgcgaacgctgattttttatgagtcaacccaccgcctgttcgatagcctggaagatatcgtcgcggtattgggagaatcccgttatgtggtgctggcgcgtgagctgaccaaaacctgggaaaccattcacggcgcgcccgttggcgagctgctggcgtgggtcaaagaagatgaaaaccgtcgcaaaggcgaaatggtgctgattgtcgaaggccataaagcgcaagaagacgacctgcccgccgacgcgctgcgcacgctggcgctgctacaggcagaactgccgctgaaaaaagcggcggcgctggcagcagaaattcacggcgtgaagaaaaatgcgctgtataagtatgcgctggagcagcaggaagaa

SEQ ID NO: 37308 - DNA, 912 bp, Salmonella paratyphi A
gtgatctacacgctaacacttaatagcgcgattgatatgaatatatttagcgatcctttacagccaaatattgtcaatcgcactcaccacaccgagttttgcccaaatggtaaaggagtaaatgttgcgctggttctggatcactttcaaatacctgcgcatatattaggcatttttggtggtttcaccgggcattatattgtagaaagcctgcgtaccaaaaaaatgccagtcacaccagcatgggtagaagaacccacgcggattaatattttcattcatgacgggcagcaggaatataaactggtcaaccctggctcatatattccagatgaatgtaaacaacaaatcatcacgattatatcgcaactgcccgatgcagaatatctggtgataagcggcagcctgccacaaggtattgaaagccgcttttacgcagaaattatgcatatttgtcagcaaaaaaatatcggcgtaattttagatattagtcatccgtcattacgtcagttactggagttcaaaccgttattaattaaaccaaatgatgaagaggttaaagcaatattcggtttaactgtctctgacgacaatgatgcgaaaaatgctctaaccactttacatgcacttggtgcacaaaatgttctgctaacccttggcgctaaaggaatgtatttctccaatgggattgattactggttttgtagcgcgccaacggttgatttggtgagctccgcctgtgcaggcgatgctgcactggccgcctttctcagccagtggttatctacaggagaagtggaatatgccttatctcttgccagtgcaacaggagctgatgtcgcaagttctgccggactaggccaacttgcggcaatagaaaccttactttcgcaaatccacgtcagaaagctg

SEQ ID NO: 37309 - DNA, 1350 bp, Salmonella paratyphi A
aagatcattgcagtgaccggctgccctaccggtattgcgcatacatttatggctgaagaagccttaaaaaatgccgcgaaaaaattatctgttgaaataaaagttgaaaccaatggtgccagtggcgttgaaaatgctattcaacctgctgatctggtagatattgccggagtcattattgcggcggataaagatgtcttacctgatcgctttaatggtttaccggttgttgaagtaccggtaaaagaagcaatccatcatcctgcggacgtgattaacaaagttattaatggtgaagccccaatacgtaaaggcgaatcaaccaccagcacggaaattatcgaaaaagaatcactggggcgacaaatttataagcacctgatgagtggtgtttcaaatatgctaccttttgtagttgccggagattttaattgcggtgtcgtttttatgggggatttattccgctgatcctaattcagctgaatacaatgcaaccgccgctatgctaatgaaaatcggtcagcaagccttttcgattatggttccggtctttaccgcttatattgcattctctatttctggcagaccagggatggtggctgggtttgtcggcggcttactggcaaatgctaccggagcaggatttctcggtgggataattgccggattcgccgccggttacctgatgttatgggtaaagatcgactcgaaggcttaccgcgtcagtatgaaggccttaaatcgatttttattatgccgctcattggcgtactggttattggcgtgttgatgtcgctgcttgggcaacctgtcgcagctatcaataatagcatgatgaactggctggcatcgctacaggaagcgaatccaatattgctgggtattgtggtgggtgcaatgtgctcctttgactttggcggcccggtaaacaaagccgcttatgtcaccggcacgcttttactgggccagggcaacttctactttatggctggtgtgtctgccgcatgtattactccaccactggtaattgctctggcgaccaccttctttccaaaaggttttagcgaggaagaacgtgccgcaggcatggttaactatatcctcggttgtacccacatcactgaaggcgcgattcctttcgcagcgaaagatcctttgcgtgtcatcccgatgatgatgattgcttccagcatttccgcagtacttagctacagcttgcgtattcaggttccggctcctcacggcggcttcttaattttacctttggtgagtcagccgctggcctgggtgttatatatccttgcaggctctgcatgtggtgcggtgatgcttggcctatggagattgtgg

SEQ ID NO: 37310 - DNA, 876 bp, Salmonella paratyphi A
atgaacaactacaccatcaaagacattacgcgagcgtccggcgggttctccatgctggctgtcgatcaggccgaggcgatgcgtttaatgtttgctgctgctggtgcgaaaacacccgttgccgatagcgtgctgacggatttcaaagtgaatgcggcgaaaattctttccccgtatgcctctgccgttctgctggatcagcagttctgttatcgccaggccgtagaacaaaacgcggtcgctaaaagctgcgccatgatcgtcgcggcggatgatttcatcccgggcaacggtattcccgttgataacgtggtcattgataaaaaaattaatgcgcaggcggtaaaacgggatggcgcgaaagccttaaaactgttggtgctgtggcgcagcgatgaagacgcgcagcagcgtctggatatggtcaaagaattcaatgaattatgccactccaatggtttgctgagcattatcgaaccggttgtacgtacgccgcgctgcggcgacaagttcgatcgcgagcaggcgattatcgatgcggccaaagagctgggcgacagcggcgccgatctttacaaagttgaaatgccgctctacggcaaaggcgcgcgttccgatcttcttaccgcctcacaacgcctgaatgggcatatcaatatgccgtgggtcatcctctcttccggtgtggacgaaaaactgttccctcgcgcggtcagggtcgccatggaagctggcgcatccgggttcctggcgggacgcgcggtctggtcatcagtgattggtctaccggataccgagctgatgctacgtgatgtttccgcgcctaaattgcaacgtctgggcgagatcgtcgatgaaatgatggtgaaacgtcgt

SEQ ID NO: 37311 - DNA, 840 bp, Salmonella paratyphi A
atgcacagcggtggaaaaactattcagcttaatgcgggccattaccaggcgaaaatcgtcacggttggcgcaggtctggcggaactgatccatcatggacgccatgtggtcatcccgcataaaccggaagaaatacccatggcgcatctggggaaagtattgattccctggcccaatcgcgtgacaaatggctgctactcctataacggcaaggttttccagcttgccgttaacgacccggtttcgcagaccgccattcacggtctgttagcctggcgagactggcagattaattatcagtcggcggcggaagcgtcgctaacgatttttctgccgccctcttacggctatccctttgcgttgatatcggaagtgatttatcggttagatgccgccaatgggctgcacgtatcaattcgtacgcaaaacattggcgatgaatcagccccttatggcgcgggcgcacatccttatttgacttgtaatctgcaaagcatcgatagctgtgtattaacactgcctgcaagcgaagagttgcccgcagacagagatttttccgcatcatgcctgctcggcgaaacgcgccttgatcatgcggttaagaccgcgactaccccggctgagtgggaggtcagacttaccagcccaacgcagaacatgtctacatttttacgcagcaaccaaccctggctacagatctataccggcgaaaaactcagccgaaaaggtctcgcggtagagcctatgagctgcccgcccgatgcatttaattccgggatcgcgctgattcatcttgccccaaaagcgatccatcaactgcatttttccatcggctgtgac

SEQ ID NO: 37312 - DNA, 633 bp, Salmonella paratyphi A
atgaaacgacgtgacaccatcgtgcgctatacggcgccggaacgcatcaaccactggatcgtcgccttctgcttcgtgctggcggcggtgagtgggctgggctttttattcccatccttcaactggttgatgcatattctgggcaccccacaactggcgcgaattctgcacccgtttgtgggcgtggttatgtttgcctcgttcatcatcatgtttttccgttattggcaccacaatctaatcaatcgggatgatatcttttgggcgaagaatattcgtaagatcgtcgtcaacgaggaagtgggtgacaccgggcgttataacttcggtcagaaatgcgtattctgggcggcgattatcttcctggtgctgctgctggtgagcggggtaattatctggcgtccgtactttgcgcctgctttctcaatcccggtgatccgattcgcgttaatgttgcattcttttgccgcagtagcgttaattgtggttatcatggtgcatatctacgccgccctttgggtgaaaggcaccattaccgcgatggtggaaggctgggtaacccggtcgtgggcgaagaaacatcacccacgctggtaccgagaagtccgcaagacaacggaaaaagaaactgaa

SEQ ID NO: 37313 - DNA, 924 bp, Salmonella paratyphi A
agtattcgcataatcccgcaagatgagctggggtcgagcgagaaacgtacggcggatatgattccgccgttattgttcccccgactcaaaaacgtctacaaccgccgcgccgaacgtctgcgcgagctggctgaaaataacccgctgggcgattacctgcgctttgccgcgcttatcgccacgcgcaggaagtagtgctgtacgaccatccgctggagatggatctgaccgcacgcattaaagaagcgaacgaccagggcaagccgccgctggatatccacgtgctgccgcgtgataagcactggcaaaaactgctgcattcgttaattgccgagctaaaacccgagatgaacggccccgcgctggcgtgattgagaacctggagaaagcctcagagcaggagctagagcagatggccagcgcgctgtttgcctcggattttgcctccgtcagcagcgataaagccccgtttatctgggccgcgctctccctttactgggcgcaaatggccagcttgattccaggcaaagcacgcgcggaatacggtgaagcgcgccagtattgcccggtgtgcggttcgatgccggtctccagcatggtgcaaatcgacaccacgcaggggctgcgttatctgcactgtaacctgtgcgaaaccgagtagcacgtcgtgcgcgtaaaatgcagtaactgcgaacagagccgcgacttacactactggtcgctggaaaatgagcaggctgcggtgaaagccgaaagctgcggcgattgcgggacttacctgaagattctctatcaggaaaaagacccgaaagtggaagcagtggccgacgacctcgcctcgctggtgctggacgcgcgcatggaactaggacgttcgcccgaagctctatcaacccgttcctgttcccgggggaaggggaataa

SEQ ID NO: 37314 - DNA, 445 bp, Salmonella paratyphi A
aaagaagccattttatatgacgcgctacgttatctgagtcagcaggtagatatctggcgacgcgccttcttcttgatgagtcgctttctgctgaacaaaagctactggcacgctacagccgctttcggaatgtgtcagtaataaccgttatcctggttgcttgttcattgccgcctgtacgttttatcccgacccaacccatcctattcaccaactggctaatcaacaaaaacgcgcggcacatgattttacccatgaactactgaccacgctggaaattgacgatccggcgatggttgcaaggcagatggagctggtgctggaaggttgtctcagccgaatgctggtcaaccgcagtcaggctgatgtagataccgctcaacggttggcggaagatattctgcgttttgcacagtgccgtcagggtggcgcgctcacctgacgg

SEQ ID NO: 37315 - DNA, 1620 bp, Salmonella paratyphi A
atgaaacactccctgccatgccgggcgttacgcaaacgccccatgaaactcggcactaccgtcattctgatggtcagcgccgttttgttttcggtgctcgttgtggtccatctgatctatttttcgcaaatcagcagcatgacgcgcgacgctggcagataaagcgctggcggtggctcgctcgctggcggactctccggcaattcgcgaggggctgaaaaaaccgcctgcggaaagcggcattcagccgctcgccgaagcggtgagccagcataatggctttttgtttattgtggtgaccaatatgcagggcatccgttattcgcacccagaaacgcagcgaatcggtcaaccattcaaaggcgatgacattctgctcgcactgcagggaaaggaaaacgttgccattaatcgcggctttcttgccaaagcgctacgcgttttcacaccggtttatgatgaacaccaccgacagatcggcgtggtagcgattggcctggaactcagtcacgttacgcagcagatcaacaatagccgcggcagtattatctggtccattctgttcggcgctctggtgggattattaggcacctatgcgctggtcaaggtgctaaaacgtatcctgtttggcctcgaaccctatgagatctcaaccctgtttgaacaacgccaggcaatgctgcagtcaatcaaagagggcgttatcgccgtagatggtagcggcgaagtcacgttgattaaccacgcgcgcaggcgctgctcgattatcgaaaaacgcaggatgacgccagattactccaccccaggtggtggacattagcgaagtgttgcgtgacggtacgcgcgccgcgatgaagagatcatcgtcaaaggccgcctgctgctggtgaatacgttccggtgcgcagcaacggcgaaattatcggcgcgatatccaccttcagggataaaacagaagttcgccaactgatgcagcggttagacgggatggtgaactacgcggatgcgctccgtgaacgatcccacgaattcatgaacaaattacatgtgattctgggattattgcacctgaagagttataagcagcttgaagcgtatattatcaagacggccaataactatcaggaagagatcggtttgctgctgggtaaaataaagtcgccgattatcgctggttttttgctcagtaaaattactcgcgcctcagatttcgggcacagcctggtgataagcagcgacagccagttactggataataacaatgaagatcaggttacggtgctgattacggcgctgggcaatttgattgaaaacgcgctggaagcgttgagccaggaatccggcggcgaaatcagcgtctcgttacactaccgtcatggctggctgcattgcgaagtgagcgatgacggtccgggtatcgaacctgagcgcatcgaggcgatttttgaaaaaggcgtctcgtcgaaaggcgccgaacgcggcgtcggtttagcgctggttaaacagcaggttgaagcgcttggcggcgtaatttccgtggagtccgagcctgggatcttcacacaattttttgtacagttaccctgggatggaaaaaggaccagcctatgatcaatgtat

SEQ ID NO: 37316 - DNA, 1605 bp, Salmonella paratyphi A
gagtttatctatcaggcgcctttcccgatgggagaggacaaaacagagtattatctgctcacctccgattatgtcagcgtcagtgaattcaacggagaatctatcctcaacgttgagcccaggcgttaacgttgctggctcagcaggccttccatgatgcgtcttttatgctccgtcctgaacaccagcagcaagtcgccgccattctcaatgaccccgaagccagcgaaaacgacaaatatgtggcgttgcaattcctgagaaactccgagatcgccgccaagagcgattctgccgacctgccaggataccggcacggcgattatcatgggtaaaaaaggccaacgcgtctggacgggaggcggcgatgaacgcgctctccaaaggcgtgtttaatacctatatagaagataacctgcgctactcgcagaacgccccgctggatatgtacaaagaggtcaataccggcagcaacctgccagcgcaaatcgatctctatgccgtcgatggcgacgagtacaagttcctttgcgtggcgaaaggcggcggttcagcaaacaaaacgtatctctatcaggagaccaaagcgctgctcaccccaggcaagctgaaaaacttcctcgttgagaaaatgcgcacgctgggcaccgcggcctgtccgccataccatatcgcctttgtcattggcggcacctcggcggaaagcacgctgaaaaccgttaaactcgccagcacccactattacgacgcgctgccgacggaaggtaacgagcacggccaggcattccgcgatctccacctggaacaggaactgctggaagaagcgcaaaaacttggcctcggcgcccagttcggcgggaaatatttcgcccacgatattcgcgtaattcgcctgcgcgtcacggcgcttcctgtccggtggggatgggcgtctcctgctcggcagaccgtaacatcaaagcgaaaatcaaccgcgaaggcatctggatcgaaaaactggaacacaatccgggccagtatattccgccagcgctgcgtcaggcgggcgaaggcgacgcggtgaaagtcgatctcaaccgtccgatgaaagagatcctcgcccagctatcgcagtacccggtctcgactcgcctgtcgctgacgggcaccattatcgtaggtcgcgatatcgcccacgcgaagctaaaagagcgtattgaatccggcgaagacctgccgcagtatattaaagatcaccccatctattacgcaggtccggccaaaaccccggcaggttatccatctggctcattaggccccaccaccgcaggccgaatggactcttatgtcgatctgctgcaatcccacggcggcagtatgatcatgctggcgaaaggcaaccgtagtcagcaggtcacggatgcctgtaaaaaacatggcggcttttatttgggcagtatcggcggcccggcggcggtactggcacagcagagcattaagcatctggagtgcgtcgagtatccggaactcggcatggaagctatctggaaaattgaagtagaagatttcccggcctttatcctggtggatgacaaaggcaacgatttcttccagcagattgtcagc

SEQ ID NO: 37317 - DNA, 858 bp, Salmonella paratyphi A
atgagattactaaaacgcgttattgtggttgtactcttgggcgtgattttatttatggtcagggacgatatacgctatgtttatcaactgatcctcaaatatggtgataaaccctcggcgctacgactgagtagctataaagcggttattcagcaaaaaccagtcgcaggagttaagagtaacctttcaggtttgacctactccgccgaagacaggatgcttttcgccgttattaataatccccctgaactggtctggttaacgacagaagggcagctggtagggcggatgccgctgcagggcatccacgacccggagtctattgcatggagtgggggcaaccagttccagataggcagtgagaaagatggcgcggtctataaaacacaggtggatattcagcgcggcgccatgcagataatctccatggtgaagcttgagggctatgacaaagcaaaaaataaagggctggaaggtacggcatgggatgcgaaaaatgagagattatatgccgcaaaagaaagaaaacccattattatcaaagaagtagagatgagcaaaaatggtatcaccagagcgttgccttctgccatcactgcgagtgtgagcgatgtctccggacttgaataccatgccccaacggattcgctgctggtgttgtcggacgagtcaaaaatgattctggaggtcagttccgagtggcgggtgcgcgatcgattgttcctgacggcggagtggtcagggctcagagacgatataccccaaccagaagggattgccatggataatgaaaataatttgtatattgtgagtgaaccaaatctgttttataaattttcgtgtgatatacagaatgac

SEQ ID NO: 37318 - DNA, 300 bp, Salmonella paratyphi A
tggcgaaaatccgcagccatgaatactgccggtcaatggacgtaaccagttaagggaaatctgtatgcgcattgaaataatgatcgataaagagcagaagattagccaggctacactggacgcccttgaatccgagctttaccgtaatttgcgccctctgtatcccaaaacagcaattcgtatccgcaaggcagcgccaatggtgttgaactgagcgggttaaaactggatgaagacaaaaagcgagtgatggaaataatgcagcaggtctgggaggacgacagctggttacattagcga

SEQ ID NO: 37319 - DNA, 578 bp, Salmonella paratyphi A
  misc_feature (429)..(429): n=g, a, t or c
ctggcgacggagatgatgggcgaggaggacggttatctcgcggagtcgatcaataaagacatcgaagagtgtaacgccattatcgaacagtttattgactatctgcgtaccggtcaggaaatgccaatggagatggcggatctcaattccgtactgggcgaggtgattgcggcggaaagcggctatgagcgtgagattaacactgcgcttcaggcagggagcatccaggtgaaaatgcacccgctctcgattaagcgcgcggtggcgaatatggtggtcaatgctgcccgctatggcaacggctggattaaggtcagcagcggcaccgagtcgcatcggcctggttccaggtagaagatgacgggccgggcattaagccggagcagcgtaaacatctgttccagcctttcgtgcgtggcgacacgcccngtagcaccagcggtacagggctggggctggcgattgtgcagcgcattatcgataaccataacgggatgctggagattggcaccagcgagcgtggcggcttgtcaattcgcgcctggctgccggttcctgtggctcgcgtccaggggacg

SEQ ID NO: 37320 - DNA, 1675 bp, Salmonella paratyphi A
atgcatcacgctaccccgcttatcaccaccattgtcggcggccttgtgctcgcttttattctcggcatgattgccaacaaattgcgtatttctccactggtgggatatctgttagcgggcgttctggcgggaccttttaccccgggttttgttgcggataccaaactggcgccggagctggcggagctcggcgtgattctattgatgttcggcgtcgggctgcatttttcgctgaaggatttgatggcggtaaagtctatcgccattccgggcgtgtcgctaagatagcggtggcgacgctgctgggtatggcgctttccccgtgctgggatggtcattaatgaccggcatcgtttttgggctctgtctgtctaccgccagtaccgtcgtcctgctgcgcgcgcttgaggagcgacaactccttgatagccagcgcgggcaaatcgccatcggctggctgattgtcgaagatctggtgatggtgctgacgctggtcttgctgcccgccgttgccgcatgtgtggaaaaaggcgatgtcggcatagctcgctggcagtcgatatggggataatcattggtaaagtggtggcgtttatgcagtcatgatgctgggtcggacgccgcctggtgccgttggatttatggcccgcagcgccgctcaccgctcacgcgagttatttaccctttccgtactggcgctggcgttagcattgcgtttggcgcggtagaactgtttgacgtctcttttgcgctggccgttcttcgctggaatggtgcttaatgagtcggaactgagtcaccgggcggcgcacgatacgttgccactgcgcgacgcctttgccgtcctgttttttgtttccgtcggcatgttgttcgatccgctagtcttgattcaacagccgctggcggtgttggcgacgcttgccattatcgtctttggtaaatcgatcgctgcgtttttcctggtgcgtatgttcggccactcgccgcgaaccgcgctgaccattgccgccagcctggcgcaaatcggtgagttcgcctttattctcgccggactcggtatggcgctcaacctgctgccgaggcgggacagaacctggtgctggcaagcgctattttgtcgattatgcttaatcccgtactgtttaccctgctggagaagtatctggcgaaaaccgaaacgctggaagagcaaactctggaagaggctatcgaagaagagaagcaaattccggtggatatctgtaatcatgccctgctggtgggttttggccgcgtaggcagtctgctgggagaaaaattactggcggcggggattccgctggtggttatcgaaacgtcccgtacccgcgtggatgaactgcgcgaacgcgggattcgcgccgtactgggcaacgccgctaacgaagaaatcatgaatctggcgcatctggactgcgcccgctggctgttattgaccatccccaacggttacgaagccggtgagattgtcgcctcagcgcgggaaaaaagtcctgatatcgagataatcgcccgcgcgcactatgatgatgaagtgaaatatattaccgagcggggagccaatcaggtagtgatgggcgagcgagaaattgcccgggcgatgctggaactgcttgaaacgccgcccgcgggtgaagtcgtcgccagttaaggg

SEQ ID NO: 37321 - DNA, 1187 bp, Salmonella paratyphi A
cgtttagtcctcagcaaagggcgagaaaaatctttactccgccgccacccatgggtcttttccggcgccgtatcccgtctggaaggcaaagccaacctcggtgaaactatcgatatcgtcgaccatcagggaaagtggttagcacgcggcgcctggtcgccagcctcccagatccgcgcgcgcgtctggacatttgataaagcagaatccattgatattgcgtttttcacccgccgcctgcgtcaggcgcagcagtggcgcgactggctggcgaaaaaagacggtctggatagctatcgtctgatcgccggtgaatccgatggcctgcctggcgtcactatcgatcgttttggttattttttggtgctgcaactgctcagcgccggggccgaatatcaacgcgccgcattaattagcgctctgcaaacatgctatccggattgcgctatttacgatcgcagcgacgtcgccgtgcggaaaaaagaagggatggcgctgacgcaaggcccggtcactggcgaactgcgcctgcgcttttgccaattgaagaacacggtatgaaattgctggtcgatatccagggcggccacaaaaccggttattatcttgatcagcgcgacagtcgtctgcgacgcgccgctacgtggaaaatcagcgggtactgaactgcttctcttataccggcggttttgccgtgtcggcgttaatgggcggttgtcgccaggttgtcagcgtggatacctcacaggatgcgctggatatcgccaggcaaaacgttgaactgaaccaactggacttgagcaaagccgaattcgtgcgcgacgacgtgtttaagttgtgcgcgcttaccgtgaacacggcgaaaaattcgacgtcatcatcatggacccgcccaaattcgtcgaaaataaaagccagttaatgggcgcctgccggggctataaagacattaacatgttagcgattcaactgctcaatccgggcggcatactgctgacattctcttgctccggactgatgaccagcgatttatttcagaaaatcattgccgatgccgcaatagatgccggtcgtgatgtacaatttatagagcagttccgtcagccgccgatcacccggtgatcgccacctacccggaagggctgtatctgaaagggtttgcctgtcgcgtcatgtaacttgaaaag

SEQ ID NO: 37322 - DNA, 1362 bp, Salmonella paratyphi A
atggttaagttatcaatgacgctgcgcctgacaatttcttttatcgccatccttatcctcgcctgtaccggcattagctggacgctctataacgcgctgagcaaagaattaacgtatcgggatgatatgacgctaataaatcgggcggcgcaaatgcagcaactgttactggatggcgccaggccggaaaatctgccgctctatttcaatcggatggtggatacgaagcaggacatcttattgatccattcagcaacaggccacaatgttgcgattaatcatagcggcatccccgaccaacgctttaacgagattccgctggctaaaaacatcacccgcgaaaccttatttcgccaggcggtacaaggcacagaacttaccgcggtacgagtaaacgccagaagcggcgatgacccgctgacccttactattgccaggctggcgacggaaaggcggcaaatgctggcgcaatatcgccgtaacagtttgctgattagccttatcgcgatcctcgtctgttcggcactcagtccattagtcatcagaaacgggctgcgggccattacgtcgctcagccgactcaccgcggcgacagatagcggcacacttcgccagccgttggggacacaggcgttacccgttgagctcaggccgcttggacaagcgctaaataccatgcgccagaagctttccgacgattttgaacgcctgaaccaatttgccgacgatctggcgcatgagctgcgcacgccggttaatattttactggggaaaaaccaggtgatgctgagtcaggaacgcagcgccgaagagtatcaacaagcccttgtcgataatattgaagagctggagggactgtcgcgactgacagaaaatattctctttctggcacgcgcggaacaccagaatatagcggtaaaaaaacagcctgtttcgctcaatgcgctggtcgaaaatatgctggattatcttagcctccttgccgaggagaagcgcatctgttttataaatcaatgtcagggaacggtatgggctgacgaaatattattacaaagagtgctctcaaacctgctgacgaatgccatccgttattctgatgaaaacgccgtgatacgtattgaaagcgcttatgatgataacgttgcagaaattcgggtcgctaatccgggcagccaccccgctgatgcggataagcttttccggcgtttttggcgaggagataatgcccgccacactgccggtttcggcctggggctatcgttggttaacgcgattgctctattacacggtggctcggcatcttaccgctatgccgatgaacataatatcttttcggttcgtctgcccgatagcggtgatagc

SEQ ID NO: 37323 - DNA, 495 bp, Salmonella paratyphi A
atggattatcaaaataatgtcagcgaagaacgtgttgcggaaatgatttgggatgccgttagtgaaggcgccacgctaaaagacgttcacgggatccctcaagatatgatggacggtttatatgctcatgcttatgagttttataaccagggacgactggatgaagctgagacattctttcgtttcttatgcatttatgatttttacaatcccgattacaccatgggactggcggcggtatgccaactgaaaaaacaatttcagaaagcatgtgacctttatgcagtagcgtttacgttacttaaaaatgattatcgccccgttttttttaccgggcagtgtcaattattaatgcgtaaggcggcaaaagccagacagtgttttgaacttgtcaatgaacgtactgaagatgagtctctgcgggcaaaagcgttggtctatctggaggcgctaaaaacggcggagacagagcagcacagtgaacaagaaaaggaa

SEQ ID NO: 37324 - DNA, 805 bp, Salmonella paratyphi A
  misc_feature (215)..(215): n=g, a, t or c
gttatgaaacccaccaccatttcactgctgcagaaatgcaagcaagagaaaaaagctcgcgacaattaccgcctacgactacacgtcgctaagttatttgccgacgaaggtatcaatgtgatgctggttggcgactcactgggcatgacaattcaggggcacgactccaccctgcctgtcaccgtggaagatatcgcctaccacacccggctggntacgcgcggcgcgccgaactgcctgctgctctccgacctgccgtttatatgtacgccaccccggaacaggcatgtgaaaatgcggctatcgtgatgcgtgcgggggccaatatggtcaaaattgaacgcggcgcctggctggttgatacggtgaaaatgctcaccgaacgcgcgtgccggtttgtggtcatctggcgtaacgccacagtcggtgaatatcttcggcggctataaaattcagggccgcgcgacgccgggcaggtactgctggatgatgcgctggctttagaagccccggcgctcaactgctggtgctggaatgcgtgccggttgagctggcgaagcgcgtcacggaagcgctgtcgattccggtgatcggcatcggcgcgggcaacgtcaccgacggtcagatcctggtgatgcacgatgcgtttggcatcaccggcggtcatattccaaaattcgcgaaaaatttccttgccgaagcgggcgacatgcgcgccgccgtacagcagtatatggctgaagtggagtccggcgtttatccgggcgaagaacacagctttcactaatttttctgaccgtgccgg

SEQ ID NO: 37325 - DNA, 478 bp, Salmonella paratyphi A
  misc_feature (174)..(174): n=g, a, t or c
  misc_feature (275)..(275): n=g, a, t or c
gcgtatatcgcgcttggcagtaatctggcctctccgctggagcaggtcaatgccgccctgaagctatcgccgacattcccgatagccgtatcgtcgcggtttcttcgttttaccgcacgccgccgcttggcccacaggatcagcccgattacctgaacgctgcggtggcgctgngataccgctctcgcccccgaagaattgcttaaccatacccagcgcattgagctgcaacagggccgggtgcgcaaggccgaacgctgggggccgcgacgctnggatctcgacattatgctgtttggcgatgaagtcattaacaccgaccgtctgaccgtgccgcactacgacatgaaaaaccgccgttttatgctgtggccgttattcgaaatcgctcccggaggtgatctttccggatggtaccagcctgcatcagcatctcacccatcttggtggtgcaaaacccggccactggtaaaacatc

SEQ ID NO: 37326 - DNA, 1362 bp, Salmonella paratyphi A
gtgttaagccgcgaggagagcgaggcagaacaagccatcgcccgtccacatatgacgattatcccgcgtgaacagcacgctatctcccgcaaagatatcagtgaaaatgccctcaaggtactgtacaggctgaacaaagcgggctatgaagcctacctggtcggcggcggcgtccgcgatctcctgctcggtaaaaagccgaaggatttcgacgtgaccaccaacgcaacaccggatcaggtacggaaattattccgcaattgccgtctggtggggcgtcgtttccgcctggctcacgtgatgtttggcccggaaattatcgaagtggcaacgtttcgtggtcatcatgaaggcagtgaaagcgaccgtacgacctcccagcgtgggcaaaacggtatgctgctgcgcgacaacatcttcggctctatcgaagaagatgcccagcgccgcgatttcaccatcaacagcctttactacagcgtggcggattttaccgtgcgcgattacgtcggcgggatgcaggatctgaaagaaggcgtgattcgctgatcggcaatccggaaacgcgctaccgcgaagatccggttcgaatgctgcgcgccgtgcgtttcgctgcgaagctcaatatgcgtatcagccctgaaacggctgagccaatcccgcgtctggcaaccttgctaaacgacattcctcccgcgcgcctgttcgaagagtcgctgaagctgttgcaggcggggaacggttacgaaacctatcaacaactgcgggaataccacctcttccagccgttgtttcctaccattacgcgttatttcaccgaaaacggcgacagcgcaatggaacgcatcattgcgcaggtgttgaagaatacggataaccgcatccgtaacgagatgcgcgttaacccggcatttttgtttgccgccatgttctggtatccgctgctggagatggcgcaaaaaatcgctcaggagagcgccttgcctattacgatgtttcgcgctggccatgaatgacgtgctggatgaagcctgccgttcactggcgatcccgaaacgccttaccacgcttacccgtgatatttggcagcttcagttacgcatgtcgcgacgtcagggcaaacgcgcctggaaactgatggaacatcccaaattccgcgccgcgtttgatttactggagctgcgcgctcaggtggaaaataatactgaactgcaacgtctggcgcagtggtgggccgagtttcaggcttccgcgccgccggaacaaaaagggatgctcaacgagctggacgacgatcctgctccacgccgccgtcgttcacgtccgcgcaaacgcgcgcgccgcgagggcaccgtatgacga

SEQ ID NO: 37327 - DNA, 766 bp, Salmonella paratyphi A
  misc_feature (670)..(670): n=g, a, t or c
ttctttattgcccgcagcatgactgactcacactatattggccgtttcgcgccatcgccatccgggaatctgcatttcggctcgttaatcgccgccctcgcagctatctacaagcccgtgcgcaacgcgaatttggcgcgttcgcatagaggatatcgaccccccacgtgaagttcccggtgccgcagcgaccattctgcgccacgtggaacattacggcctgcactgggatggcgaggtcttatggcaatcacagcgtcatgaggcttatcgcgaggcgctggcctggcttcacgagcagggactgagctactactgcacttgcccccgctcgcgcattcaacgtctgggcggtatttacgacggccattgccggacgttatgccacgggccggagaatgccgccgtcagaattaaacagcagcatccggtgatgcatttccatgatgccttgcgcggcgacatccaggctgacccgcagctggctagcgaagattttattatccaccgccgcgacggactgtttgcttataatctggccgtggtggtcgacgatcattttcagggggtgacggagatcgtccgcggcgcagatttaatcgaacccactgtccgacaactttctctgtataaacagtttggctggcgtgcgcctggttacgtgcacctntcctggcgctcaacgaacaaggcgctaaactttccaagcaaaatcatgcccctgcgcttgcgacaggcgatccgcgcccggtactggtccaggcat

SEQ ID NO: 37328 - DNA, 138 bp, Salmonella paratyphi A
gtggaagatgaagacttcggttattgcgagtcctgcggggtggagattggtatccgccgcctggaagcgcgtccaacagccgatctgtgcatcgactgcaaaacgctggctgaaattcgcgaaaaacagatggcgggt

SEQ ID NO: 37329 - DNA, 2495 bp, Salmonella paratyphi A
gaagccgtagaatttaacgagcaatttttacttaatagcagcgctaatatcgatattagtcgctatgcgtatggcaacccggtgcttgccggaacctatcgtgtgaaagtgaatcttaacaatgcgttgaaatctacctctgaaattacctttaatgaaaacggtacgccacgcgccagtgcatgtctgacgccgcttttactcacccaggcaggtgttgatcccgccgcaatgcgcgatgacgtcgaggtcgacgacaacaccacgtgtctggatataaaaaaatactaccccggtgcgacggcgaattacgattccggcaaacaggcgatggatctcaacttcccgcagatttatatcctgaaacgtcctgccgggtatgttgacccctcactgtgggaagatggcgttccggcggccatcgtctcttatgatatgaacgcctggcacagtgaaggcaatggcacaacgtccgataccgcttacgtggagctacgttacggtttaaatatgggaccgtggcgtttgcgttcccgaggtagccttaactggaacaaagataccggtagcgaatacaacaatcaggacgtttatttacagcgagatatcaccgcgctgaaagcgcaaatggtgataggcgactcctacacccgtggcgatgcgtttgactccttcagcctgagcgggatacggatgtataacgatgaccgcatgttaccgatgggctccagcaactacgcgcctgttatccgcggcgtcgccaacagcaatgccaaagtcacggtgatgcaaagcggcaataaaatctacgaaaccaccgtacgccgggggcgttcgagattaacgaccttagcaccacaggttatggtaacgatctgctggtcaccgtagaagaagcggacggcagcaaacgcagctttaccgttcccttttcgtcagtcacccaaatgttacccccggcgcgacacgctgggatatcggcgtcggcgagctgaacgatgattctttacatgataaaccgcaggtgggttacgcgcagttttactatggcctgaacaacacctttaccggctatatcggcgcgcagtataccgatatgaatttctatgctgggttattaggtctggcaatgaacaccggtattggcgcattcgcctttgatgtgacgcaatctcacgccagtattgatgatttaggcacgctcagcgggcaaaactaccggctgacctatagcaaaatgatcgaggcgaccaatacctcatttaacgtcgctgcttatcgtttttctactgaagactacctcagcctgaatgacgccgcgtctttgcaagacagcgttaaacatcagcaatatgcgcagcaaagttatcgctcaggtgatgagttatatgacgattaccagcgtaccaaaaatcaggtgcaaatcagcatcaaccagcccttaaaccagggagaaacaacctggggctctgtgtatgtcagcggaacatggcaggactactggaatgatgcgggctccacggccaactatagcgtgggttacaacaacagttttgcctacggagctatagcgtgtcattacaacgcgcctatgaccagaacggcagtaaagacgatagcgtctatttaagtttcagtattccgttgagtatgttctcccacaacggggaacgctctggcggtttctccaatatcaacatgggcctgcgttctgacatgaagggcggtactaacgtcaactccaccgccagcggtaataccaaagatagcgacatcagctactccgtgagcgccacctccagcagcggtaattacggcaacctgaatcaggtaagtggctttggctcccttaacagcagctatggcccatttaggctttccgcctcgtttggcgacgacaatagccagcaatattccgccagttacagcggtggcatggtgctgcattctggcggcgtagcgttcacgccgggcagcattggcgaaaccgacgccgtcgcactggtgaaagccagcgcgcacaaggcgcaggactgggctacagcagcagcgaaatcggcagctcaggctatggcattttaccgtatatgtcagcctaccgcgaaaaccgggtgtcgctggatatcagcacactggagaacgatgttgaaatcaaaagcaccagcacggttaccgtaccgcagcggcgccgttgtgctggtgaatttgaaaccgatgaaggtcgctcactgattctggaattactgcgtagcgataaaggctttattcctttaggcgcagatgtccttaacgagaaaaatgaaactgtcggtaccgtaggccaggccggacaggcgtacgtgcgcggcgtagaaccgcaaggcgaacttcgcgtggtgtggggcagtggtaaagaaacgacctgtacggtgcgttaccaattagctgaaaccacggcaaaagcgggactaacccccgtattgagcaatcaactttgtcacctgtaatgacctgtt

SEQ ID NO: 37330 - DNA, 750 bp, Salmonella paratyphi A
atggtcaatacggttattacaaagggatttaaaaccacctgcttcgctgccgcggccttcacggcatttgccacattccaggtaaacgcggatatcgtcatttccggaacacgtattgtgtacccagcgtcatcaaaagacgtgattgtgaacctggataaccggggcaataaacctctactggtgcaaacctggctggatgacgggcgtgacggtgttgacccgcaggagctaaaactgccgtttgtcattacgcctccggtatctcgtatcgatccacaaaaagggcaatccttgcgtattacgtatatgggtagcacattacctcaggatcgggaatcgctgttttggtttaacgtgctggaaattccgccaaaatcaaaagcgaaagaaggcgagagtttaaatcaacttcaactcgcctttcgcacgcggatcaaattatttttccgcccggatggcctgaaaggcacgcctggcgatgcggctgcaaacctgaaatggtcgcagaaaaaagaagacaatacgctttcactatttgcccaaaatgacagcgcgtacaacgtttctatttccaacgtaaaattaaaagtgggcggtaaagaatatactgtcgacagcaaatccgttttaccctttagcggggtcagcatgcccgtaaaaggcctttcgaataatattaacggtaccgttatctatagcaccattaatgacaatggtggcacaaataaacgagaagccaaaatagac

SEQ ID NO: 37331 - DNA, 225 bp, Salmonella paratyphi A
atgaaaaagactgccgcaattatctctgcatgtatgctgacttttgccctgagcgcctgttccggtcctaattacgttatgcacaccaatgatggacgtagcattgtgaccgacggtaaaccccagaccgataacgataccggtatgatttcgtataaagacgctaatggcaacaaacagcagatcaatcgtactgacgtgaaagagatggtggctctggaaaac

SEQ ID NO: 37332 - DNA, 1342 bp, Salmonella paratyphi A
atgacagattatgcgtcattcgctaaagtttccggtcaatttggatgaactttgtatgatctctatttagtttttgctcgggagaagcatgtcgggagccaattcagcaatcagccgtcgccgtttactacaaggcgcgggccatgtggctattaagcgtgagccaggtcgggctggctgccgtaagccaggtcgttgcggtgcgtatctggcctgcgtccagctatacccgcgtcacggtagagtcgaatcgtctgctgaaatataaacaatttgccttaagtaacccggaccgcgtggtggtagatattgaggatgtgaatctgaactcggtgcttaaaggcattggcgcgcagattcgcagcgacgatccgtatatcaaatccgcaagggtagggcagtttgatcctaagactgtgcgtatggtctttgagctaaaacaaaacgtgaagccgcagctatttgcgctggccgctgtggcaggctttaaagaacgtctggtgatggatctttatcctgccaatgcgcaggatatgcaggatccgctgctggcgctgctggaagactacaataaaggcgatctggataaacaggtgccgccttcgcaaaggcgccgcagcccggtaaagcggggcgcgatcgtcccattgtcattatgcttgatccgggacacggcggcgaagaccccggcgcgataggcaaatacaaaacgcgtgaaaaagacgtggtgctccagatagcccgccgcctgcgcgcgttgatcgaaaaagaaggcaacatgaaggtttatatgacgcgcaatgaagacatcttcattccgttaaaagtccgggtggcgaaagcgcagaaacagcgcgccgacctgtttgtctctattcatgcggatgccttcaccagccggcagcctagcggttcatccgtattcgcgctatcgaccaaaggcgccaccagtaccgcggcgaaatatctggcgcaaacgcagaacgcctcggacttaattggcggcgtgagcaaaagcggtgaccgttatgtcgaccatacgatgttcgatatggtgcaatcgctgaccattgccgatagtttgaaattcggtaaggcggtgttgaagcagcttggtaaaattaatgacctgcataaaaacaaggtcgagcaggcggggtttgcggtgttaaaggcgcccgatattccgtctattctggtcgagacggcgtttatcagtaacattgaagaagaacgcaagctcaagactgcgacgttccagcaacaggtcgcagagtcgattctggcgggcattaaagcgtattttgccgatggggcgacgctggcgagaagaagttaacct

SEQ ID NO: 37333 - DNA, 1240 bp, Salmonella paratyphi A
aagcgctacattattccattcgccttactttgctcgctattttttctgtgggccgtcgccaataatctgaatgacattttattaccgcagttccaacaggcttttacgctaactaactttcaggccgggcttattcagtcagccttttatttcggttatttcgtcattccaatccccgctgggattttgatgaaaaaactcagttataaagcagggattatcactggactttttttgtatgcttttggcgccgcattattctggcctgcgcccgagataatgaattacacattatttttaattggcctgtttatcatcgccgccggtttaggctgccttgaaactgcggccaatccttttgtgacggtattaggtccagaaagcggcggacgatttccggcttaatctggcgcaaacttttaactcctttggcgctattatcgccgttgtgtttgggcaaagccttattttgtctaacgtgccgcatcaatcacaagaagcgcttgataaaatgacgccggatcagcttagcgcctataaacacagcctggtgttatcggtacaaacgccatacatgattatcgtcgccatcgtattagtagttgcgctgctgattatgctgaccaaatttccggccctgcaaagtgacgatcatagcgatgctaaacaaagctctttcttatcttctctctcccgactcatccgtatccgccactggcgctgggcggtgctggcgcagttctgctacgtgggggcacaaaccgcctgctggagctatctgatccgctacgccattgaggagatccctggaatgacgcccggtttcgccgccaattacctgaccggcacgatggtgtgcttctttatcggccgtttcaccgggacctggcttatcagccgcttcgcgccgcataaagtgctggccgcctatgccctgcttgccatgctcctgtgtctgatttccgcctttagcggcggacatatcggcctgctggcgctgacgttgtgtagcgcatttatgtcaatccagtacccgaccatcttctcgctgggtatcaaaaatctgggacaggacactaagtacggctcgtcttttatcgtcatgaccatcattggcggcggtattgtcacgccagtaatgggcttcgttagcgacgccgcaggcaaaatcccgaccgccgaactggttccggcattgtgctttgccgtcatcttcatctttgcccgtttccgttcacaa

SEQ ID NO: 37334 - DNA, 420 bp, Salmonella paratyphi A
atgctaaaaaccatttcaccgttaatttccccgacactgctcaaagtgctggccgagatgggccacggggacgaaatcattttttccgacgctcactttcccgcgcatagcctgggcccgcaggtgattcgcgccgatggtcttagcgtcagcgatctactgcgggcaattattccgctctttgagctggatagctacgccccgccgctggtgatgatggccgccgtggaaggcgacacgctcgatcccagcgttgaagcgcgctatcgcgatgccttgtcattagaagcgccgtgcccggatatcgttcgtatcgaccgctatgcgttttatgagcgggcgcaaaaagcgtttgcgatcgttatcacaggtgagtgcgcgaagtacggaaatattcttttaaaaaaaggggtaacgccg

SEQ ID NO: 37335 - DNA, 1288 bp, Salmonella paratyphi A
atgtttaaaccagaactcctttcgccggcgggaacgctgaaaaatatgcgttacgctttcgcttacggtgccgatgccgtctatgcgggccaaccgcgctactctttacgcgtgcgtaataacgaattcaatcacgaaaatttgcagcttggcatcaacgaagcccacgcgctcggaaaaaaattctacgtggtggtgaacatcgccccgcataacgccaagctcaaaacctttatccgtgacctgaaacccgtcgtcgagatgggcccggatgcgctgatcatgtccgatccagggttgattatgctggtacgcgagcacttcccgcaatgccgattcactgtcggtacagctaatgccgtaaactgggcgacggtaaaattctggcagcagatggggctgacccgtgtgattctctcccgcgcgtgtcgctggaagagattgaggaaattcgccagcaggtcccggatatggaaatagaaattttcgtccacggcgcgctatgcatggcctattccggccgctgcctgctttccggctacatcaataaacgcgatccgaatcagggcacctgcaccaatgcctgccgttgggaatataacgtgcaggaaggaaaagaagacgttgtcggcaacatcgtgcataagcacaaccgattccggtacagaacgttgagccgacgctcggtatcggcgcgccgacggataaagtgtttatgatagaagaggcccaaagaccgggcgaatacatgaccgcgttcgaagacgagcatggcacctatatcatgaactcaaaagatttgcgcgctatcgcccacgtggagcgcctgacaaaaatgggcgtccactcgctgaaaatcgaaggccgcaccaaatccttttattactgcgcccgtaccgcgcaggtctaccgtaaggccatcgacgacgccgccgcgggtaaacccttcgaccctacgctgctggaaacgctggaaggtctggctcatcgcggctataccgaaggtttcctgcgtcgccatacgcacgacgattaccagaattacgagtacgggtactccgtttccgaacgccagcaatttgtcggcgagttcaccggcgagcgtaaaggccaactggcggccgtgacggtgaagaataaattctccgttggcgatagtctggagctgatgacaccgcagggaaatatcaatttcaccctggaacagatggagaacgccaaaggcgacgctatgccggtggcgcctggcgatggctataccgtctggatgcccgtcccgcaggacgtt

SEQ ID NO: 37336 - DNA, 3043 bp, Salmonella paratyphi A
  misc_feature (3019)..(3019): n=g, a, t or c
atgcgctttttcgcccttttcatctaccgcccggtcgccaccattttgattgccgccgccattacgctgtgcggcattctgggctttcgtctgctgccggtcgccccgtgccgcaggtcgatttcccggtgattatggttagcgcctcgctgccgggcgcctcgccggaaaccatggcttcgtcggtggcgacgccgttggaacgttctttgggacgcattgcaggcgtcaatgaaatgacttccagcagctcgctcggcagtacgcgcattattctcgaatttaatttcgatcgtgatatcgaaccgcggcgcgcgatgtgcaggccgccattaacgccgcgcaaagcttgttgccaggcggaatgcccagccgcccgacttatcgcaaggccaacccgtccgacgcgccgattatgattttaacgctcacctcggagagctggtcacaaggcaaactgtatgatttcgcctctactcaactggcgcaaaccatcgcgcaaattgacggcgtcggcgatgttgacgtcggcggcagctccctgcccgcagtacgtgtaggcttaaacccgcaggcgctctttaaccagggcgtctcgctggatgaggtccgcgaagcgatcgacagcgccaacgtacgccgaccgcaaggcgcaattgaagatagcgtccaccgctggcaaatccagaccaacgacgaactgaaaaccgccgccgaataccagccgctgattattcactataacaacggcgcggcggtacgcctgggcgacgtcgccagcgtcaccgactcggtgcaggatgtccgtaacgccgggatgacgaacgctaaacccgctattttgttgatgatccgcaagttgccggaggccaacattattcagacggtcgacggcatccgggcaaaactgccggaactgcgggcaatgatccccgccgctatcgatttacaaatcgcccaggatcgttcgccgacaattcgcgcatcgctgcaagaggtagaagagacgctggctatctctgtcgcgctggtgatcctggtggtgtttttattcctgcgttccgggcgcgcacgctaatccccgccgtcgccgttcccgtttcgctcatcgcaccttcgccgccatgtatctgtgcggcttcagcctcaacaatctgtcgctgatggcgctgactatcgcgaccggatttgtcgttgatgatgccattgtggtgctggaaaataccccccgccatctggaggcgtaatgagtccattagtagggtgattacagggtacagcggtcagtaggtcttacggtcatctctatgagtctgtcgctggtggcggtattttctgccgctgctgttaatgggcggcctgccaggacgattattacgggaattcgccgttaccctctcggtggcgattggcatttcgctggtggtctcgctcacactgacgccgatgatgtgcttctggatgcttaaatcaagcaaaccgcgcacccaaccgcgtaaacggggcgttggccgtttgctggtcgccttgcaacagggttacggcacgtcgttaaaatgggtgcttaaccatacgcgtcttgtcggtgtggtttttcttggcaccgttgcgctgaacatctggctttatatcgccatccctaaaacattctttccggagcaggacactggcgtgttgatgggcggtattcaggctgaccagagcatctctttccaggccatgcgcggcaagctgcaggattttatgaaaattattcgcgacgatccggcggtgaataatgtcactggttttaccggcggctcgcgggtgaatagcggcatgatgtttattacgctgaagccgcgcggcgaacgcaaagagacggcgcagcaaatcattgatcgactgcgggtcaaactggcaaaagaacccggcgccaggctgtttctgatggcggtacaggatattcgcgtcggcgggcggcaggctaacgccagttaccaatatacattgctgtctgactccctgccggcgctgcgcgagtgggagccgaaaatacgcaaagcgctctcggccctgcgcaactggcggacgtaaactccgaccagcaggataacggcgcggagatgaaccttatctacgaccgcgacaccatgtcacggctgggcattgatgttcaggccgcaaacagtctgttaaataatactttcggccagcggcaaatttccaccatttatcagccgatgaaccagtataaagtggtgatggaagtcgatccgcgctatacccaggatatcagcgcgctggagaaaatgttcgttatcaaccgtgacggaaaagcgatccccctctcttatttcgcccaatggcggcccgccaatgcgccgctgtcggtgaaccatcagggactttccgcggcgtccacgattgcctttaacctgccgaccggcacatcgttatcgcaggcgacggaggccattaatcgcaccatgacgcagcttggcgtcccctcgacggtacgcggcagtttttccggaacggcgcaagtcttccagcagaccatgaattcacagcttattttgatagtggcggcgatcgctaccgtctacattgtgctggagatactgtacgaaagctacgtccatccgctgaccattctctctactctgccatcggcgagcgttggggcgcttctggcgctggaactcttcaatgcccctttcagcctaatcgccctgatagggatcatgctattaattggcattgtgaagaaaaacgccattatgatggtcgattttgcgcttgaagcgcaacgaagcggccctgacgccggaacaagccattttccaggcctgcttgttacgcttccgtccaataatgatgaccacgctggcgcgctgttcggcgcactgccattggtgttatctggcggagacggttcggaattacggcagccgctggggataaccattgtcggcggtttggtcatgagccagctccgacgctctataccacgccggtggtgtacctcttttttcgnactgcggctggtttttcgcgtaaa

SEQ ID NO: 37337 - DNA, 1195 bp, Salmonella paratyphi A
ttttacaaacagttaaccaacgatctggaaaccgcccgggcggaaggattgtttaaagaagagcgcattattacgtctgcgcagcaggcggatatcaccgtggcggatggaagccatgttattaacttttgcgccaataactatctcgggctggcgaatcatcctgagctgattaatgccgcaaaagcgggcatggacagccacggtttcggtatggcgtccgtgcgttttatctgcggcacccaggacagccacaaagcgctggagcaaaagctggcaagcttcctcggcatggaagatgcgattctgtattcctcctgtttcgacgctaacggcggcttgtttgagacgttgctgggcgcggaagacgccattatctccgacgcgctgaaccacgcgtctatcattgacggcgtgcgtttgtgtaaagcgaacgctatcgctatgccaacaacgatatggctgagctggaagcgcggctgaaagaggcgcgtgaggccggcgcgcgtcatgtcctgatcgccaccgacggggtgttctcaatggatggcgtcatcgccaatctgaaaggcgtctgtgatctggccgataaatacgatgcgctggtgatggttgatgattctcacgcggtaggctttgtcggcgaaaacggtcgcggttcccatgaatactgcgacgtaatgggccgcgtagatattattaccggtacgctgggcaaagcgttaggcggcgcatccggcggctataccgcggcgcgtaaagaggtcgttgagtggttgcgtcacgttcccgcccatatctgttctccaactccctggcgccggcgatcgtggcggcttctattaaagtgttggagatggtggaagcgggcgcagaactgcgagtcgcttgtgggcgaacgcggcagttccgtgagcagatgtctgccgcgggatttacgctggcaggcgcggatcacgccatcatcccggtaatgctgggagatgcggttgtcgcgcagaaatttgcccgcgaactgcaaaaagagggcatttacgttaccggtttcttctatccggtcgtaccaaaaggtcaggcgcgtattcgtacccagatgtctgccgggcatacgccgtgagcaaattacgcgtgcggtagacgcgttcacgcacttggtaaacaactgggcgtgattgcctgaggatgtaagatgaaa

SEQ ID NO: 37338 - DNA, 956 bp, Salmonella paratyphi A
atgcgggttttgatcgttaaaacatcatcgatgggcgacgtattacataccctgcctgcgcttaccgacgcgcaacaggcgattccggggattcaatttgattgggttgtcgaagaagggtttgcgcaaattccgtcctggcacagtgctgtcgatcgcgtgattcccgtcgctattcgccgatggccaaggcctggttttccgcgcccattaaagcggaacgcatagcctttcatcgggcggtatgcgcataccaatacgacgctgtgattgatgcgcaggggctggtaaaaagcgcggcgctggtgacgcgtctggcgcatgggataaagcacggtatggactggagtaccgcccgcgaaccgctggccagcctgttttataaccgtaaacaccatatcgcaaagcaacaacatgcggttgaacggacgcgcgacgtgttcgccaaaagcctgggatacgataaaccgcagtcgcagggcgattatgccatcgcaaaacattttctgcattgtcagcaggcggttacgatccatatgcggtgtttttacatgccacgacccgcgatgataaacactggccggaagcaaactggcgcgacgttatcggcctggtgggcaacaccggattacggataaaacttccctggggcgcgctcatgaggaggcccgggctaaacgactggcgaaggctttgactatgtggatgtgttaccgcgcatgagcctggaggaggtcgccagagtgctggctggcgcaaaatttgtcgtatcggttgataccggcctgagccatctttccgcggcgctcgacagaccgaatattacgctatatggcccaacggaccctgggttaattggaggttatgggaagaaccaaatggcatgctgctcaccagaacaaaacctggcgaatttagatgccacaagcgtatttggaaagattcattaaagagac

SEQ ID NO: 37339 - DNA, 1143 bp, Salmonella paratyphi A
atgattaaaaaaatcatatttactgttactcctatattttcaattcctcctcgtggcgcggctgcggtagaaacctggatttaccaggttgcaaaacgattatcaataccgaatgctattgcttgtataaagaatgccggctatcctgaatataataaaataaacgataactgtgatattcattacattgggtttagtaaagtttataagcgtctttttcagaaatggactcgtctcgacccactaccctattcccagcgcatccttaatattagagataaagtgactacccaggaagatagcgtcattgttattcataatagtatgaaactgtatcggcagatcagagagcgcaatccgaaagcaaaactggttatgcacatgcataacgcatttgaaccagaacttcctgataaggatgcaaaaattatcgtgcccagtcagtttcttaaagcgttttatgaagaaagattgcccgccgctgctgttagtattgtgcctaatggtttttgtgctgaggcttataaaagaaacccacaagataatcttcgtcagcaattaaatattgcagaagatgccactgttctcttatatgccgggagaatttcgcctgataaaggcatcctgttgcttttgcaggcgttcaaacaattacgtaccttaagaagtaatattaaacttgtcgttgttggcgacccttatgcaagccgcaagggtgaaaaagcagagtatcaaaagaaagtactggacgctgcaaaagagattggaacggattgtattatggctggggggcaatctcctgaccagatgcataacttctatcatatagccgatctggttatcgtgccatctcaggttgaagaagcattttgcatggtggctgtagaagcgatggcagcaggaaaagcggttcttgccagcaaaaaaggggggattagcgaatttgtgttagatggcataacgggctatcacctcgcagaacctatgtcgagcgacagtataattaatgatattaaccgtgcgcttgctgataaggaacgccaccagattgccgaaaaagcaaaatccctggtgttttcaaaatacagttgggaaaatgtagcgcagcgtttcgaggaacaaatgaaaaactggtttgataag

SEQ ID NO: 37340 - DNA, 874 bp, Salmonella paratyphi A
tttagcgtggaatattcaatattaagtaacaaccttaaaatgcctatggtgggttttggcgtttttaaggtaaccgacaaagaagaatgtcagcagtcagtgttaagcgctattcgcagcggttatcgccttatcgataccgctgcggtatacggcaatgaagatgccgttggtgacgctgttcgtgaagccatcgcgacaggtctgtgtacccgtgaggagttatttattacttctaaactgtgggtgcaagatatggctaactacgatctggccaaagcaggtattgaagcgtcgctgaaaaaatccgggttagattattttgatctctatttattgcatcaggccatgggcgattattttagcgcgtggcgcgcgctggaagacgcttataaagccggtaaactaaaagccattggcgtgtccaacttctatgcgcatgtgttagccaacttctgtgaaaccgtcagaattacgccaatggtaaaccaggtcgaattgcatccatactttgcacaacctgccgcgctggaaaccatgaagcattataacgttcagcctgaagcgtgggccgttaggcggcgggagacataaaccgtatgaaaatgtcatgcttcaaaggattgccgatgcccatcaaaaaaccatcgcgcaggttgtcctgcgttggaacgtgcagcgtggcgtcacggttattcctaaatccactcgacaggaacgcattgaagagaactttgccatctgggatttctcactaacggataatgaaatggctcaaatcaacgcccttgatttaggctacgttggcgaagcggtgaagcattttaatcctgaatttgttcgcggttgtcttggcgttaaaatccacgattga

SEQ ID NO: 37341 - DNA, 366 bp, Salmonella paratyphi A
atgaaaatcgctctgccactttcgctcaaccttccttccatgggtttacgcctcagtacggtgattgagcgttgccgcctggtaagccgtagcgaataccttatcagcgctggcatacgcaaaaacagcccgaacgggagtattcatcctaatagcctgactaaaaaatttgttgcggcacgaaaattgaccggaataaatttcagtgaaaacccaccgccgtttcacgagatccgcagcttatccggacgactgtataaagacgcttacggcgaagggtttgctcagaaactcctgggacatacttcagagaacacaacaaaaatataccttgatggacgtgacgaaaaggcatacatgatgctc

SEQ ID NO: 37342 - DNA, 405 bp, Salmonella paratyphi A
atggaattacagctcatgcttaaccactttttcgagcgcgtcagaaaggatgcaaatttcaacacatttctaatcgatctggaatataataatatcgcttattacatttattttgttgctaccggtaatgtgaaaattatcactcatgcaggccacttcatttctattaaaagcaatagaaagctgattaaagtcaattcaacaccgaatacgcaattaataaaattgacttcagctaaacacttttcgggggagcattcctatgaaaaatactgtaccgatctggcaacggcaggcgtttttaaatggattgttgaattaaaccaaaaaactcgacaatactggtcgaaagacaaccaattattatatataaaaatgtggtcatgccgctttaacaagccaggg

SEQ ID NO: 37343 - DNA, 1484 bp, Salmonella paratyphi A
gatccgtacatcaacgtcgatccgggtactatgagcccaatccaacacggggaagtgttcgttactgaagacggcgctgaaaccgacctggacctggggcactacgagcgtttcatccgcaccaagatgtctcgccgcaacaacttcacgactggccgcatctactccgacgttctgcgtaaagaacgccgtggcgactatctgggcgcaaccgtacaggtaatccctcacatcactaacgcgattaaagagcgcgtgctggaaggtggcgaaggccacgatgtggtactggtggaaatcggcggtaccgtcggtgatatcgaatcgctgccgtttcttgaggcgattcgtcaattggcggtagatatcggtcgtgaacacgcgctgtttatgcacctgacgctggtaccttacctggcggctgcgggcgaagtgaaaactaaaccgactcagcactccgtgaaagagctgctgtctatcggtattcagcccgatattctgatttgtcgttccgatcgcgcggttcctgccaacgagcgtgcaaaaattgcattgttctgtaatgtgccggaaaaagccgttatttcaatgaaagatgtcgattccatttataaaattccaggcctgttgaaatctcaggggcttgatgattatatttgtaaacgattcagcttgaactgtccggaagctaacctgtctgaatgggaacaggtcatttacgaagaagcgaacccggcagcgaagtgactatcggcatggtcggcaaatatattgaactgccggatgcctataagtcggtgatcgaagcgctgaaacacggtggtctgaaaaaccgcgttaccgtcaacatcaaattgatcgattcgcaagatgttgaaacgcgcggcgtcgaaattctgaaagatttggacgctatcctgatccccggcggcttcggctatcgtggcgttgaaggtaaaatcgccactggctatgcgcgtgaaaacaatattccttatctgggcatttgcctggggatgcaggttgcgttgattgagttcgctcgtaacgtggccggcatggacaacgccaactcaacggaatttgtgccagactgtaagtacccggttgtggcgttaattaccgagtggcgcgatgaagacggtaacgttgaagtccgtagcgagaaaagcgatctgggcggcaccatgcgcctgggcgcgcagcagtgccagcttagcgatgacagcctggtacgtcagttgtacggcgcgccgacgattgttgaacgtcatcgccatcgttacgaagtcaacaatatgttgttgaaacaaattgaagcagcgggtctgcgtgtcgcaggccgttccggtgatgatcagttagtcgagatcattgaggtaccgaatcatccgtggttcgtggcctgtcagttccatccggaatttacttccacgccgcgtgatggacatccgttgttcgctggctttgttaaagccgccaac

SEQ ID NO: 37344 - DNA, 1296 bp, Salmonella paratyphi A
atgtccaaaatcgttaaagtcatcggtcgtgaaatcatcgactcccgtggtaacccgactgttgaagctgaagtacacctggaaggctgtttcgtaggtatggcggcggctccgtcaggtgcttctactggttcccgcgaagcgctggaactgcgcgatggcgacaaatcccgtttcctgggtaaaggcgtaaccaaagctgttggcgcggttaacggcccgatcgctcaggctattcttggcaaagacgctaaagaccaggctggcatcgacaaaatcatgatcgacctggacggtactgaaaacaaatctaacttcggtgcaaacgccattctggctgtctctctggctaacgccaaagctgctgctgccgctaaaggtatgccgctgtacgagcacattgctgaactgaacggcacgccgggcaaatactccatgccggttccgatgatgaacatcatcaacggcggcgagcacgctgacaacaacgtcgacatccaggaattcatgatccagccggttggcgcgaaaacggttaaagaagccatccgtatgggttctgaagttttccatcacctggcaaaagtgctgaaaggcaaaggcatgaacaccgctgtgggtgacgaaggcggctatgcgccgaacctgggctccaacgcagaagcgctggcggtaatcgctgaagcggttaaagcggctggttacgagctgggtaaagacatcaccctggcgatggactgcgcagcatctgaattctacaaagacggtaaatacgttctggctggcgaaggcaacaaagcgttcacctccgaagaattcacccacttcctggaagagctgaccaaacagtacccgatcgtttccatcgaagatggtctggacgagtctgactgggacggttttgcctaccagaccaaagtactgggcgacaaaatccagctggttggtgacgacctgttcgtaaccaacaccaaaatcctgaaagaaggcatcgagaaaggcatcgctaactccatcctgatcaaattcaaccagatcggttctctgaccgaaactctggctgcaatcaagatggcgaaagacgctggctatactgctgtcatctctcaccgttctggcgaaactgaagacgctaccatcgctgacctggctgttggtaccgctgcaggccagatcaaaaccggttctatgagccgttctgaccgtgttgctaaatacaaccagctgattcgtatcgaagaagctctgggcgaaaaagcaccgtacaatggtcgtaaagagatcaaaggccaggcg

SEQ ID NO: 37345 - DNA, 365 bp, Salmonella paratyphi A
atcatgtccaccacgttgtataaagatttcacctttgaagccgctcaccgcctgcctcacgtgcctgaagggcataagtgcggccgcctgcacggacactcgtttatggtgcgtctcgaaattaccggtgaagtcgatccgcataccggttggattatggatttcgcggatctcaaagcggcgtttaaacctacttacgatcgtcttgatcactactatctgaatgatattccagggctgtccaatcccaccagcgaagtgctgcaaaatggatttgggatcaggttaaacctgtcgtgccgctactgagcgccgtgatggtgaaagagacctgtacagccggctgcgtctatcgcggcgaataa

SEQ ID NO: 37346 - DNA, 2293 bp, Salmonella paratyphi A
gtcggcgacgatctgtatatcaaaacaacaggtagccagggacgtggaattacagctaacgccatgcgggatgcgtcacgtgccaaaaatacgattgtcgtcggcaatcgtgcacatattgttactaccggcgacagttcggaggggctgcgtaccggacaaagcggttctttgattcgtctgggtgacgatgcaaccatcgaaacctccggcgcatcctcaacggggatttacgcagcatcctcctccagaaccgagcttggcaacaacgctactattacggtgaacggtgccagcgcacacgcggtatatgcaactaacgctaccgttaatttgggagagaatgccactattagcgttaacagcgccagtaaggctgcatcctatagtaaagcccctgccggtttatacgccctctcccgaggcgccattaatctggcaggcggtgcggctattactatggcgggcgataacagtagcgaaagttacgccatcagcacggaaactggcggcattgttgacggttcttcaggaggtcgtttcgtcatcgacggtgatattcgtgctgctggcgccaccgctgccagcggtacgtaccgcagcagaacagtacgattaagctcaatatgacggacaactcgcgatgggacggggcgtcgtacatcaccagcgctacggcgggcacaggcgttatctctgtacaaatgagcgatgcgacctggaatatgaccagcagctcaacgctcactgacctgacgctgaatagtggcgcaaccattaacttcagccatgaagatggcgagccatggcaaacgctcaccatcaatgaagattatgtaggcaacggcggtaagctggtctttaatactgtgctcagcgatgatgattccgaaacggacaggctgcaggttctcggcaatacttcaggcaacacatttgttgcagtaaataatattggaggagccggggcgcaaaccattgaaggtattgaaattgtcaacgttgctggcaattccaacggtactttcgaaaaagcaagccgtattgttgccggagcctatgactacaacatggtgcagaaaggtaaaaactggtatctgaccagctacattgagtcggacgaatcgattattcccgatccggtagaccctgttattcctgaccctgtcattcccgatccggtagaccctgtatcagtagacccggttatccctgaccctgttatttccgattcggtgggacctgagccagtagacccggtcatccttgatctgacaatttctgacatagggcaatctgacacaccgccgataacagaacatcagttccgtccggaagtgggtagctaccttgccaacaactatgcggcaaatacgctgttcatgacgcgtctccatgaccgtctgggtgaaaccagtacaccgacatgctgacgggtgagaagaaggtcaccagcctgtggatgcgtaacgtcggcgcccatactcgcttcaacgatggcagcgggcagctaaaaacccgcatcaacagctatgtgttacaactgggaggcgatctggcacagtggagcactgacggtcttgaccgttggcatattggtgcaatggcaggttatgccaacagccagaaccgcacacagtcgtccgtgagtgactatcattcccgtggtcaagtcactggttacagcgtcggcctttacggcacctggtatgctaacaatatcgatcggtctggggcttatgtggatacctggatgctgttcaactggtttgataacaaggtcatgggtcaggatcaggccgctgagaaatataaatccaaaggaattaccgcctcggttgaagccggttacagcttcaggttaggtgaaagcgtgcatcaaagctactggttgcagcccaaagcgcaggtggtatggatgggcgtgcaggctgacgacaatcgcgaagccaatggtaccctcgtcaaggatgataccgccggtaatctgctaacccgcatgggcgtaaaagcctatattaacggccacaatgctattgatgacaataaatctcgagagttccagccgttcgtggaggcgaactggatccataatacgcagcctgccagcgtgaagatggacgatgtcagcagcgatatgcgtggtacaaaaaatattggtgaactgaaagtgggtattgaaggacaaattaccccgcgcctgaacgtatggggtaacgtggcgcaacaggtaggtgaccagggctatagtaatacccaaggcctactgggggttaaatacagtttttgattc

SEQ ID NO: 37347 - DNA, 606 bp, Salmonella paratyphi A
atgatgagaaagccttcacaaattgtccattgcattagttgcgatttatcctgtcaattattccctgacagcgcagtacgggtgcaatactgtcataatgcggcattttccatctggccagatggtaatgctttcctgaaaaaagggtttattgaaaagttattgcttgatagacacaaccatttatccagcggttttatctttgttgatttttctttcccgaatcttcgacgatttaccgatttacaatgggctgacagtctggcaaacagtggtatgcatattgtcctgatttctgacagaagtttaactccgctggccaattactggattttgaaaagcaataaaatacaaggaattatttattccgatgacgatgatattgtgcaacagcaaaagatgcaccgcttgtttaccggtcggcttgccaacagtaaacgaggacgaacgcttaactatacggaatttatattactgaagcgctttgtatcaggaataagtattcagcagattgtaaatattgatattaagaaactttatgtgcataagctgcggcttgaaaataagctagggcatagcattcataaaataatatcaaatatttta

SEQ ID NO: 37348 - DNA, 742 bp, Salmonella paratyphi A
atgggttccaccagaaaagggatgctaaacgtcctgattgccgccgtattgtgggggagttcaggcgtttgcgcgcagtacatcatggagcaaagccgtatgtcgtcacagttcctgacgatgatacgtttgttattcgccgggctgatactggtgaccttctcctttatgcacggcgataagatattttcgattcttaaaaaccgcaaagatgcactgagtctgctgattttctccgtggtgggcgcgctcaccgttcagctaaccttcctgctcacgattgaaaaatccaatgccgccaccgcgacagtgctgcaatttttatcgccgaccattattgtcgcgtggtttgcattagcgcgaagaacacgaccaggcattctggtcttaaccgccattcttacatcgcttatcggcacctttttactggtgactcacggcaatccaacatcgctgtcgatctcttcaggcgcgctgttctggggtatcgcctccgcatttgccgccgccttttatacgacctggccttccaggctaatcgcccaatacggcacgctgccagtggtcggctggagtatgtcctttggcggccttattctgctgcccttctacgctaaagaaggaacgcactttgcggtgagcggcagcctgattctggcctttttctacctggtggtgatcggtacgtcgctgacgttcagcctgtatttgaaaggcgcgacagctgattggtggccccaaa

SEQ ID NO: 37349 - DNA, 1249 bp, Salmonella paratyphi A
  misc_feature (318)..(319): n=g, a, t or c
  misc_feature (486)..(486): n=g, a, t or c
aaagtagttgttccggtggaaggtaagaagatcaccctgcaaaacggcaaactcaacgttcctgagaatccgattatcccgtttattgaaggcgatggtatcggtgttgatgtcactcctgccatgcttaaagtggtcgatgccgccgtcgagaaagcctataaaggcgagcgtaaaatttcctggatggaaatttacaccggagaaaaatccacacaggtttacggccaggatgtctggctccccgctgaagcccttgatttgattcgtgattaccgcgtagattagaaggtccgttgaccacgccggttggcggtnnattcgctctctgaacgttgccctgcgtcaggagcttgacctgtacgtttgtctgcgtcccgttcgttactatcagggcacgccaagtccggtgaaacatccggagctgaccgatatggtcatcttccgtgaaaactctgaagacatctacgccggaattgaatgganagctgactctgcagacgctgagaaagtgatcaagttcctgcgcgaagagatgggcgtgaagaaaattcgcttcccggagcactgcggtatcggtatcagaccatgttctgaagaaggcactaaacgtctggttcgcgcgggattgaatacgctattaccaacgatcgcgattccgtcacgctggtacataaaggcaatatcatgaagttcaccgaagcgcgtttaaagactggggctaccagttggcgcgcgacgagttcggcggtgagcttattgacggcggtccgtggctgaaaattaagaacccgaacacgggtaaagagattgtggttaaagacgttatcgccgatgcgttcctgcaacagatcctgttgcgtccggcggaatacgacgttatcgcctgtatgaacctgaacggtgactatatttccgatgccctggcggctcaggttggcggtatcggtattgcaccgggtgcgaatatcggcgacgaatgcgcgttgtttgaagcgactcacgggactgcgccgaaatatgcgggccaggataaagtcaacccaggctccattattctgtctgcggagatgatgctgcgccacatgcagtggttcgaagcggcggatctgattgttaaaggtatggaaggccgattgccgcgaagaccgtgacctatgactttgaacgcctgatggaaggcgctaagctgctgaaatgtagtgagtttggcgacgcgattatcgcaaatatgtaataacgataattg

SEQ ID NO: 37350 - DNA, 1074 bp, Salmonella paratyphi A
atggggctggttaacattacattaagtgaaaaagggacgttgatggcgacgctcccggccaatgttgagggggatattcccgccattggttttatctcccatgtggatacctctccggatttcagcggtaaaaacgttaacccgcagattgtcgagaattatcgcggcggcgatatagcattagggattggcgatgaggtgttgtcacccgtgatgttcccggtactgcatcaattactgggacaaacgctgattactaccgatggtaagacattgctgggcgcggacgataaagccggtgttgcggagatcatgaccgcgctggcggtgctgaaaggtaatcctattccccacggcgaaattaaagtggcgtttacgcctgacgaagaggtagggaaaggcgcgaagcacttcgatgttgaggaatttggcgcgcagtgggcctatacggtcgacggcggcggcgtgggagaactggagtttgaaaacttcaatgccgcctcggtgaatatcaaaatcgtcggcaataacgtgcatcctggtacggcgaaaggcgtgatggtcaatgcgctgtcgttggcggcgaggattcacgcggaagtgccggcggatgaagcgcctgaaaccactgaaggttacgaagggttttatcatctggccagcatgaaaggcaccgttgaccgggccgaaatgcactacatcattcgcgatttcgaccgtaagcagtttgaagcgcgtaaacgcaaaatgatggagattgccaaaaaagtcggtaaggggctgcatccggactgctatatcgaactggtgattgaagacagttattacaatatgcgcgaaaaagtggttgagcatccgcatattctcgatatcgcccagcaggccatgcgcgactgtcatattacgccggagatgaaaccgattcgcggcggtacagacggggcgcaactgtcgtttatgggcttgccgtgtcctaatctctttaccggcggatataactatcatggtaaacatgagtttgtgacgctggaggggatggaaaaagcggtacaggtgattgtacgtatcgcggac

SEQ ID NO: 37351 - DNA, 1418 bp, Salmonella paratyphi A
ccgctgtcgctgcgggttcgttttttgctggcgacagccggcgtcgtgctggtgctttctctggcatatggcatagtggcgctggtcggctatagcgtaagttttgataaaaccacttttcgtttgctgcgcggcgaaagcaacctgttttataccctcgccaaatgggaaaataataaaatcagcgttgagctgcctgaaaatctggacatgcaaagtccgaccatgacgctgatttacgatgaaacgggcaaattattatggacgcagcgcaatatcccctggctgattaaaagcattcaaccggaatggttaaaaacgaacggcttccatgaaattgaaaccaacgtagacgctaccagcacgctgttgagcgaggaccattccgcgcaggaaaaactcaaagaagtacgtgaagatgacgatgatgcggagatgacccactcggtagcggtaaatatttatcctgccacggcgcggatgccgcagttaaccatcgtggtggtcgataccattccgatagaactaaaacgctcctatatggtgtggagctggttcgtatacgtgctggccgccaatttactgttagtcattcctttactgtggatcgccgcctggtggagcttacgccctatcgaggcgctggcgcgggaagtccgcgagcttgaagatcatcaccgcgaaatgctcaatccggagacgacgcgtgagctgaccagccttgtgcgcaaccttaatcaactgctcaaaagcgagcgtgaacgttataacaaataccgcacgaccctgaccgacctgacgcacagtttaaaaacgccgctcgcggttttgcagagtacgttacgctctttacgcaacgaaaagatgagcgtcagcaaagctgaaccggtgatgctggaacagatcagccggatttcccagcagatcggctattatctgcatcgcgccagtatgcgcggtagcggcgtattgttaagccgcgaactgcatcccgtcgcgccgttgttagataacctgatctccgcgctaaataaagtttatcagcgtaaaggggtgaatatcagtatggatatttcaccagagatcagttttgtcggcgagcaaaacgactttgtcgaagttatgggcaacgtactggacaacgcttgtaaatattgtctggagtttgtcgagatttcggctcgccagaccgacgatcatttgcatattttcgtcgaagatgacggcccaggcataccccacagcaaacgttccctggtgtttgatcgcggtcagcgcgccgataccctacgaccagggcaaggcgtggggctggctgtcgcgcgcgagattacggaacaatacgccgggcagatcattgccagcgacagtctgctcgcggcgcccgtatggaggtcgtttttggccgacagcatccc

SEQ ID NO: 37352 - DNA, 1385 bp, Salmonella paratyphi A
  misc_feature (72)..(72): n=g, a, t or c
  misc_feature (74)..(75): n=g, a, t or c
  misc_feature (158)..(158): n=g, a, t or c
atggaattatcctcactgaccgccgtttcccctgtcgatggacgctacggcgataaagtcagcgcgctcgananntttttagcgaatacggtttgctgaaatttcgtgtacaagtcgaagtacgttggctgcagaaattagccgcgcacgctagcgantcaaggaagttcctgcttttgctgccgacgcaaacggttacctggatacgcttgttgcaacttcaatgaagaagatgccgcgcgcattaaaaccattgcgcgcaccacaaatcacgatcgtgaacgcgggtgagtattttctgaaagaaaaagtctccgcgatcccggcgttacatgacgtttccgaatttatccactttgcctgcacttctgaggacattaacaacctgtcgcacggttaatgctcaaaaccgcgcgcgatgaagtgatcctgccttactggcgtcaggtgattaacgcggttaaagatctcgccacgcagtatcgcgatattcctctgctctcccgcacccacggccagccggcaacaccttccactctgggtaaagagatggcgaacgtgacgtatcggatggagcgtcagttccgccagctcaaccaggtggagatcctcggtaaaattaacggcgccgtaggcaactataacgcgcatatcgccgcctatccggaagttgactggcatcagttcagcgaagagttcgtcacctcgctgggcatccagtggaatccttacaccacccagattgaaccgcatgattatattgcggaactgtttgactgtatcgcgcgctttaacactatcctgatcgatttcgatcgcgatgtctggggctatattgcgttgaaccatttcaaacagaaaaccatcgccggggagatcggttcttctaccatgccgcataaagttaaccccattgactttgaaaactcagaaggcaacctcggtctgtctaacgcagtgttgcaccatctggcaaacaaactgccggtttcccgctggcagcgcgatctgaccgactcaaccgtcctgcgtaacctaggtgtcggcatcggctatgcgcttatcgcttatcagtccaccctgaagggcgtcagcaagctggaagtaaaccgcgatcatctgcttgacgaactggatcacaactgggaagtattagccgaaccgatccagaccgtcatgcgccgctatggtattgaaaaaccatatgaaaaactgaaagagttgacccgtggcaagcgtgtcgatgccgaagaatgaaacagtttattgatagtctggccctgccggaagcagaaaaaacgcgccttaaagccatgacgccggcaaattatatcggtcgcgctgtgactctggtcgacgaacttaaataatatgtgcctcaccct

SEQ ID NO: 37353 - DNA, 1104 bp, Salmonella paratyphi A
atgtcagaaagcccaaaaaaagtgatcgtcggcatgtccggcggtgtcgattcctccgtttccgcctggctgttgcaacaacagggttatcaggtagaaggcctgttcatgaagaactgggaagaggacgatggtgaggaatactgtaccgcggcagccgatctggctgacgcgcaggccgtgtgcgacaagcttggcattgaactgcataccgttaattttgccgcagaatattgggataacgtctttgaactgttccttgaagagtacaaagcaggccgtacgccgaacccggatattctgtgcaataaagagatcaaatttaaagccttccttgaatttgccgcagaagatttaggcgccgactatatcgccaccggtcactacgttcgccgcgcggatgtaaacggcaaaagccggttgttgcgcgggctcgacggcaacaaagatcagagctacttcctctacacacttggccatgagcagattgcgcaaagtctgttcccggttggcgagctggaaaaaccgcaggtgcgtaaaatcgccgaagatctggggctggtaaccgcaaagaaaaaagattctaccggtatctgctttatcggcgagcgcaaattccgcgactttttagggcgctatctgcctgcgcagccggggaaaatcattaccgttgacggcgatgaaatcggcgagcatcagggtctgatgtatcatacgctcggtcagcgtaaagggctgggaatcggcggcaccaaagacggtagcgaagacccctggtatgtggtggataaagacgttgaaaacaatgtgttaattgtcgcccaggggcatgagcacccacgcctgatgtcggtaggcctcatcgcccagcagctacattgggtcgatcgcgaaccgttcaccggcaccctgcgctgtacggtaaaaacccgctaccgccagaccgatattccgtgcacgattaacgcgctggatgacgatcgtatcgaggtcatttttgacgagccggttgccgccgttacgccgggccagtccgctgtcttttacagcggcgaagtctgcctgggcggcggcattatcgagcagcgactgccgctgacggtc

SEQ ID NO: 37354 - DNA, 1255 bp, Salmonella paratyphi A
atgctggaacaaatgggcattgctgctaaagcggcgtcgtataagctggcgctgctctccagcggcgaaaaaaatcgcgtgctggaaaaaatagccgatgaactggaagcgcaaatggaaagtatcctcagcgcgaacgtacaagatgttgagcaggcgcgagccaatggcctgagcgaagcgatgctggaccgcctggcgctgacccctgcgcgtctgaaagcgattgctgacgatgtgcgccaggtctgtaatctcgccgacccggtcgggcaggtgatcgacggcggtctgctggacagcgggctacgtctggagcgccgccgcgtgccgttgggcgtggttggcgttatctatgaggcacgtccgaatgttaccgttgatgtggcttctttgtgtctgaaaaccggtaatgcggtgattctacgcggtgggaaagagacgcatcgcacgaatgccgcaaccgttcgtgtcattcagaaggcgctgaaagcttgcggtttaccggaggcagcggttcaggcgattgataatccggaccgttcgctggtcaatgaaatgctgcgtatggataagtacatcgatatgctgatccggcggcggcgcaggcttgcataaactgtgccgcgagcaatccacaatcccggtgattaccggcgggattggcgtgtgccatatttttgtcgatagcagcgcagacatgcccccggcgctgaagattatcgtcaacgccaaaacccagcgcccgagcacctgtaatacggtggaaaccttgctggtgcatcaggacatcgcagaacgctttttgcctgtgctgagcaagcagatggcggagagcggcgtaacgttgcatggggatgaaaccgtcatgcaggtactgcatgccctgccaaactggtgccgctgaaaccggaagaactggataacgagtttctgtctctggatctgaacgttgtggtggtcgaaaatatggatgcgctatcggccacattcgcgaacatggcactcagcactccgatgcgattttgacgtgtgatatgcataatgtgcgcgtttcgtgaacgaagtggattccgctgcggtttatgtcaacgcctctacccgttttaccgacggcgggcagtttgggcttggcgcagaagtggcggtcagcacgcagaaattacatgcccgcggtccgatggggcttgaagcgcttaccacctataagtggatcggctttggcgatggtacgattcgtgcgtaattaatgacg

SEQ ID NO: 37355 - DNA, 468 bp, Salmonella paratyphi A
atgatgttcaactggaaaacgatgtttgttggcctgttgctcgtctcgctaattgtttccggtcggctggcaaatcattaccgtgataacgccatctcctacaaagagcagcgcgataacaaggccagtgaactggagaaggcgaacgccaccattactgacatgcagcagcgccagcttgatgctgatgcactcgatgctaaatacacgaaggagttagctgatgagaaagctgaaaatgatgctcttcggcgcaagcttgataatggtggtcgggtgctcgtcaaaggcaaatgtcctgtgccatcctcagccgaaacctccagcgcctccggcatgggcaatgatgccaccgtcgaactctctccagttgctggacgaaacgttctcggtatccgggatggaatcatcagcgaccaaacagcactgagaacgcttcaggagtacatcaggacgcaatgcctgaag

SEQ ID NO: 37356 - DNA, 132 bp, Salmonella paratyphi A
  misc_feature (77)..(77): n=g, a, t or c
gtgatgctgtggtttacggactctcggttcggaaaatcaacggtggccggcgcgctggaagaggcgttacatcagcntggcgtcagtacctacctgttggatgcgataatgtgcgcacggttgtgccggatt

SEQ ID NO: 37357 - DNA, 1089 bp, Salmonella paratyphi A
atgaaaaaacaaaacaatttacgtagtctggcagcacaggccgttgaacaggtcgtcgaacaggggcaatcattaagtaatgtgctcccgccgctgcaacaaaaagtcgctgataaagacaaagcgctacttcaggagctgtgctttggcgtcctgcgcaccctttcacagctggaatggctgatcaataagctgatgtctcgtccaatgaccggcaagcagcgtactgtgcattacttaattatggtcggcttttatcagttgctgtacacccgcgtccctccccatgcggcgctggctgaaaccgttgaaggcgcggtctccatcaaacgtccgcagttgaaagggttaattaacggcgtcctgcgccagttccagcgccagcaggaaacgttgcttaatgagtttgcgaccagcgatgcgcgctttttacatcccggttggctggtaaagcgtttgcaaaatgcttaccccacacagtggcaacgcattattgaagcgaataaccagcgtccacctatgtggctacgtgtaaatcgtacacaccacacccgcgacggttggcttggcttacttgaagacgcaggcatgaagggatatccccatcccgattatcccgacgctgtacgtctggaaacgccagctccggtacatgctttacccggttttgctgagggttgggtaactgtccaggatgcctctgcgcagggatgtgcggtttttcttgctcctcagaacggtgagcacattttagacttgtgcgccgcgcccggcggtaaaaccacgcatattctcgaagtggcccccgaagcagacgtgttggcggttgatattgatgaacaacggctctcccgcgtttacgacaacctaaagcgccttgggatgaaagcgacagttaaacaaggggatggacgttatcccgcccaatggtgcggcgagcagcagtttgaccgtattctgctggatgcgccctgctccgcaaccggcgtcattcgccgtcatccagatatcaaatggctgcgtcgcgatcgcgatatcgcggaactggcgcaattacaggcggaaattcttgataccgtctggccgcgc

SEQ ID NO: 37358 - DNA, 1384 bp, Salmonella paratyphi A
  misc_feature (154)..(154): n=g, a, t or c
atgaaaattatcatactgggcgcagggcaagttggtggaacactggcggaaaacctggtcggcgaaaacaacgacatcacatggttgataacaacgacgaacggttacgcagtttgcaagataagttcgatctacgcgtagtgcagggacatgnttcgcataccagcgtgattgcagaagcgagcgctgacgatgcggaatatgctggtcgctgtcaccagttcagatgaaactaatatggttgcctgtcaggtagactattaactcttcaacaccccaaaccgtatcgcccgcattcgttccccggactatgatgcgatgcggataaactctttcattctgaagcggttccgattgatcatctgatcgcgccggagcagttggttatcgataatatttatcgtctgatcgagtatccgggagcattacaggttgtaaactttgccgaaggaaagtcagtctggcagtagtaaaagcctactatggtggtccactaataggtaacgcgctctcgacaatgcgagcgcatatgccgcatatcgatacccgcgttgccgcaattttccgccatgacagaccaatccgccctcagggctcgactatcgtggaagcaggggatgaagtcttctttattgcggcttcacagcatatccgtgcagtaatgagcgaattacagcgtctggaaaaaccctacaagcgcatcatgctggtgggcggcggcaatatcggtgccgggctggcaaggcgtctggaaaaagactatagcgttaaattgatcgaacgcgatcaacaacgcgccgcagaactggctgagaaactgcaaaacacgatcgtcttttttggcgacgcttccgatcaggaattgctggcggaggagcatattgatcaggtcgatctctttatcgcggtcactaacgatgatgaagccaatatcatgtccgcgatgttggctaagcggatgggcgccaaaaaagtgatggtgctgattcagcgtcgagcttatgtcgatcttgtgcagggtagcgttatagatattgcgatttctccgcagcaggccaccatctctgcattactgagccatgtgcgtaaagcggatatcgtcggcgtttcctcactacgtcgcggggttgccgaagccatcgaagccgtcgcgcacggcgatgaaagcacttcccgcgtggttggccgcgtcattgacgaaattaaactgccgccaggcaccattattggcgcggtcgttcgcggtaatgatgtcatgattgctaatgacaatttgcgcattgaacaaggcgatcacgtcattatgtttttgaccgataaaaagtttattaccgacgtcgaacgtctgttccagccaagtcctttcttcctctaatttaaggcg

SEQ ID NO: 37359 - DNA, 369 bp, Salmonella paratyphi A
atgatccaagaacagactatgctgaacgtcgccgacaactccggtgcacgtcgcgtaatgtgtatcaaggttctgggtggctcgcaccgtcgctacgcaggcgtaggcgacatcattaagatcaccatcaaagaagcgattccgcgtggtaaggtcaaaaaaggtgatgtgctgaaggcggtagtggtgcgcaccaagaagggtgttcgtcgcccggacggttctgtcattcgcttcgatggtaatgcatgcgttattttaaacaataacagcgagcagcctatcggtacgcgtatttttgggccggtaactcgtgaacttcgtaacgagaagttcatgaaaattatctctctggcaccagaagtactc

SEQ ID NO: 37360 - DNA, 252 bp, Salmonella paratyphi A
atgatcgataagatccgtactctgcaggttctcttggttagtcgcgaaatggagaaatcctttgttgttgctatcgaacgttttgtgaacgacccgatctacggtagattcatcaagcgtacgaccagaatgcacgtacatgacgagacaacgaaatgcggtatcggcgacgtggtggaaatccgcgaatgccgtccgctgtccaagaccaaatcctggactctggttcgcgttgtagagaaagcggttctg

SEQ ID NO: 37361 - DNA, 408 bp, Salmonella paratyphi A
atgttacaaccaaagcgtacaaaattccgtaaaatgcacaaaggccgcaaccgtggtctggctgcaggcgcggatgttagcttcggcagcttcggcctgaaagctgttggccgtggtcgtctgactgcccgtcagatcgaagcagcacgtcgtgctatgacccgtgcagttaagcgtcaaggtaagatctggatccgtgtattcccggacaaaccgatcactgaaaagccgctggcagtgcgtatgggtaaaggtaaaggtaacgtggagtattgggttgccttgattcagccgggtaaagtcctgtatgaaatggacggcgtaccggaagagctggcccgtgaagcattcaagctggcagcagcgaaactgccgattaaaaccacctttgtaactaagacggtgatg

SEQ ID NO: 37362 - DNA, 699 bp, Salmonella paratyphi A
atgggtcagaaagtacatcctaatggtattcgcctgggtattgtaaaaccatggaactctacctggtttgcgaacaccaaagaattcgctgacaacctggacagcgattttaaagtacgtcagtacctgacgaaggaactggctaaagcgtctgtatctcgtatcgttatcgagcgtccggctaagagcatccgtgtgactattcacaccgctcgcccgggtatcgttatcggtaaaaaaggtgaagacgtagaaaaactgcgtaaggtcgtagcggatatcgctggcgttcctgcacagatcaacatcgccgaagttcgtaaacctgaactggacgctaaactggttgctgacagcatcacttctcagctggaacgtcgcgttatgttccgtcgtgcgatgaagcgtgctgtacagaacgccatgcgtctgggcgctaaaggtatcaaagttgaagttagcggccgtctgggcggcgcggaaatcgcacgtaccgaatggtaccgcgaaggtcgcgtaccgctgcacactctgcgtgctgacatcgactacaacacctctgaagcgcacaccacttatggtgtaatcggcgttaaagtgtggatcttcaaaggcgagatcctgggtggtatggctgctgttgaacaaccggaaaaaccggctgctcaaccgaaaaagcagcagcgtaaaggccgtaaa

SEQ ID NO: 37363 - DNA, 366 bp, Salmonella paratyphi A
atgtggttacttgaccagtgggcagagcgtcatattatcgaggcacagcgtaaaggcgagtttgataatttgcctggccgtggcgagccgcttattctggatgatgattctcatgtgccggcggaacttcgtgcgggttatcgcttactcaagaatgcgggctgtcttccccctgaactggagcagcgcagagacgctattcagttacttgatatcctcaacagtatccgggaagatgaccctcgataccatcaggttagtcgccagctctccctgcttgaactaaaacttcggcaggctgggttgagtaccgactttttacacggtgagtatgcagaaaaactgctgcataaaatcaacgataat

SEQ ID NO: 37364 - DNA, 330 bp, Salmonella paratyphi A
atggaaactatcgctaaacatcgccatgctcgttcttctgctcagaaggttcgccttgttgctgacctgattcgcggtaagaaagtgtcgcaggctctggatattctgacctacaccaacaagaaagcggctgtactggtcaagaaagttctggaatctgccattgctaacgctgaacacaacgatggcgctgacattgacgatctgaaagttacgaaaattttcgtagacgaaggcccgagcatgaagcgcattatgccgcgtgcaaaaggtcgtgcagatcgcatcctgaagcgcaccagccacatcactgtggttgtgtccgatcgc

SEQ ID NO: 37365 - DNA, 387 bp, Salmonella paratyphi A
atgcgccatcgtaagagtggtcgtcaactgaaccgcaacagcagccatcgccaggctatgttccgcaacatggcaggttcactggttcgtcatgaaatcatcaagacgaccctgcctaaagcgaaagagctgcgtcgcgtagttgagccgctgattactcttgccaagactgatagcgttgctaatcgtcgtctggcattcgcccgtactcgtgataacgagatcgtggcaaaactgtttaacgagctgggccgcgtttcgcagccgcgccggtggttacactcgcattctgaagtgtggcttccgtgcaggcgacaacgcgcgatggcatacatcgagctggttgatcgttcagagaaaacagaagctgctgcagagtaatctgta

SEQ ID NO: 37366 - DNA, 280 bp, Salmonella paratyphi A
atgccacgttctctcaagaaaggtccttttattgacctgcacttgctgaagaaggtagagaaagcggtggaaagcggagacaagaagcccctgcgcacttggtcccgtcgttcaacgatctttcctaacatgatcggtttgaccatcgctgtccataatggtcgtcagcacgttccggtatttgttccccgacgaaatggtcggtcacaaactgggtgaattcgcaccgactcgtacttatcgcggccacgctgctgataaaaaagcgaagaagaaataa

SEQ ID NO: 37367 - DNA, 987 bp, Salmonella paratyphi A
atgcagggttctgtgacagagtttctaaaaccgcgcctggtagatatcgagcaagtgagttcgacgcacgccaaggtgacccttgagcctttagagcgtggcttcggccatactctgggtaacgcactgcgccgtattctgctctcatcgatgccgggttgcgcggtgaccgaggttgagattgatggtgtactacatgagtacagcaccaaagaaggcgttcaggaagacatcctggaaatcctgctcaacctgaaagggctggcggtgagagttcagggtaaagatgaagttattcttaccttgaataaatctggcattggccctgtgactgcagccgatatcacccatgatggggatgtcgaaatcgtcaagccgcagcacgtgatctgccacctgaccgatgaaaacgcgtctattagtatgcgtatcaaagttcagcgcggtcgtggttatgtgccggcttctacccgaattcattcggaagaagatgagcgcccaatcggccgtctgctggtcgacgcctgctacagccctgtagagcgtattgcctacaatgttgaagcagcgcgtgtagaacagcgtaccgacctggacaagctggtcatcgaaatggaaaccaacggcacaatcgatcctgaagaggcgattcgtcgtgcggcaaccatcctggctgaacaactggaagctttcgttgatttacgtgatgtacgtcaaccggaagtgaaagaagagaaaccagaattcgatccgatcctgctgcgccctgttgacgatctggaattgactgtccgctctgctaactgcctcaaggcagaagctatccactatatcggtgatctggtacagcgtaccgaggttgagcttcttaagacgcctaacttgggtaaaaaatctcttaccgagattaaagacgtgctggcttcccgtggactgtctctgggtatgcgcctggaaaactggccaccggcaagcatcgctgacgag

SEQ ID NO: 37368 - DNA, 821 bp, Salmonella paratyphi A
atggcagttgttaaatgtaaaccgacatctccgggtcgtcgccacgtcgttaaagtggtcaacccagagctgcacaagggcaaaccttttgctccgctggttgaaaaaaacagcaaatccggtggtcgtaacaacaatggccgtatcaccactcgtcatatcggtggtggtcacaaacaggcttatcgtattgttgacttcaaacgcaacaaagacggtatcccggcagttgttgaacgtcttgagtacgatccgaaccgttccgcgaacatcgcgctggttctgtacagatgagcgaacgccgttacatcctggccccgaaaggcctgaaagctggcgaccagattcagtctggcgttgatgctgcaatcaaagcaggcaacaccctgccgatgcgcaatatcccggttggttctaccgttcataacgtagaaatgaaaccaggtaaaggcggtcagctggcgcgttccgctggtacttacgttcagatcgttgctcgcgatggcgcttatgtcaccctgcgtctgcgttctggtgaaatgcgtaaagtcgaagcagactgccgtgcaaccctgggcgaagttggcaatgctgagcatatgctgcgcgttctgggtaaagcaggtgctgcacgctggcgtggcgttcgtcctaccgttcgcggtactgcgatgaacccagtagaccacccacatggtggtggtgaaggtcgtaactttggtaagcacccggtaactccgtggggcgttcagaccaaaggtaagaagacccgcagcaacaagcgtactgataaattcatcgtacgtcgccgtagcaaataa

SEQ ID NO: 37369 - DNA, 620 bp, Salmonella paratyphi A
atggcaagatatttgggtcctaagctcaagctgagccgtcgtgagggcaccgacttattccttaagtctgggttcgcgcgatcgataccaagtgtaaaattgaacaagctcctggccagcacggtgcgcgtaagccgcgtctgtctgactatggtgtgcagttgcgtgaaaagcaaaaagttcgccgcatttacggtgtgctggagcgtcagttccgtaactactacaaagaagcagcacgtctgaaaggcaacaccggtgaaaacctgttggctctgctggaaggtcgtctggacaacgttgtataccgtatgggcttcggcgccactcgtgcagaagcacgtcagctggttagccataaagcaattatggtaaacggtcgtgttgttaacatcgcttcttatcaggttagtccgaatgacgttgttagcattcgtgagaaagcgaagaagcagtctcgcgtgaaagccgctctggagctggctgagcagcgtgaaaagccaacctggctggaagttgatgctggcaagatggaaggtacgtacaagcgtaagcctgagcgttctgatctgtctgcggacattaacgaacacctgatcgtcgagctttactccaagtaa

SEQ ID NO: 37370 - DNA, 300 bp, Salmonella paratyphi A
atgattcgtgaagaacgtctgctgaaggtgctgcgcgcaccgcacgtttctgaaaaagcgtctactgcgatggaaaaaaccaacaccatcgttctcaaagttgctaaagacgcgaccaaagcagaaatcaaagctgctgtgcagaaactgtttgaagtcgaagtcgaagtcgttaacaccctggtcgttaaagggaaagttaaacgtcacggacagcgtatcggtcgtcgtagcgactggaaaaaagcttacgtcaccctgaaagaaggccagaatctggacttcgtcggcggcgctgag

SEQ ID NO: 37371 - DNA, 387 bp, Salmonella paratyphi A
atggcaaaggcaccagttcgcgcacgtaaacgtgtaagaaaacaagtctctgacggcgtggctcatatccatgcttctttcaacaacaccatcgtgactattaccgatcgtcagggtaatgcgctgggttgggcaacagccggtggttccggtttccgtggttctcgcaaatcactcgtttgcagctcaggttgcagcagagcgttgcctgacgccgtgaaagaatacggtatcaagaatctggaagttatggttaaaggtccgggtccaggccgcgaatctactattcgtgctctgaacgccgctggtttccgcatcactaatattactgatgtgactccgatccctcataacggttgtcgtccgccgaaaaaacggcggtataac

SEQ ID NO: 37372 - DNA, 600 bp, Salmonella paratyphi A
atggaattagtattgaaagacgcgcagacgctgactgtttccgaaactaccttcggtcgtgatttcaacgaagcgctggttcaccaggttgttgttgcttatgcagctggtgctcgtcagggtactcgtgctcagaagactcgtgctgaagtaactggttccggtaaaaaaccgtggcgccagaaaggcactggccgtgcgcgttcaggttctatcaagagcccgatctggcgttccggtggcgtgaccttcgctgctcgtccgcaggaccacagtcaaaaagttaacaagaagatgtaccgcggcgcgctgaaaagcatcctgtccgaactggtacgtcaggatcgtctgatcgttgtcgagaagttctctgtagaagcgccgaaaactaagctgctggcacagaaactgaaagacatggctctggaagatgtgctgatcatcaccggtgagctggacgagaacctgttcctggccgcacgtaacctgcacaaggttgacgtacgcgatgcgactggtatcgacccggttagcctgatcgccttcgacaaagtcgtaatgactgctgatgctgttaagcaagttgaggagatgctggca

SEQ ID NO: 37373 - DNA, 631 bp, Salmonella paratyphi A
  misc_feature (535)..(535): n=g, a, t or c
atgattgggttagtcggtaaaaaagtggtatgacccgcatcttcactgaagatggcgtctctatcccagtaaccgtaatcgaagttgaagcaaaccgtgttactcaggttaaagacctggctaacgatgctaccgcgctgttcaggttactacgggtgctaaaaaagctaaccgtgtcaccaagccggaagcgggtcactttgctaaagctggcgtagaagctggccgtggtctgtgggaattccgtctggctgaaggcgaagaatacaccgtaggtcagagcatcagcgttgaactgtttgctgacgttaaaaaagttgacgtaaccggtacctctaaaggtaaaggtttcgctggtaccgttaagcgctggaacttccgtacccaagacgctactcacggtaactccttgtctcaccgcgttccgggttctatcggtcagaaccagactccgggcaaagtgttcaaaggcaagaaaatggcaggtcagatgggtaatgagcgtgtaaccgttcagagccttgacgtagtacgncgttgacgtgagcgcaacctgctgctggttaagggtggtgttccgggtgcaaccggttgcgacctgatcgttaaaccagctgtgaaggcgtaaggg

SEQ ID NO: 37374 - DNA, 354 bp, Salmonella paratyphi A
gtggcccgtatagcaggcattaacattcctgatcagaaacacgccgtgatcgcgttaacttcgatctacggtgtcggcaagacccgttctaaagccatcctggctgcagcgggtatcgctgaaaatgttaagatcagtgagctgtctgaagaacaaatcgacacgctgcgtgacgaagttgccaaatttgtcgttgaaggtgatctgcgccgtgaaatcagcatgagcatcaagcgcctgatggatcttggttgctatcgcggtttgcgtcatcgccgtggtctcccggttcgcggtcagcgtaccaagaccaacgctcgtacccgtaagggtccgcgcaaaccgatcaagaaa

SEQ ID NO: 37375 - DNA, 349 bp, Salmonella paratyphi A
tggagctctggtctcatgcagaaccaaagaatccgtatccgcctgaaagcgtttgatcatcgtctgatcgatcaatcaaccgcggaaatcgtcgagactgccaagcgcactggtgcgctagggtatcgcggtccgatcccgctgccgacccgcaaagagcgctttaccgttctgatctctccgcacgtaacaaagatgcgcgcgatcagtacgcaacattcgcactcacaagcgtctggcttgacatcgttgagaccaaccacgagaaaacccgtgatgctctgatgcgtctgcgacctggctgccgggtgtagacgtgcagatcagcctgggttaatcaggtcatcga

SEQ ID NO: 37376 - DNA, 1284 bp, Salmonella paratyphi A
atggctaaacaaccgggattagattttcaaagtgccaaaggtggcttaggtgagctgaaacgcagactgctgtttgttatcggcgcgctgattgtgttccgtattggctcttttattccgatccctggtattgatgccgctgtacttgccaaactgcttgagcaacagcgaggcaccatcattgaaatgtttaacatgttctctggtggtgctctcagccgtgcttctatctttgccctggggatcatgccgtatatttcggcgtcgatcattatccagctgttgacggtggttcatccaacgctcgcagaaattaagaaagaaggggagtctggtcgtcgtaagatcagccagtacacccgttacggtactctagtgctggcgatattccagtcgatcggtattgctaccggtttgccgaatatgcctggtatgcagggcctggtgatgaatccaggctttgcattctatttcaccgctgttgtaagtctggttacagggaccatgttcctgatgtggctcggcgaacagattactgagcgcggtatcggtaacggtatctcaatcatcatcttcgctggtatcgttgcgggactcccgccagccattgcccatactatcgagcaagcgcgtcaaggcgacctgcacttcctcgtgttgctgttggttgcagtattagtatttgcagtgacgttctttgtagtattcgttgaacgtggtcaacgccgtattgtggtaaactacgccaaacgtcagcaaggtcgtcgtgtctatgctgcacagagcacacatttaccgctgaaagtgaatatggcgggggtaatcccggcaatcttcgcttccagtattattctgttcccggcgaccatagcgtcatggttcgggggcggtactggttggaactggctgacaacaatttcgctgtatttgcagcctgggcaaccgctttatgtgttactctatgcgtctgcaatcatcttcttctgtttcttctacacggcgttggttttcaacccgcgtgaaacagcagataacctgaagaagtccggtgcatttgtaccaggaattcgtccgggagagcaaacggcgaagtatatcgataaagtaatgacccgcctgaccttggttggtgcgctgtatattacctttatctgcctgatcccggagttcatgcgtgatgcaatgaaagtgccgttctacttcggtgggacctcactgcttatcgttgttgtcgtgattatggactttatggctcaagtgcaaactctgatgatgtccagtcag

SEQ ID NO: 37377 - DNA, 432 bp, Salmonella paratyphi A
atgcgtttaaatactctgtctccggccgaaggctccaaaaaggcgggtaaacgcctgggtcgtggtatcggttctggcctcggtaaaaccggtggtcgtggtcacaaaggtcagaagtctcgttctggcggtggcgtacgtcgcggtttcgagggtggtcagatgcctctgtaccgtcgtctgccgaaattcggcttcacttctcgcaaagcagcgattacagccgaagttcgtctgtctgacctggcgaaagtagaaggcggcgttgtagacctgaacacgctgaaagcggcaaacattatcggtatccagatcgagttcgcgaaagtgatcctggctggcgaagtcactactccggtaactgttcgtggcctgcgtgttactaaaggcgctcgtgctgctatcgaagctgctggcggtaaaatcgaggaa

SEQ ID NO: 37378 - DNA, 503 bp, Salmonella paratyphi A
atggctcacatcgaaaaacaagctggcgaactgcaggaaaagctgtatcgctaaaccgcgtatctaaaaccgttaaaggtggtcgtattttctccttcacagctctgactgtagtaggcgatggtaacggtcgcgtaggttttggttacggtaaagcgcgtgaagttccagcagcgatccagaaagcgatggaaaaagcccgtcgcaatatgattaacgtcgcgctgaacaacggcaccctgcagcacccggttaaaggtgttcacacggggtctcgtgtattcatgcagccagcttccgaaggtaccggtatcatcgccggtggtgcaatgcgcgccgttctggaagttgctggggttcataacgttctggctaaagcatacggttccaccaacccgatcaacgtggttcgtgcaactattgatggcctggaaaatatgaattctccagaaatggtcgctgccaagcgtggtaaatccgttgaagaaattctggggaaataa

SEQ ID NO: 37379 - DNA, 531 bp, Salmonella paratyphi A
atgtctcgtgttgctaaagcaccggtcgttgttcctgccggcgttgatgtcaaaatcaacggtcaggttattacgatcaaaggtaaaaacggcgagctgactcgtactctcaacgatgctgttgaagttaaacatgcagataatgcactgaccttcggtccgcgtgatggttacgcagacggttgggcacaggctggtaccgcgcgtgccctgctgaactcaatggttatcggtgttaccgaaggcttcactaagaagctgcagctggttggtgtaggttatcgtgcagcggttaaagggaatgtagtaaacctgtctttaggtttctctcacccggttgaccatcagctgccggcaggtatcactgctgaatgtccgactcaaactgaaatcgtgctgaaaggcgctgataagcaggtgatcggccaggttgcagcagatctgcgcgcctaccgtcgtcctgagccttacaaaggcaagggtgttcgttacgccgacgaagtcgtgcgtaccaaagaggctaagaagaag

SEQ ID NO: 37380 - DNA, 468 bp, Salmonella paratyphi A
gtgggcgaagaagttgaaatcgttggtatcaaagagactcagaagtctacctgtactggcgttgaaatgttccgcaaactgctggacgaaggccgtgccgtgagaaacgtaggtgttctgctgcgtggtatcaaacgtgaagaaatcgaacgtggtcaggtactggctaagccgggcaccatcaagccacacaccaagttcgaatctgaagtgtacattctgtccaaagatgaaggcggccgtcatactccgttcttcaaaggctaccgtccgcagttctacttccgtactactgacgtgactggcaccatcgaactgccggaaggcgtagagatggtaatgccgggcgacaacatcaaaatggttgttaccctgatccacccgatcgcaatggacgacggtctgcgtttcgcaatccgtgaaggcggccgtaccgttggcgcgggcgttgttgctaaagttctgggc

SEQ ID NO: 37381 - DNA, 390 bp, Salmonella paratyphi A
atgagcatgcaagatccgatcgcggatatgctgacccgtatccgtaacggtcaggccgcgaacaaagctgcggtcaccatgccttcctccaagctgaaagtggcaattgccaacgtgctgaaggaagaaggttttattgaagattttaaagttgaaggcgacaccaagccggaactggaactgactcttaagtatttccagggtaaagctgttgtagaaagcattcagcgtgtcagccgcccaggcctgcgcatctacaaacgtaaagatgagctgccgaaagttatggccggtctgggtatcgcagttgtttctacctctaaaggtgttatgactgatcgtgcagcgcgccaggctggtcttggtggcgaaattatctgctacgtagcc

SEQ ID NO: 37382 - DNA, 303 bp, Salmonella paratyphi A
atggctaagcaatcaatgaaagcacgcgaagtaaaacgcgtagctttagctgataaatacttcgcgaaacgcgctgaactgaaagcgatcatctctgatgtggacgcaaccgacgaagatcgttggaatgcggttcttaagctgcagactctgccgcgtgattccagcccgtcacgtcagcgtaaccgctgccgtcaaactggtcgtccgcacgctttcctgcggaagttcgggttgagccgtattaaggtccgtgaagccgctatggcggctgaaattccgggtctgaaaaaggctagctgg

SEQ ID NO: 37383 - DNA, 537 bp, Salmonella paratyphi A
atggcgaaactgcatgattactacaaagacgaagtagttaacaaactcatgactgagtttaactacaattctgtcatgcaagtccctcgggtcgagaagatcaccctgaacatgggtgttggtgaagcgatcgctgacaagaaactgctggataacgcagcagcagacctgacagcaatctccggtcaaaaaccgttgatcaccaaagcacgcaaatctgttgcaggcttcaaaatccgtcagggctatccgatcggctgtaaagtaactctgcgtggcgaacgcatgtgggagttctttgagcgcctgatcactattgctgttcctcgtatccgtgacttccgtggcttgtccgctaagtcattcgacggtcgtggtaactacagcatgggtgtccgtgagcagatcatcttcccagaaatcgactacgataaagtcgaccgcgttcgtggtttggatattaccattaccactactgcgaaatctgacgaagaaggccgtgctctgctggctgcctttgacttcccgttccgcaag

SEQ ID NO: 37384 - DNA, 312 bp, Salmonella paratyphi A
atggcagcgaaaatccgtcgtgatgacgaagttatcgtgttaaccggtaaagataaaggtaaacgcggtaaagttaagaatgtcctgtcttccggcaaggtcattgttgaaggtatcaacctggttaagaaacaccagcaagcggttccggctctgaaccaaccgggcggcatcgttgaaaaagaagctgcaattcaggtttctaacgttgcaatcttcaatacggcaaccggcaaggctgaccgtgtaggctttagattcgaagacggcaaaaaagtccgtttcttcaagtctaacagcgaaactatcaag

SEQ ID NO: 37385 - DNA, 816 bp, Salmonella paratyphi A
atggaaatctatgctgtttttggaaatccgattgcgcacagcaaatcgccatttattcatcagcaatttgctcagcagctagatattgttcacccctatggtcgcgtgctggcccctattaataatttcattaatacgcttgatgcctttttcgcggcagggggaaaaggcgcaaacatcacagtaccttttaaagaggaggcgtttgcgcgttcggatgagttaacggaacgagcatcgctggcgggagccgtcaatacattaaaacggctggaagatggtcgtttgcttggcgacaatactgacggtatcggtttattaagcgatctcgaacgtttaaattttatccgcccaggattgcgtattttgctgattggcgcgggcggcgcatcccggggcgtgctgttacccctgctttctttggattgcgcggtcactatcactaaccgtacagcttcacgtgccgaagcgttggcgaaaatctttgctcataccggcagcgttcatgccacggatatggacaagctggatggttgtgagtttgacctgattattaatgcgacctccagtggcatacggggcgaaatcccggcgattccggcgtcacttattcacccttccctctgttgctatgacatgttctatcaaaaagggaatacgccatttctctcctggtgtgtacaacagggcgcaaaacgctacgcagatgggctgggaatgctggtggggcaggctgcacatgccgttttgctttggcacggtgtattaccgcaggtcgagccagtgattgagctgctacagcaggaattattagcg

SEQ ID NO: 37386 - DNA, 1680 bp, Salmonella paratyphi A
ggcctgatacgcctgccgtcgcgccaacgcaggcgcaggagctctcttttgccgagcaaatcgtatcagaagccagctcagtcattgcgatactggatagtcggggaaaaatctgtcgatttaatcggttatgcgaagagtacacgggcttaaaagagcgagatgtaattggtcaaagcgtctttaaattatttatgagtcgccgggacggttgcctcccgacactacattgagaatttttttcgcaatggcaatgcctatgaaatcgaacgctggataaagactcgtaaaggccaacgcctgttcttatttcgtaataaatttgtccataacggtagcggaaaaaacgaaattttcctgatctgcgcaggcacggatatcaccgaagaaaggcggactcaggagcgtttacgcatactggcgaatacagacaccgtcaccggcctgcccaatcgcaatgctattcatgaatttattaatcatgctattgcctcggctggcgagtcgcaggtgggtatcgtttatctcgatctggataacttcaagaaaattaatgacgcctatgggcatatgtttggcgatcagctcttacaggccgtttcactggcgctgttgagttgtctggaggaagatcaattgctggccagactggggggagatgaattcattgtcctcgctgcccatacgtctcaggccgcgctggaagcagtagcctcacgaatccttacccgtctgcggcaaccgtttcgtattggactcatcgaagtttacacgggatgcgccattggcatttcgttggccccccggcacggacaggacagcgaaagtctcattcgcactgccgacaccgcaatgtataacgccaaagaaagcggccgcggtcagttctgcgttttttcgccggaaatgaatcagcgcgtatttgactatcactggctggatacaaacctgcgaaaagcgctggaaaacgaccagttacttattcactatcagcccaaaattacctggcgcggcgaagtacgtagcctggaagcgctggtacgctggcaatcgccggaacgcggattaattccgccgctggagttcatctcatacgccgaagagtcaggactcatcgtgccgctgggccgctgggtgattctggatgtggttcgccagattgcgaaatggcgcgataaggggattaacttgcgcgtcgccgttaacttttcggcgcgacaactggccgaccagacgctttttactgcgcttaaacaggctttgtacgatctgaattttgagtattgcccgatcgatgtcgagctaacggaaagctgcctgatcgaaaacgacacgctggcgctatcggttatccagcaatttagtcagctcggcgcccagattcatctggatgattttggcaccgggtattcttcgctttctcaactcgcccggttccctattgatgccgttaaactggatcaggctttcgtcagagatatccataagcaaccgctgtcgcaatctctggttcgggcgattgtcgcggtggctcaggcgctaaatttacaagtgattgccgaaggcgtagaaaatgctaaagaagatgccttcctgacaaaaaacggcgtcaatgaacgacagggctttttattcgccaaacctatgcccgccgtttcttttgaacgctggtacaaacgt

SEQ ID NO: 37387 - DNA, 2037 bp, Salmonella paratyphi A
  misc_feature (16)..(16): n=g, a, t or c
  misc_feature (334)..(334): n=g, a, t or c
  misc_feature (1253)..(1253): n=g, a, t or c
  misc_feature (1304)..(1304): n=g, a, t or c
atgtttcaggacatantcacgtagcgcagcttaaacagcaactgcattcccagacgccgcgcgctgaaggggtcgtaaaagccacggaaaaaggctttggcttccttgaggttgacgcgcaaaaaagctacttcattcctccgccgcagatgaaaaaagtgatgcatggcgatcgtatcgtcgcggtcatccacacggaaaaagaacgggagtctgccgagccggaagaactgatcgaaccgttcctgacgcgttttgtgggaaaagttcagggtaaaaatgaccgcctgtccatcgtgccggatcatccgttgctgaaagacgcgatttcccnctccgcgcggcgttcagcatgagttcaaagaaggtgactgggcggttgccgaaatgcgccgccatccgcttaaaggcgaccgttcgttttacgccgatttaacgcagtacatcacctttgccgacgatcactttgttccctggtgggttacgcttgcccgccacaacctggaaaaagaagcgccgaacggcgtagcgacggagatgctggacgaagggctggagcgccaggatctgaccgcgctgaatttcgtcactatcgatagcgccagcactgaagatatggatgacgcgctttatgctgaggaattagcggacggcagactccagcttacggtggctatcgccgatcctaccgcctggattgccgacagtaagctggataacgcagcgaaaattcgcgccttcaccaactacctgccgggcttcaatattcctatgctgccgcgtgacgtgtctgacgatctgtgctcgctgcgccaacgaagtgcgtccggcgctcgctgtcgcatgatcatcgccgcggacggcaccattgacgatgatattgccttttttgcggccacgatcgaatcgaaggccaagctggtgtacgacaatgtctccgactggctggaaaataacggcacctggcagccggagaacgaaggcattgcccagcagattcgtctgttgcaccgtatttgtctaagccgcagtgagtggcgtcatcatcatgcgttagtctttaaagaccgcccggattaccgctttgtgcttggcgaaaaaggcgaagtactggatattgtggcggaaccggccggtatcgctaaccgtatcgtagaagagtcgatgatcgccgctaatcctttgtcgccgcgctattctagcgattataggcttcaggttctcggcttatttacaatcgttacatcacgggnctttcgactcctcgcgaaattctcgaatgcgcttgtgccgcctctgtctgnaattaacgatcatgtgctctgtcaatgtctcgatcgctggaagaaggttgtctgtacgcttggtaagggctttctgttaaatctgtcgtacgcgtattcttagtgatgcgcagcactcacgcgttttctcttgtatcagccggcattgcgttcgtctttccagctctttttgccggataatcatgcaccgatgccggggccgtcaatttcggctcttggatcttgagagcttacgcatcctggtacttctcctattccgtaagtatgtgcgatatgattaaccatcgcctgctgataggtttcatcaagtgagaagctattgcgctgttcgcgaatgattatcacccaacaaatggcggaacgtcgccctgtaaatcgcatgggcgcgcgtatgtacgcgactggtttatatgcacgcttccttaacgataaggcggggacaaatacccgttttcgcggcagaaattattgacgtcagccgcggtggtatgcgcgtgcgactggtcgataaacggcgatcgcctatatccctgccccattcctgcacgccgttcgcgatgaactggtatgcagccaggaaaacggtacggtacagattaaaggtgagacggtttataaagtgacggatgtcattgatgtcactattgcggaagttcgcatggaaacccgcagcattattgcccgaccggcagcgtaaccacgcttagctcgcttcaacgcctttgctgagaag

SEQ ID NO: 37388 - DNA, 1141 bp, Salmonella paratyphi A
ggaaaccctatggaacaatgccgaaaagcgggtaaaagccactggtatcatgaaacacaatccactatctcgtcacaaactccgctttcgctgatgccggaagccgcgtatgttaacgatcgatttttactggatttagcggtagcagaaaccgcgttgtcgccttttgagtcatggttaaagccagctcgccagttggcggatgtcttatttccccgcacggttctcaacgaccggcttcatacgtttagcgcctatgaacgtatgagcaccgcccttaccgccgctcaggtatttggggttcagcgtttgtgccgccattatgccgcacgtctggcgccgctacccggccctgacgcctcaagagaaagcaatcaacggctggcgcaaattacgcaatacgctcgtcagcttgccggctccccctccgttatcaatacgcgagcccgcgaacagcttgcagaggtgggattaaccgcccgggataccgtactcatcaatcagatcattgggtttatcggttttcaggcgcgagtagcggcgatatttcaggcgttttgccgtctgcccgtgcgcgagctgcccggccaggagatgcagcgctttgccagggccgcgcggtttcaaaacccccagacgacatggcggcccgccgccagtctggtagaatatcctctcgcccataccaaagttcggcggcaatattcgtcttcacaatgccaaataatggcgccggtactcatgcgcgatccgtcttcattcgcgttactcgaacgcatactgaccagcacattacacactgcgtcgcccccttctttacttccacttatcacgctcctcacatcacgtatcaacggcagcgccgcctgctttaacgaacaggcaacccaacctggcgtggcgccgtgctgtcatcacgttacgccaggaagacgacgacatcgctcgttgggaacttgagcccgcgctgacacaggcgatacaatggctcaccagagcgcccgatcactttagcgccgcgcattttttcccgctactcaccaggggagtttcatcggagcaggccattaatatgttaggctggtgtggcgtgtgcggatggttaaatcgtttaaaaatcgcgttgggcgaaacctattaa

SEQ ID NO: 37389 - DNA, 804 bp, Salmonella paratyphi A
  misc_feature (289)..(289): n=g, a, t or c
  misc_feature (582)..(582): n=g, a, t or c
atgggttttctttccggtaagcgcattctggtcactggcgtggcagtaaactgtccatcgcctacggtatcgcacaggcgatgcaccgcgaaggagctgaactggcgttcacctaccagaacgacaaactgaaaggccgcgtagaagaatttgctgcccagctggttccacatcgttttaccgtgtgatgtcgctgaagatgccagcattgacgctatgtttgcggacggggtaacgtttggccgaaatttgacggtttcgtacactcgatcggtttcgcgcctggatncagctggacggcgattatgttaatgcagttacccgcgaagctttaaaatcgctcacgatattagctcttacagttttgttgccatggcgaaagctgccgcaccatgctgaatccgggttctgcgctgttgaccttgtcttatctgggagcgggcgcgccagtcccgaactacaatgtcatgggtctggcgaaacttctctggaagctaacgtgcgttatatgtgaaatgcaatggggccggaagttgcgcgttcaacgccatctctgcgggctcaatccgcacgctggcgctnccggttattatagacttccgtaatatgctggcgcattgtgaagccgttacgccaattcgtcgcaccgtgaccattgaagatgtgggtaactcagcagcgtctctgtgttccgatctctcggcaggcatttctggcgaagtcgtccatgttgacggcgggttcagcattgcggcaatgaatgaactggaactgaagtaagcgcattaagtttattagcgggcg

SEQ ID NO: 37390 - DNA, 808 bp, Salmonella paratyphi A
atggtggaaactctgcttgaagtgcgcaacctgagtaaaacctttcgctaccggacaggatggtttcgccgccagaccgtagacgccgtgaaaccattaagctttacgcttcgtgagcgtcagactctggccattatcggcgaaaacggttccggcaaatccacgctggcaaagatgctggccggcatgattgaacccaccagcggcgagcttcttattgacgatcatcccctgcattacggcgactattcatttcgaagccaacgtattcgaatgatttttcaggacccctcaacgtcactgaatccacgtcaacgtatttcacagattcttgacttccccctgcgccttaataccgatctggagccggaacagcggcgcaaacagattgtcgagacgatgcgtatggtgggctattgcccgatcacgtgagctactacccgcatatgctggcgccgggacagaaacaacgtctgggtctggcccgcgcgctgattttacgcccaaaagtcattatcgcggacgaagcgctgcgtcgcttgatatgtccatgcgctcgcagctcatcaatctgatgcttgaattgcaggaaaaacaaggcatctcctatatctacgtcacgcagcatatcggcatgatgaaacatattagcgatcaggtattagtgatgcatcagggggaagtggttgaacgcggcagcaccgccgatgtgctcgcctctccgctacatgagcttacccgccgtttaatcgcaggccattttggcgaggcgctgaccgctgacgcatggcgaaaggatcgctaagcg

SEQ ID NO: 37391 - DNA, 765 bp, Salmonella paratyphi A
atgctttcaattgcgacgcaccgcgcaggagccgccctgttgcttatcatgccgcttgccgtatgggtatcaggctggcagtggcagccaggacatcaggtctggtggctaaaaacgctattctggataacggaaaccgtgaccaaaccctggggcgttatcacgcatgtgattctttgtggatggttcttatggtgcctgcgatttcgcctgcgcgccgccattatgctgtttgcgattctcggcggggcgattatcgtcgggcagggcgtgaagtcatgggtaaaggagcgcgtacaggagcctcggccatttgtggtctggcttgaaaaaacgcaccatattcccgtcgatgagttctacactttaaagcgtacagaacgcggacatttagtgaaagagcagttggccgggcaacagaacattcccgttttcctgcgtcagcacttggcaaaaagagacgggctttgcgtttcctccggacacaccatgtttgcagcgagctgggcgcttttggccgtgggtctgttatggccgcgcagacggactttcaccatcgcgtttttgtttgtctgggcgaccggcgtaatgggcagccgtttgcttctgggaatgcactggccgcgagatttagtggtcgccacgctcatctcctggctattagttaccctggcgacctggctggcgcagcgaatttgcgggccgcttatgccgcctcgtgaagaagcgcaagaaattgctgaacgcgagcaggaaagctgacaa

SEQ ID NO: 37392 - DNA, 177 bp, Salmonella paratyphi A
atgtctgatatcgaagcacaacgaattgccgcacgcattgataccgtgctggatatccttgttgctggcgattaccactcggccatcaataaccttgaaatattgagagcagagctgttagatcaggttaaagacggtatctcgccatcccaggcacccgggtcgccctgggaaatc

SEQ ID NO: 37393 - DNA, 186 bp, Salmonella paratyphi A
ttgccattgcaggaagccagcaaaaacctcgcctctttgtgtggagttaagcagccaactgtatggcgttggttacatggtggcggcattgacgctaagtatgtggcagcaatcgtaaaagctacaggaggaagaattaaagccagagaacttcgtcctgatttagccgacttactggcagcaagt

SEQ ID NO: 37394 - DNA, 365 bp, Salmonella paratyphi A
atggataagaaatctgctcgtaatcccgtcgtgcgacccgcgcacgtcgcaagctcaaagagctgggcgcaactcgcctggtagtacatcgtaccccgcgtcatatttacgcacaggtaattgcaccgaacggttctgaagttctggtagctgcttctactgtagaaaacgtatcgctgaacaactgaagtacaccggtaacaaagacgcggctgcagctgtgggtaaacgtgtgctgaacgcgctctggaaaaaggcatcaaagatgtgtcctttgaccgttccgggttccaatatcatggtcgtgtccaggcactgcagatgctgcccgtgaagctggccttcagttctaaggtagaggtgta

SEQ ID NO: 37395 - DNA, 639 bp, Salmonella paratyphi A
gtggccgctgtcaggacgggaacgctatttgcgctggggttgaactacgccgatcacgccagcgagctggatgttacgccgccgaaagagccgctggtatttatcaaagcgccaaacacctttaccgaacatcaccaaacgtcggtgcgcccgaacaacgtcgaatatatgcactatgaagccgaactggtcgtggtgattggcaaaacggcgcgtaaggtgagcgaagccgaagccatggagtatgtggccagttacaccgtctgtaacgactacgcgatccgcgactatctggaaaactactaccgtccgaatctgcgggtaaaaagccgcgacggcctgacgccgataggcccgtggattgtggataaagaggcggtttctgatccgcataacctgacgttacgcacctttgttaacggtgagctgcgccaggaagggacgaccgccgatctgatcttcagcatcccgttcctgatttcttatctgagcgaatttatgacgttgcaaccgggcgacatgattgccaccggtacgccgaaagggctgtccgatgtggtgccgggggatgaagttgttgtggaagtagaaggcgtgggtcgcctggttaaccgaatcgtcagtgaggagagcgcaaaa

SEQ ID NO: 37396 - DNA, 309 bp, Salmonella paratyphi A
ttgctatcgtactatatgctaaatagatcttatatttattccaccagtagtgctcgttttatcaacaaggattttgaaatgtttaaatttgtaaaaattgccgttgtggcaggggttctggcgacgctcactgcttgtactggtcatatcgaaaacaaaaaaataactgcagctacgattattttctgcaccctgcaatttctatttctaaaattattggcggttgcggcccggctgccgatcaataatagaaacgactgcgcagatacaaaaaaaccgggattttcccggtttttttacaggtctgat

SEQ ID NO: 37397 - DNA, 2516 bp, Salmonella paratyphi A
gcggaaaactatttcaacccggcatttctgtctgacgacccgtctgcggtggccgacttatcgaccttttcccgtaatgcccaggcggcgggaatgtatcgcgttgacgtttacctgaacaatacgtttctcgcgaccagagacattgccttccaggcggtgaagacgacgggaaaaagcgcgcccaccgatgacagcggattacgcgcctgcctgacgcctgaaatgcttaaaaatatgggggtaaacaccggggcatttccactgttggcgaaggcggcggcgggaagttgtccggatctcgccagtgcgataccggccgcccggacccgctttgattttgcgcagcaacgtctcgacattagcatcccgcaggcggcgatggttgccagcgccagaggctatatcccaccgcaatactgggatgaaggtattaacgcgttgctatttaattacacctttaccggcgcgaatagtcaggatcggagcctggcggcagtgcggagaacagctattttcttggattgaatagcggccttaatctgggggcctggcggttacgcgactactccacatggaacgcgaatagcggcgatcagaatagcgacagcgactggcagcacatcagtactcatctggaacgtgatgtggtctttttgcagggagaactgacggcaggcgatagttataccccctccgcattattcgacagccttccttttcgcggactacaactggcgtctgacgacaatatgttgccagacagcatgaagggcttcgcgccgaccattcacggcattgccagaagcaacgcgcaagtgaccattcggcaaaacggctacatcatcaatcagcgctatgtgccgcccggggcatttactattaatgatctctatcctaccgccgccagcgtcgatttgactgtggaagtcaaagagtccgacggttctattaatcgctataacgtgccctattccgccgtgccgattctacaacgagaagggcggctgaagtatgcggcgacggtggcggagtatcgcagcgatagtagtcaaaaagagaaggtgaaattcagtcaggcgaccttgatatgggggttaccgcatggttttacgctgtatggcggaacacaactttccagtcattatcacgcgctggcgatcggcagcggcgcaaatctgggcgactggggcgcggtgtcgctggatgtcacccaggctaccagtacgctggcggataataacacctaccaggggcaatcgctgcgtttcctgtatgccaaatcgcttgcacagtcaggaaccaatttacagcttatgggttatcgctattcaacctcgggcttttatacgctggatgataccacgtggaaacggatgagcggctatgacgatgacaatcggactgacagcgataaaagcaggccggaatgggcggattattacaatctttattataccaggaggggcaaagtacaactcgatatcaatcaacagctaggcgggttgggatcgctttttattaccggcagtcagcaaagttactggcacactgatgaaaaggattctttgttgcaggtgggatacagcgatacgctggcgggtattgcatggagcgtttcttacaacaataacaaatcgcaggcgatgcggagcgcgatcaaattttcgccctgaatatctcggtgccgctaagtcaatggctgcaacatgatgatgaggtcacgcaccatcacaatgtttacgctacctttagcaccagtacggacaaacagcataacgttacgcagaatgcggcgttagcggcacactactggacgaaaacaatcttagttacaacatacagcaaggctatcagaatcacggtattggcgaaacggcgccgccagcctggaatacgatggggcgaaaggcaacgccaatattggctataacgttagcgataacggcgattaccagcaggtgaattatggcctgagcggcggcctggtggcgcacgcgcatggagtgacgctaagccagccgttaggcaataccaatattttgattgccgcgccgggcgcagccaatgtcggcgttgtcgaccagccgggtattcatacggacgcgcgtggctatgcggtggtgccgtatgcgacgacatatcgccaaaaccgtatggcgctggacgttaacgccatggctgatgatgtcgatattgatgacgcggtgactcgcgttgtgccgaccgaaggcgcgctggttctggcccgctttaaagcgcgagtcggcgtgcgtgccctggtaacgctgaatcataatggtaagcctgtaccctttggcgcaacggtgacggtgaatgatcgccatgcggaggcgattgttgacgaggccggggaggtctatctttccgggttgtcagcgcaaggcgttctgcacgttcgctgggggaacctgccggatcaacagtgcgtcgcgtcctatcatctctcttcctcccgtcagattctgagtcgacaacatgcggagtgtcattaa

SEQ ID NO: 37398 - DNA, 126 bp, Salmonella paratyphi A
  misc_feature (94)..(94): n=g, a, t or c
atgaaagcaaaagagctgcgtgagaagagcgttgaagagctgaacaccgagctactgaacctgctgcgtgagcagttcaacctgcgtatgactngtcaagtggccagctgcaacagtctcacctgt

SEQ ID NO: 37399 - DNA, 1428 bp, Salmonella paratyphi A
atggataatattgataataagtataatccacagctatgtaaaatttttttggctatatcggatttgattttttttaatttagccttatggctttcattaggatgtgtctattttatttttgatcaagtacagcgatttattcctcaagaccaattagatacaagagttattactcattttattttgtcagtagtatgtgtcggttggttttggattcgtttgcgacattatacataccgcaagccattttggtatgagttaaaagaaatttttcgtacgatagttatttttgctatatttgatttggctctgatagcgtttacaaaatggcagttttcacgctatgtctgggtgttttgttggacttttgccataatcctggtgcctttttttcgcgcacttacaaagcatttattgaacaagctaggtatctggaagaaaaaaactatcatcctggggagcggacagaatgctcgtggtgcatattctgcgctgcaaagtgaggagatgatggggtttgatgttatcgctttttttgatacggatgcgtcagatgctgaaataaatatgttgccggtgataaaggacactgggactatttgggatttaaatcgtacaggtgatgtccattatatccttgcttatgaatacaccgagttggagaaaacacatttttggctacgtgaactttcaaaacatcattgtcgttctgttactgtagtcccctcgtttagaggattgccattatataatactgatatgtcttttatctttagccatgaagttatgttattaaggatacaaaataacttggctaaaaggtcgtcccgttttctcaaacggacatttgatattgtttgttcaataataattcttataattgcatcaccacttatgatttatctgtggtataaagttactcgagatggtggtccggctatttatggtcaccagcgagtaggtcggcatgaaaaactttttccatgctataaatttcgttctatggttatgaattctcaagaggtactaaaagaacttttggctaacgatcctattgccagggctgaatgggaaaaagattttaaactgaaaaatgatcctcgaatcacagctgtaggtcgatttatacgtaaaactagccttgatgagttgccacaactttttaatgtactaaaaggtgatatgagcctggttggaccacgacctatcgtttcggatgaactggagcgttattgtgatgatgttgattattatttgatggcaaagccgggcatgacaggtctatggcaagtgagtgggcgtaatgatgttgattatgacactcgtgtttattttgattcctggtatgttaaaaactggacgctttggaatgatattgccattctgtttaaaacagcgaaagttgttttgcggcgagatggtgcgtat

SEQ ID NO: 37400 - DNA, 1407 bp, Salmonella paratyphi A
atgtccaagcaacagatcggcgtcgtcggtatggcagtgatggggcgcaacctcgcgctcaacatcgaaagccgtggttataccgtctccgttttcaaccgctcccgtgaaaagaccgaagaagtgattgccgagaatcccggcaaaaagctggtgccttattacacggtgaaagagtttgttgaatccctcgaaacgcctcgtcgtatcctgttaatggtgaaagcgggcgcaggtactgatgcagctatcgattcgctgaaaccgtatctggaaaaaggcgatatcattattgatggcggtaacaccttcttccaggacacaatccgtcgcaatcgcgagctgtctgcggaaggttttaactttatcggtaccggtgtttccggtggtgaagagggcgcgctgaaagggccatctatcatgcctggcggtcagaaagatgcctatgaactggtggcgccgatcctgacgaagattgctgctgtggcagaagatggcgaaccgtgcgtgacctatatcggcgccgatcgcgtgtcactacgttaagatggtccacaatggtattgaatatggcgatatgcagcttatcgctgaagcttactccttgctgaaaggcggcctgaatctcagcaatgaagagttggcgaacacttttactgagtggaataacggcgagctgagcagttatctgatcgacatcactaaagacatcttcactaaaaaagatgaagacggtaattacttggtagatgttattcttgatgaagccgccaacaaagggaccggtaaatggaccagccagagcgcgctggatctgggcgaaccgctgtcgctgattaccgaatccgtctttgcgcgttacatctcttcgctgaaagcgcaacgtgttgccgcatctaaagtgctctccgggccgaaagcgcagccggcgggcgacaaagcggaatttatcgagaaagtgcgtcgcgcgctgtatcttggcaagatcgtctcctatgcgcagggcttctcgcagctacgcgccgcgtctgatgaatatcactgggagcttaactacggcgagattgctaagattttccgtgcgggctgtatcattcgcgctcagttcctgcagaagatcaccgatcttacgcagaaaacgccggtatcgctaacttgctgttagcgccttacttcaagaaaattgctgatgagtaccagcaggcgctgcgtgatgttgtggcttacgcggtgcagaatggcattccggtgccgacattctctgcggcagtggcctactatgacagctatcgcgccgcagtactgccagctaacttaattcaggcgcagcgtgactactttggtgcgcacacctataaacgtactgataaagaaggcattttccataccgagtggttggaataattt

SEQ ID NO: 37401 - DNA, 390 bp, Salmonella paratyphi A
gtgcatcataaccctttccttattaaagccccttcctcgggaggggctttcccgtttcagccccttgctgacatcgcgattgttggtgagtggcctgtctggcgcaagggctttctcccgccgattttgcgttactggatcgcccacgcaaaatggcctgctggtcataacgctttgtacagacaaggtggaaaaaagataaaaaaatccccggccttatggcagggacaggagatatggcggggaggttattgctcttttatcgttgcttcgcgattaatctcatccgttgccgatgaaaccaacggcgtggtcagcgcctttagcgagccgccgcgatgccaatctcgtttaacagcgaatcgatcagcggcgcctgggtacgatagg

SEQ ID NO: 37402 - DNA, 2146 bp, Salmonella paratyphi A
atccaaccggatcgcgaccttttctcctggccgcagtactgggccgcctgttttgggccggcgccgtttttgccgatgtcacgtgaagagatggatcaacttggctgggatagctgcgacatcattctggtgacgggcgacgcgtatgtcgatcatccgagcttcggcatggcgatttgcggccgtatgctggaagcgcagggttccgcgtggggatcatcgcccagcccggactggaacagcaaagacgactttatgcgtctgggtaaaccgaacctgttcttcggcgtcactgctggcaacatggactcgatgatcaaccgttacaccgctgaccgtaacgtgcgccacgatgacgcctacaccccggataacgtccgtgccaaacgccccggaccgcgccacgctggtctatacccagcgttgcaaagaagcgtggaaagatgtcccgatgatccttgtcggccattgaggccagtctcgccgtaccgcgcattacgactactggtctgatactgtgcgtcgttcagtgttagttgattccaaagccgacatgctgatgtttggcaacggtgagcgtccgctggtggaagtggcgcaccgtctggcaatgggcgaaaccatcgatcagattcgcgacgtgcgtaacactgcgattatggttaaagaagctctgcctggctggagcggcgtcgactccactcgtctggacacgccgggtaaaatcgatccaattccccatccctatggcgaagacctgccgtgcgccgacaacaaacccgtcgcgccgaaaaagcaagaagccaaggcgattaccgtgcagccgccgcgtccgaagccgtgggaaaaaacctatatcctgctgccatcctttgaaaaggtgaaaggcgacaaggtgctgtacccatgcgtcacgtattctgcatcacgaaactaaccctggctgcgcgcgggcgctgatgcaaaaacacggcgaccgctatgtctggatcaacccgcccgccataccgctctccactgaagagatggatagcgtgtttgcgctgccgtatcagcgcgtgccgcacccggcttacggcaatgcccgtattccggcctatgagatgatccgcttttcgatcaatattatgcgtggctgctttggcggctgttctttctgctcgatcactgaacatgaagggcgcatcattcagagccgctcggaagattcgatcatcaatgagatagaagcgatccgcgacacggtgccggggtttaccggcgtgatctccgatctgggcggccctaccgcgaacatgtatatgctgcgctgtaagtcgccgcgtgcggagcagacctgtcgtcgcctgtcgtgcgtctatccggatatctgtccgcatatggatactgaccatacgccgaccattaacctgtatcgccgcgcccgtgagctgaaaggcattaagaaaatcttaattgcctccggcgtgcgctacgacatcgccgtagaagatcctcgctacattaaagagctggcaagccatcatgtgggcggctatctgaagattgcgccggagcatactgaagaaggtccgctgtcgaaaatgatgaagccggggatgggcagctacgatcgctttaaagagttatttgacctttactctaaacaggccggaaaagagcagtatctgatcccgtattttatctctgcgcatccgggcacgcgggacgaagatatggtgaatctggcgctatggctgaagcgccaccgcttccgtctggatcaggtgcagaacttctacccgtcgccgttggcgaattcgaccaccatgtattacaccggcaaaaacccgctgggtaaaattggttataagagtgaagatgtggtggtgccgaagggagacaggcaacgtcgcctgcataaggcgctgctgcgttatcacgatccggcgaactggccgctgattcgccaggcgctggaagcgatgggcaaaaagcacctgattggcggtcgccgtgagtgtctggtgcctgcgccgaccattgaagagatgcgcgacgtcgccagaaccgcaatacccgcccggcgttgaccaagcatacgccggtggaacatcagcggcaggggcttgctgctaataagaagcgcgggaaaggcgcggggcgt

SEQ ID NO: 37403 - DNA, 91 bp, Salmonella paratyphi A
atgaggctgatgctggatggcgtgtttaatcatagcggcgactcgcatgcgtggtttgacaggcataaccgcagcactggcgcgcgtgcca

SEQ ID NO: 37404 - DNA, 129 bp, Salmonella paratyphi A
atggcaacgcagagcgtctcatccggcagctctcccgccactgaattactgcgtaaaccatttctcctgcatttgtgcatattccggcgatgctttcaccttgtcgagcgcggcattaatttcttgcaa

SEQ ID NO: 37405 - DNA, 486 bp, Salmonella paratyphi A
  misc_feature (44)..(45): n=g, a, t or c
atgtggcgtgtcttctgtctcgaactgcgcgtgggttccgcganncatcgccggcccgctgtggttcttcctgatggtcatcaccctgtttccgttaagcgtcgggccgcagccgcagctgtggcgcgtatccgggctatcatccaggtggcggcgctgctggcctcgctgctggcgctggagcggctgtttcgcgacgacctgcaggacggcagcctggagcagctgatgctgctgccggtgccgctgccggcgctggtgctggcgaaggtgctggcccactgggcggtgaccggcctgccgctgatgatgctctccccgctggtggcgctgctgctggggatggacgtgtacggctggaaaatcatggcgctgacgctgctgctcggcacgccggcgctggggtttctcgccgcgccgggcgctcgcgctgacggccgggctgcgagcgcggcggcgtcctgctgggcattctggtgctgccgc

SEQ ID NO: 37406 - DNA, 168 bp, Salmonella paratyphi A
ttgctcactcaccttgagcaactgcagcaacaccagggaaacaccataaaaattagttatacgacacacgaacaattcaaaaaattgactgcagacagtcaggcggtgattcgcagcggggagtgttccccgtatgcgaatgtcattctttgcgctggcgtcacgttc

SEQ ID NO: 37407 - DNA, 399 bp, Salmonella paratyphi A
atgcgatctgtgttaacgatttccgtcggcctgcttttcggcctggcgttaagtagcgtcgcgcacgcgaacgaccataaaatactgggtgttattgccatgcccagaaatgaaacgaacgatctcgcgctgaaaattcccgtctgccgcatcgtgaagcgcattcaactcacggcggatcacggcgatatcgaacttagcggcgcatccgtctattttaaaactgcgcgtccgagccaaagcctgaacgtcccttcctcaatcaaagaaggccagacgacaggctggatcaatattaatagcgataacgacaacaaacgctgcgtatcaaagattaccttctcaggtcatacggtaaattcttccgatatggcgagacttaaagtcattggcgacgat

SEQ ID NO: 37408 - DNA, 249 bp, Salmonella paratyphi A
atgaaaaaagtattagctctggttgttgccgctgcaatgggtctctcttccgcagcattcgcggctgagactgcaacgcctgcgaaaaccgcaacgcctgccaaaacaacccagaacacccagcaccacaaaaaacagcataaaaaaaccgttgagcaaaaagcgcaggcggctaaaaagcaccagaaaaaagatggcaaaaaagccccagccaaatctacgtcaaaaacaacttcgcagccggctgcg

SEQ ID NO: 37409 - DNA, 480 bp, Salmonella paratyphi A
ttgatgatcgcggcggtcggaagtccggccccgaatatgttccatcagcccttcaatgctgatgtcttcgttgtcgatatacgccaggcagccgttaatcacttccgtcaggttgtgcggcgggatattcgtcgccatacctactgcgataccggaagaaccgttcaccagcagattcggaattttggtcggcatgacgtccggaattttttccgtaccgtcatagttatccacgaaatccaccgtctctttttcgagatcggccatcagttcgtgggcgattttcgccagacggatctccgtataacgcattgccgccgcggagtcgccgtcaatagaaccgaagttaccctgaccatccaccagcatgtaacgcagcgagaatggctgcccatacgaacgatggtgtcatacactgcggaatcgccgtggggatggtatttaccgattacgtcaccaacgacacgggcagatttttta

SEQ ID NO: 37410 - DNA, 819 bp, Salmonella paratyphi A
atgtcttatgcacgacatttaccggtattaatgtatcaccatgtcagtgataaacccggacagataaccttatctccccgtacgttccgggcgcagatgaaatggctggctgaatctggctggaaaatcgttaccgcagcagaggtggaagctttttatcatggtgcaagattgcctcgtaaaagcgtcatgctgacctttgatggcggctggctggataactggttgcaggtttttccggtgctgcaggagtttaatctgcatgcgcatctctttcttgtgaccagtttgatcagtgacggatcggtccgtattcctgcaggcgaaccggtgtactctcatgatgagtgtcagatgctggttaaacaaggccgggctgatgaggtcatgctgcgctggtcagaggtccgggagatgcacctcagtggccttgttgagtttcactcgcacacgcacacccaccgacgctgggaccagaaacctgtgtcccgtaatccgtcggatttgcttcgtgtcgatattcttcttagtcgtaagcggatgagggagatgctgggttattgcagtcagcatctgtgctggcctgagggctggtattgttctgactatattcatgtggctgaagagctggggttcacatacctgtataccacagaaaggcgtatgaacaatccagtcatcggttcacagcgtattggtcgtatcaacacaaaggagcgaaagaatgtgggctggctgaaacgtcgtctgttttatcacaccacgcccggattttcttcgctgctggcccggcataagggggcacgtcggatagctgac

SEQ ID NO: 37411 - DNA, 455 bp, Salmonella paratyphi A
atgggcattttctccattgccaaccagcacattcgttttgcggtaaagctggcgtgcgcattgtgctggcattatttatcggcttccattttcaactggagacgccgcgttgggcgtgctgaccgccgcgatcgtggcgcaggcccggcatttgcgccggcggggaaccctattccggcgctatccgttatcgcggaatgttgcgtattatcgggacgtttattggctgtatcgccgcgcttatcattattatctctatgatccgcgcgccgctattgatgattctggtgtgctgtgtctgggtcggtttttgtacctggatctcctctttagtacggatcgaaaactcttatgcgtggggactgtcaggttatactgcgctgatcattgtgattaccattcagacggagccgctactcacgccgcaatttgcgcttgaacgctggaaagcaaac

SEQ ID NO: 37412 - DNA, 238 bp, Salmonella paratyphi A
atggaaaacctgaatatggatctgctgtacatggctgccgctgtgatgatgggtctggcggcaatcggtgctgcgatcggtatcggcatcctcgggggtaaattcctggaagcgcggcgctcaacctgatctgattcctctgctgcgtactcagttctttatcgttatgggtctggtggatgctatcccgatgatcgctgtaggtctgggtctgtacgtgatgttcgctgtcgcgtag

SEQ ID NO: 37413 - DNA, 179 bp, Salmonella paratyphi A
gtgacaacaatagtaagcgtacgcgtaacggccacgtggtaatcgccggtgatggtcaggccacactgggtaacacagtaatgaaaggcaacgtgaagaaagtccgccgcctctacaacgacaaggtcattgcgggctttgcgggcggtactgcggatgcattcacgctgttcgagggg

SEQ ID NO: 37414 - DNA, 468 bp, Salmonella paratyphi A
atgaaaaaacaacagggctatacgctcattgaaacggtggtcgcgatgtcgctcattatcattctcagcgccacaggactttatggctggcaacgctggcagcagcaacagcgcctgtggcaaaccgcatgtcaggtgcgggattacctgctgcaacttcgtgaggacgctcactggcataaccgcgatcacattcttcgcgtggtcagcgaaggcggttcatggtgctttgtcagctctgttgctacgcaaacatcgtgtacgccatcttccccctttgtgtttacgcccgactggcgtgatgtcgtccttgccgatatcacgccgtcgttagccttctttggcttgcgcaatacggcatgggcagggcacatcgtactgaaaaacgctgccggagagtggcgtctggtcgtctcctcttgggggcgaatcaggctatgcgagcgtaatgaggccgccacgtgtcaa

SEQ ID NO: 37415 - DNA, 405 bp, Salmonella paratyphi A
ttgctagtctccagagtctcagcgatcggacacaaccacagtgatgtggctggtgcgcttcaggatgcgatctgcacgaccttttgcacgcggcataatgcgcttcatgctcgggccttcgtctacgaaaattttcgtaactttcagatcgtcaatgtcagcgccatcgttgtgttcagcgttagcaatggcagattccagaactttcttgaccagtacagccgctttcttgttggtgtaggtcagaatatccagagcctgcgacactttcttaccgcgaatcaggtcagcaacaaggcgaaccttctgagcagaagaacgagcatggcgatgtttagcgatagtttccatctcttcctcctaccttatttcttcttcgcttttttatcagcagcgtggccgcga

SEQ ID NO: 37416 - DNA, 177 bp, Salmonella paratyphi A
atggcaaagactattaaaattactcaaacccgcagtgcaatcggtcgtctgccgaaacacaaggcaacgctgcttggcctgggtctgcgtcgtattggccacaccgtagagcgcgaggatactcctgctgttcgtggtatggtcaacgcggtttccttcatggttaaagttgaggag

SEQ ID NO: 37417 - DNA, 195 bp, Salmonella paratyphi A
gtggataatattatgaataaatttaacagtgtattgttagcgctggtttttgctatatcagccataacattttcttcatctgcaatggccactgaaagcggtaataaaggattcccgggcatttcctttccgtggtgtaaaatctggccggcaggtatatcaatcccagaactaccgttgggtaaaatatgctgg

SEQ ID NO: 37418 - DNA, 1027 bp, Salmonella paratyphi A
gcgcaacgtattatcaacggtgaagtaccggaaggcctgaaaggccgtcgcgtgtggcgctggatatgggcgcgctggtggccggggcgaaatatcgcggcgaatttgaagagcgtctgaaaggcgtgctgaacgacctcgcaaaacaggaaggcaacgtcatcctgtttatcgacgagctgcacaccatggttggcgcaggtaaggctgatggcgcaatggacgcgtggaatatgctgaaaccggcgctggcgtggtgatactgcactgtgtgggtgccaccacgctggatgaataccgtcagtacattgaaaaagacgcggcgctggaacgtcgttttcaaaaagtgtttgtcgcagaaccttcagtggaagacaccatcgctattctgcgtggcctgaaagaacgttacgagctgcaccaccatgtgcagatcactgacccggcgattgtggcggcggcaacattatctcaccgctatatcgccgaccgtcagttgccggataaagctatcgacctcatcgatgaagcggcatccagcattcgtatgcagattgactctaagccggaggagctggacagactcgaccgccgcattattcagctcaaactggaacagcaggcgttgatgaaagagtctgacgaggcgagtaaaaaacgtctcgatatgctcaacgaagaactggacgacaaagagcgccagtattctgagctggaagaagagtggaaagcggaaaaagcgtcgctctctggtacgcaaactattaaagcggactgggagcaggcgaagattgccatcgagcaggcgcgtcgcgttggcgacctggcgcgaatgtctgaattgcagtacggcaaaattccggagctggaaaaacagttggaagccgcgacccagtcggaaggtaaaaccatgcgtctgttacgtaacaaagtaacggatgcggaaattgccgaagtgctggcgcgctggaccggtattccggttgccagaatgctggaaggcgaacgtgaaaaactgttgcgtatg

SEQ ID NO: 37419 - DNA, 168 bp, Salmonella paratyphi A
gtgagcattacgtcggaacgcgagcgcgtggtcgcgcccccgattcaaccttgtgacgatgataacacccaggatacgaccgttttccggtctgttccgcagcactggacgctcacaccgcagcagcgggcatttattgatgcttttgctgacgaggtgtcacaaaaa

SEQ ID NO: 37420 - DNA, 672 bp, Salmonella paratyphi A
  misc_feature (340)..(340): n=g, a, t or c
cattaccgttacgatgaatatggccgggtggtggaaaagcggggccgcaacggacgcagcactaccgctgggacgcggacaccggctgacggaagtggcggtcatccgggggagcaccgtacggcgttacgggtacgtgtacgacgcgccgggcaggggctggagaagcacgagctggatgcggaaggaaagccgtataaccggacgacgtttttatgggacggaatgcggctggcgcaggagtgcaggctgggaagaagcagcagcctgtatatctacagcgaccaggggagccacgagccgctggcgcgggtggacagggcggcgcgggcgaacggantgaggtgctgtattaccacacggacgtaaacggcgcgcggaggagatgacggacggcaggggcaatattgtctgggaagcgggctatcaggtatgggggaactgacgcatgaaaaagaaacccggcccgtacagcagaacctgcgtttccaggggcaatatctggacagggaaacggggctgcattacaatttgtacagattttatgatccggatatcgggaagtttatatcgggcgaccctatttcgatccggggcgggataaatctttatcagtatgcgcctaatccgattaaatggatagatccacttggcttatataacggtgaaggt

SEQ ID NO: 37421 - DNA, 909 bp, Salmonella paratyphi A
atgtcacatccgctatggtcgcactttgacattttgtttaaacactttaattccggtacgtcttacagcggcccggcggccattcgtctgcgcgccagctgtggtcaaccttcgcatacccgactttatcaaccagccaataacgaatgttatctgtttgataatctggcgaaactgggctttactcagcatctgatgatggatcataacggtgaatttggcggcttcctgaaagaagttcgcgaaaacggcggtatgcagagcgaactgatgaaccagtccggcctgccaaccgcccttctgtcattcgacggctcgccggtatatgacgatctggcggtcctgaaccgctggttgacaggggaagaacgtgaagccaattcccgctccgcgactttctttaacctgctgccgctgcacgatggcaaccacttccccggcgtcagcaaaacggtggattataaaatccgcgcgcagaaactgttcgatgaactggacgccttctttaccgaactggagaaatccgggcgtaaggtgatggtggtggtcgtaccggagcacggcggcgcgctgaagggcgacagaatgcagatctcaggcctgcgcgatattcccagcccctccatcactaacgtcccggcgggcgtgaaattttttggcatgaaagccccgcatgagggcgcgccgattgatattaaccagccgagcagctacctggcgatttccgaactggtcgtacgcgccgtggacggtaagctctttaccgaagacagtgtgaactggaacaagctgaccagcaatctgccgcaaaccgcgccggtttcagaaaacgctaatgcggtggtgattcagtaccagggtaagccctacgttcgtctgaatggcggcgactgggtgccttacccgcag

SEQ ID NO: 37422 - DNA, 2052 bp, Salmonella paratyphi A
  misc_feature (340)..(340): n=g, a, t or c
  misc_feature (917)..(917): n=g, a, t or c
  misc_feature (919)..(919): n=g, a, t or c
gtggagatggtagaaattctttccacgctgagtatggatatcgacacgctgcgggcggcgctactgttccctctggccgacgccaacgtagtcagcgaagatgtactgcgcgaaagcgttggcaaatctatcgttaccctgattcatggcgtgcgcgatatggcggcgatccgtcagctaaacgccactcataacgactctgtttcttcggagcaggttgataacgtccgtcgaatgttattggcgatggtggatgatttccgctgcgtggtcatcaaactggccgagcgaatcgctcatttgcgcgaagtgaaagaggcgccggaagatgagcgcgtgctggcggcgaaagaatgtaccaacatctatgcgccgctcgctaatcgtctgggcatcgggcaactgaagtgggaactggaagactactgtttccgctacctgcatccggcggaatacaaacgcatcgccaaactgctgcatgagcgccgtctcgatcgcgaacattacatcgaagagtttgttggacatctgcgcgctgaaatgaaaaacgaaggcgtgcaggcggaagtctacggacgaccaaaacatatttatagcatctggcgcaaaatgcagaaaaagcatctggcgtttgatgaactctttgacgtgcgcgccgtgctattcgtcgctgaacgtctgcaagactgctacgccgcgttggggatagtgcatacgcactatcgccacctgccggatgaattcgatgattatgtcgctaacccgaaaccgaacgttaccagtctatccacaccgtgtgcctgggaccgggcggtaaaaccgttgagatccaaattcgtaccaaacagatgcatgaagacgccgaactgggtgtggcggcgcactggaagtataaagaaggcgccgcgtccgcggtngncgtttccggccatgaagacagaattgcgtggctgcgtaacgtgatcgcctggcaggaagagatggccgattccggcgaaatgctggatgaagtgcgcacgcaggtgtttgacgatcgggtctacgtttttacgccaaaaggcgacgtggttgacttgcctgccggatctacgccgctcgattttgcttaccacatccacagcgatgtcgggcacgctgcatcggcgcgaaaattggtgggcgcatcgtaccgtttacctaccagttacagatgggtgatcaggttgaaattatcactcagaagcagccgaatcccagccgcgactggctgaatccaaacctgggctatgtgacgaccagccgcggacgctcgaaaattcacgcctggttccgtaaacaggaccgtgacaaaaatatcctggctggacggcagatcctcgacgatgagctggcgcatttggggattagcctgaaagaggccgagaaacatctgctgccgcgctacaactttaatgagctggaagagttgctggcggcgataggcggcggcgatatccgtcttaatcagatggtgaatttcctgcaatcgcagttcaataagccgagtgcagaggagcaggatgcagcggcgctgaaacagcttcagcaaaaaacatacgcgccgcaaaatcgtcgtaaagatgacggacgcgtggtggtagaaggcgtgggtaatttgatgcaccacattgcccgctgctgccagccgattccgggggatgaaattgtcggcttcattactcaggggcgggggatttccgtgcaccgggccgactgcgaacagctggcggaactgcgctcccatgcgccggagcggatcgtagaggcggtatggggcgagagctactcggcgggatattcgctggtggtgcgcgtccaggccaacgatcgcagcggcttgctacgcgatatcaccaccattctggctaacgaaaaagtcaacgtgctgggcgtcgcagccgcagcgacattaaacagcagatcgccaccattgatatgaccatcgagatctacaacctgcaggtgctgggccgcgtgctcggtaagctgaaccaggtgccggatgtgattgatgcacggcgactgcacgggggg

SEQ ID NO: 37423 - DNA, 264 bp, Salmonella paratyphi A
ttgcggttacgcaaaccaggcgccatttggtccagcgggcggctgagtggtcggcgcttgtctgtccatcagacgcaggacgtaatccagtcttttagactgcgagaggatctcctgcagctgctgacggtcgaaaccgtgtttgctgaccattttatcaatgaactctgcgcattagggttgtgtgcgaagtcgccgcccatttgcatgacgttatgctgcggctcaagcaggaagccgccggaagacgtgccagtcgtcgct

SEQ ID NO: 37424 - DNA, 450 bp, Salmonella paratyphi A
atgatgtttaacattccattctccgaaccgacctgtattcttaccgcgcccaccaccgtgaatttaggtgattggtaccgaagcgacgtggagaaagatcagaccaccgaggtgccttttcagattaccggaacctgtaccgggacgattgcagtctcgttcgtggcgaaatcctcatataccaatgcggataagaacctgtttaccaactcgattaccagcaactcaagcgttaccgcggctggcggcgtcggcgtaaaaataagctcaccggcctattcgcaaattcatgccgacagttcgccagaagccattgccgtgggcgagataatcgggatgcctgtgacctcagtaaacgccaactttaaagcaaagctggtcaaaacagggacggaggccgtgacacccggtattttcggatcgtctgtcaccttccaggtaacctacgag

SEQ ID NO: 37425 - DNA, 165 bp, Salmonella paratyphi A
atgttgctcgtcgaaccatcctttgtcgcgcaaaaatgttcgcaacgccagcatcagataaaacgccacaccgacgcccgccagcgacttagacgggaattcgcagtcgccagattaggattaataatcgcttcggcatccggcaacgtgtcgccaggcaggtgg

SEQ ID NO: 37426 - DNA, 111 bp, Salmonella paratyphi A
atggatttcgtggtggtggcgaaaaaaggggttgccgacctcgataaccgtgctctctcggaagcgttggaaaaattatggcgccgccactgtcgcctggctcgcgggtcc

SEQ ID NO: 37427 - DNA, 384 bp, Salmonella paratyphi A
atgttaaatagtgctatgagcgtagtgatccttgccgcaggtaaaggcacgcgcatgtattccgatattcctaaagtgctgcacacgctggcgggtaaacccatggtgcagcatgtcattgatgcagctactaaattaggggccgcacaggttcatctggtctatggccacggtggcgagttgttaaaacagaccctgaaagatgacaagctaaactgggtgcttcaggcggaacagttgggaacaggtcacgcaatgcagcaggccgcgcccttctttagcgacgatgaagatattttaatgctttacggcgacgtgccgctgatttcggttgaaaccttacagccctgcgcgatgccaaaccgcagggtggtattgggttat

SEQ ID NO: 37428 - DNA, 129 bp, Salmonella paratyphi A
aacgatgcgtcagatacctactcaggtagtgcagccgataccgtaagcgcactctttcatcagtaccggcgtttgctcgcagacgtcgcgcataaccgccgcaatgtagggatgatcatgatgcgagga

SEQ ID NO: 37429 - DNA, 1221 bp, Salmonella paratyphi A
atgcttataatttcatacattgcattatgcttattatttatagtttatctctatactctttccgtaagaattgagggaaaaataataaatgtaatggtcccatacctgataataacagtccctacactgtacgtgtttgaaggtatatttgtatacctctcagaggtgcagaattatacagtggaatatttgtttttctatacttgctatataacatacatagcatcatttgttatttcttatctttacacacaaagaaaacccatatacaacaaatcaaacacgaaaaataaaccaaggtatgtgtttacttcattgttattcaccttccttgcttttatcatttaccttccagtgttgatggagttcagagagtatatacttagcccaagaagaatatacgaattaaccagaacagggtatggtatatacttctatccttcattaatgttttctcttgtcgcttctatttgcgcgttctttacatacaaaaaatcaaagttattttgtatttccatagttttatttaactgtatacttattttcttgcatggtaacaaaggaccaatatttagtatatttatagcattcatcctttacctttcatatattgaaaataaaaaaattaaatttatgttcctggtaaaatcgtttgctgttatagcagtcattgtaacggcattctttgcatatacgtttactgatgggaatccgatagaaaatatggcgaattactcggattatacccgtaatgctgttcttgttgcttcctcaaactttgactttatgtacggaaaattactaatggagagcgaggtttactcgaggattccgagggctatttggcctgataagcctgaagattttggcgcattgtatctggcaaaagtatttttccctgatgcattctacagaaatcagggcgctcctgctttcgggtatggtgaactatacgcagatttcgggctttttacaccagtttggttagttatatctggagtatttaaaggcgtcctagctaagtatttctccaataaaactcaggaaacaaagtcagcgcattatttcataatgttcctattttgcattggaataagtgtgattcctgttagcatgggatggttgttccctgagcatttgatgattgcttttatggtatacattgcatcttcctttgttttttcagagcatataagattcgttttactaagaaacaataaa

SEQ ID NO: 37430 - DNA, 912 bp, Salmonella paratyphi A
atgcgcaaggtgtcgatatctatattattcatgctagtttcactgacctgggggactacatggttggctatgcgaattgccgttgaaactatccctccagtgtttgcaaccggaatgaggtttatgtttgcagcaccttttttaatcatcattgcatggttaagaaaaaaaacactgttatttcctcccggacaacgattattccagtttgtgatttgcatcttttatttttctattcctttctcactaatgatttatggtgaaacctatgtcaactctgggcttgccgccattatctttgcgaatatgcctgtggccgttttgatagcatcggttttgtttctaaatgaaaaagcgaaactaatgcagatcgcgggcttaactatcgcaatcactgcattgacggggatacttcttgaagaagcgaatacaagtacagagagtcactggcagggtatcactgcgcttatttctgctgtgttaatccatgccataatatatacacaatgtaagaaaagaagttgtactgtctctgttatcacatttaatgcgctcccgtgccttttagctgggttgatactttctgcgacaggatggttttttgaaagaccacaagtatcaaccttctcagtacactcaatattagctactctgtatctcggggcttttgctggagtttttggtatcctgtgctactttgcgcttcagcaaaaggctaatgccttccaggcttcgcttgtatttcttatctttccgctgattgcggtaagtctggaagactatatttatggatatgctatttcaacacattcaatgctgcttattataccattagctatcgggatatttcttactcttgtcgccagaaatatccctgtaaccagcagatgccgggataattcatcacaggaa

SEQ ID NO: 37431 - DNA, 1310 bp, Salmonella paratyphi A
atgaaatttcccggtaaacgtaaatccaaacactattttcccgtcaatgcgcgtgacccgttgttgcaacaaattcagccagaacaggaaaccaacgcctcctgggtcgtcggtatcgaccagacgttggtggatattgaggcgaaagtggatgacgattttattacacgctatggattaagcgccgggcattctctggtgatagaagacgaggtggcggagaagctgtatcaggaactgacgcgggaaaatctgatcacccatcagtttgctggcggcaccataggcaatacgatgcataattactcggtactggcggatgaccgttcggtgttactgggcgtgatgtgcagcaacattgagattggcagctacgcttatcgctacctgtgtaatacttccagccgtaccgacctgaattatctgcaagcggtagatggcccgattggccgctgtttcacgctaattggcgaatccggcgagcgtaccttcgctatcagccccggccatatgaatcagctacgggcggaaagtattccggaagcggtgatcgctggcgcttccgcgctggtgttgacttcatatctggtgcgctgtaagcctggcgaaccgatgcctgacgcgacgatgaaagcgatcgaatacgcgaaaaagcataacgtgccggttgtcatgacgctgggcaccaaatttgtgatcgccgataatccgcagtggtggcaggcgtttctcaaagagaatgtctcgattctggcaatgaatgaagaagaagcggaagttggacccggcgaaaacgacccgctgctggcgcggattaaggcgctggactgggtcgacctggtgttatgcaccgccgggccgataggttatatatggcaggcttcaccgaagaggaagcaaaacgtaaaacccagcatccgctgctaccgggagctattgctgaatttaaccagtatgaatttagccgggcaatgcgccataaagattgtattaatccgctgcgcgtttattcgcatattgcgccgtatatgggcgggccggaaaaaatcatgaacaccaacggcgcgggcgatggcgcgctggcggcctgctgcacgatattacggcgaacagttaccatcgtagcaacgtaccgaactccagtaagtcacaaatttacctggctgacctattcgtcgctggcgcaggtgtgtaaatatgctaaccgtgtcagttatcaggtactgaaccagcattctccgcgtctgacacgcgggctgccggaacgtgaggacagcctggaagagtcgtactgggatcgctaatctggc

SEQ ID NO: 37432 - DNA, 291 bp, Salmonella paratyphi A
atggctaagaaagtacaagcctatgtcaagctgcaggttgcagctggtatggcgaacccgagtccgccggttggtccagcactgggtcagcagggtgtgaacatcatggaattctgcaaagcgttcaacgcaaaaacggattccatcgaaaaaggtctgccgattccggttgttattaccgtttacgctgaccgttctttcaccttcgttaccaaaacgccggcagctgttctgctgaaaaaagcggctggtatcaagtctggttgccaagccgaacaaagacaaagtagg

SEQ ID NO: 37433 - DNA, 363 bp, Salmonella paratyphi A
atgtctatcactaaagatcaaatcattgaagcagtatccgctatgtccgtaatggacgttgtagaactgatttctgcaatggaagaaaaattcggtgtttccgctgctgctgctgtagctgtagctgctggcccggctgaagctgctgaagaaaaaactgaattcgacgtaattctgaaagctgctggcgctaacaaagttgctgttatcaaagcagtacgtggcgcaactggcctgggtctgaaagaagctaaagacctggtagaatctgctccggccgctctgaaagaaggcgtgagcaaagatgacgctgaagcactgaaaaaatctctggaagaagctggcgctgaagttgaagttaaa

SEQ ID NO: 37434 - DNA, 519 bp, Salmonella paratyphi A
atgataaaatccgcccccctgcggggccaaatgaaccctggaagagagaatatgaacattattaaagctaacgttgcagcccctgacgctcgtgtcgccatcactattgcgcgtttcaatcagtttatcaacgacagcctgctggatggcgcggttgatgccctgacgcgtattggtcaggtaaaagatgataatattaccgtagtgtgggtgcctggcgcctatgaactgccgctggcgaccgaagcgctggcgaaaagcggtaaatacgacgccgtggttgcgctgggaaccgtgattcgcggggggactgcgcactttgaatatgtggcaggcggcgccagtaatggcctggcaagcgttgcccaggacagcggcgtgccggtagcctttggtgttctgaccaccgagagtattgaacaagccatcgaacgtgctggtacaaaagccggtaataaaggcgcagaagctgccgtgaccgcgcttgaaatgattaatgtattgaaagccattaaggcc

SEQ ID NO: 37435 - DNA, 981 bp, Salmonella paratyphi A
atgataagattcgctgtacttgggactaactggatcacgcgccagtttgtcgacgccgcccatgaaaccggcaaattcaggctcgcgccgtttactcccgtagtcttgaacaggcgcagtctttcgcaaatgattatcccgtcgagcatctgtttacctcgctggaagcatggcgcaaaggacgcagttgaggcggtttatatcgccagcccgaattccctgcatttctcccagacgcagcactttttgcagcataaaaaacatgtcatgtgcgaaaagccgctggctctaacctggcggaggttgatgccgctatcgcctgcgcgcgcgataatcagcgggtactgtttgaagcctttaaaaccgcctgcctgcccaatttcctgctgctgcgggaatcgttgccaaaaatcggcagaatgcacaaagcattcctaaattactgccagtactcttcacgttatcagcgctatctgaacggtgaaaatccgaatacgtttaatccggccttctccaatggttcgattatggatatcgggtattactgtctggcgtcggcgatcgcgctatggggcgagccgcgcagcgtgcaggcgtcggcgaatttattggaaagcggagtagatgcgcacggcgtcgtggttatggattacggcgattttagcgtcacgctacagcattccaaagtcagcgactcggtactggccagtgaaattcagggcgagaggggatcgctggtcattgaaaagctgtcggaatgccagaaagtgtgttttgcgccgcggcgcgctgatgcaggatctgacccagccccagcatattaataccatgctgtatgaagccggggcgtttgcccagcttattgaaaaccacgccgtggaacatccggggttgtcgctaagtcgcgccacggcaaaatggctgacagaaatacgccgtcaaaccggggtcatcttcccggcggacgatctgacccatccc

SEQ ID NO: 37436 - DNA, 966 bp, Salmonella paratyphi A
atgaatactgttggtacgccattattatggggtggattcgcggttgttgtggtgataatgctatccatcgacctgttgttgcagggacgccgtggcgcacatgctatgtcgatgaaacaagcagcaggatggtcaatcctgtgggtaacgctctcgctactgtttaacgccgctttctggtggtatctggctgaaacgcaagggcgcgaagttgctgacccgcaggcattagcgttccttaccggctatctgattgaaaagtcgctggccgtagataacgtctttgtctggctgatgctgtttagctatttctccgtccctccgactctgcaacgccgggtgctggtgtatggggctcttggcgcgatcgtgttgcgtactatcatgattttcgccggtacctggcttatcactcagttcgaatggctgctgtatgtgttcggtgccttcctgctgtttaccggcgtaaaaatggcgctggcgaaggaagacgaatccggcattagcgaaaaaccgatggtgcgttggctacgcgggcatctgcgcatgaccgatacgatcgagaacgagcactttttcgtacgtaaaaacggcctgctgtatgccacgccgctgctgctggtgctgattatggttgagttcagcgatgcgatcttcgccgttgacagtattccggcgatctttgcggtcaccaccaacccgttcatcgtactgacctctaacctgtttgccatcttaggactgcgcgcgatgtacttcctgctgtccggcgtggcggaacgcttctcaatgttgaaatatggtctggcggtcattctggtctttatcggcattaagatgctgatcgtcgacttctaccatattcctatcgcgatttcgctgggcgtagtgtttggcattctgaccattacgctggtgattaacgcctgggttaaccatcagcgcgataagaaactacgagcgcaa

SEQ ID NO: 37437 - DNA, 246 bp, Salmonella paratyphi A
atgactaccattacactagtcaacgaacaaaatagtactggcaatcctttttctgcacatatgttatgtgaacagcgagctattcaggaaattacttacgaactattgcaatcgcagcagcatgtctcaaataaggatatcatcgccaaacttattgaaaaactggaaacagaaaaagacgtagtgcagcttgatatttaccgtaatgccttagaagccgttttgtttcagacacctgacgacatc

SEQ ID NO: 37438 - DNA, 839 bp, Salmonella paratyphi A
atgttcagatatttatgtaaccagaaagctgcactgctgaccgccattctcctgatggcggccggcgtgctcaccctgtgtttcccggagtcctggtacccgcagaaacagaatggcagctcacggcagaaaaagaaattaccgggatacacggcggcctctccggcctgacatggaacccggacagcagaacgctgtttgccgtgaccgaccacccctcctcggtggtggagctggacacggaagggaacgtgctgcgggtgataccgtcagacggcgaccacgattttgaggccatcgaatacctcggcgggaaccgctatgccctgtcccgggagcggacgctcaccacccactgcattgacagcagcacgaccgtcctcccgccggcaacatacagcctgacgctggatgtgaacaggcacagcgacaatgccggttttgaaggccttgcctggggacggggagagcatgccctgatggtggcgcaggagaaaaaaccgctgcggctttacgtgacggaccggagccctgatgcgctgtcggtgagtgactcgctgacacaccgggcgtccctgccatggttcctgaaggatatctccggtctgcattatgaccggaacaacgggctcctgtatgtactttcccatgaatctgccgtggtcgtggtgtcggatctggacggcgggaggaaggtgatgtcgctgcgccggggacactgtggcctgcgaagggatatcccgcaggcggaggggatagcctcagatgaccgggacacgctgtggatagtcagtgaaccgaatctgttttaccgcttcacccgcacggcttcgtcctga

SEQ ID NO: 37439 - DNA, 333 bp, Salmonella paratyphi A
gtgcgtctcgaagactgtgcagataacagtagcatcaagcagttgatgttcagctttacgccgcaatccggtttttggagcaaccaaaaccaggttttcaaaaatgatgccacaacaggcgcggcgcaaaacgttggtatcgtcattttctcggcagactataaaactaacgtcttaaacagcgatggcagttctaacgtagtttacgacgtcagcggaaaaagcagttcgctgtatttaacggattatcagttttacgcgcgctatcagaatacgggcgcagttgtcagcggcgttgtcaccagcaacgtgttggttgacgtcagctacgaa

SEQ ID NO: 37440 - DNA, 1170 bp, Salmonella paratyphi A
atgaaaatcacgatatccgggacgggttatgttggcttgtctaatggtttgcttattgcacaacaccatgatgtggtggcgttagacattgttcctgcccgtgttgaactgttaaatgatcggatatctccgattgttgataaagaaattcagcaatttttaaaggaagataacatcagattcagggcaacgctggataagtttgatgcataccagaatgcagattacgttatcattgtacgcctacagattacgatccaaaaaccaactattttaatacgttcagtgtagaatcggtcattcaggatgtgatcagcatcaaccccgcagccgtgatgattattaagtctacggtgccggttggctttacggcggcaatgcgtcagaagtttacgacagaaaatatcattttctctccggaatttttacgtgaaggtaaagccctgttacgataacctttatccctcccgtatcgtgattggggaacagtctgagcgcgcccgagaatttgccgcattactccaggaaggcgctattaaacaggagattccgacgctgtttacggactccactgaagcggaagccattaaacttttcgccaatacttacctcgccatgcgagtcgcttattttaatgaattagacagttatgctgaaacgttaggattaaatacccgacaaattattgaaggggtgtgcctcgacccgcgtattggcaatcattacaataatccctcttttggttatggcggatattgtttgccaaaagataccaaacagttgctggctaattatcagtcagtgcctaataatattatctccgctatcgttgaagcaaaccgtacgcgtaaagattttattgccgattctatccttgccagaaagcctaaagtggtgggcatttatcgcctgattatgaagagtggctccgataacttccgcgcctcatcgattcaggggattatgaaacgtattaaagcgaaaggcgtagaggtcatcatctatgagccggtaatgcaagaagaaactttctttaactcacgtcttgaacgtgatttgcactgctttaaacagcaggcggatgtcattatttccaatcggatggcggcagagcttttggatgtcgctgaaaaagtgtatacccgcgatcttttcggtagtgattaataa

SEQ ID NO: 37441 - DNA, 985 bp, Salmonella paratyphi A
atgacagtggatagtaatgcatcttccgggcgtgggaacgatccggaacagattgatttgattgagttattgctacagttatggcgtgggaagatgaccattattgtagccgttattatcgccattttgctggccgtaggctacctgatgatagccaaagaaaaatggacatccacggcgattattacccaacctgatgccgcgcaggttgccacctataccaacgcgctcaacgtcttgtatggcgggaatgcccccaaaatctctgaagtgcaggcgaattttataagctgctttagttctgcgttttccgcattatcggaagcgctggataatcagaaagagcgggaaaagctcaccattgaacagtcggtaaaggggcagacgctgccgctctcggtttcttatgtgagcactaccgctgaaggggcgcagcgtcggctggcggaatatatccaacaggtggatgaaaaggtcgctaaggaactggaagttgacctgaaagataacatcacgctgcaaaccaaaatgttgcaggagtcccttgagacgcaggaagttgtggcgcaggagcaaaaagatctgcgtattaagcaaatcgaagaagcgttgcctatgcggatgaggccaaaatcacgcagccgcagattcagcaaacccaggatgttacccaggacacgatgttcctgttggggagcgatgctctaaaatcgatgatacagaacgaagcgacgcgtccactggtcttttctccggcctattaccagacgaagcagacactgctggacattaaaaatctgaaagtgactgccgatacggtgcacgtctatcgttatgtgatgaagccgacgctgccggtccgtcgcgatagcccgaaaacagccattaccctcgtgctggctgtgttgctgggcgggatgatcggcgccgggattgtgctgggcgcaatgcgctacgtagctataagccaaaagccttgtaagct

SEQ ID NO: 37442 - DNA, 439 bp, Streptococcus pneumoniae
atgaaattaacttatgatgataaagttcagatctatgaacttagaaaacaaggatatagcttagagaagctttcaaataaatttgggataaacaattctaatcttaggtacatgattaaattgattgatcattacggaatagagttcgtcaaaaaaggaaaaaatcgttactattctcctgatttaaaacaagaaatgattcataaagtctgacatgaaggctggactaaagatagagtttctcttgaatactgtctcccaagtcgtacgatacttcttaactggctagcacaatacaggaaaaacgggtatactattgttgagaaaacaagagggagagtacctgagagcggagaatgccatcctaaaaaagttaagagaactccgattgaaggaggaaaaagagaaagaagaaagacagaaattgttcaagaattaa

SEQ ID NO: 37443 - DNA, 438 bp, Streptococcus pneumoniae
atgaaattaacttatgatgataaagttcagatctatgaacttagaaaacaaggatatagcttagagaagctttcaaataaatttgggataaacaattctaatcttaggtacatgattaaattgattgatcgttacggaatagagttcgtcaaaaaagggaaaaatcgttactattctcctgatttaaaacaagaaatgattcataaagtctgacatgaaggctggactaaagatagagtttctcttgaatacggtctcccaagtcgtacgatacttcttaactggctagcacaatacaggaaaaacgggtatactattgttgagaaaacaagagggagagtacctgagagcggaaaatgccatcctaaaaaagttaagagaactccgattgaaggaggaaaaagagaaagaagaaagacagaaattgttcaagaatta

SEQ ID NO: 37444 - DNA, 3793 bp, Streptococcus pneumoniae
ggtgaaaaaggagaccaaggtgaacgcggtctaactggagctaaaggtgaaaaaggagaccgaggcgaacgcggtctaactggagctcaaggagctaaaggtgaaaaaggagaccgaggtgaacgcggtctaactggagctcaaggagctaaaggtgaaaaaggagaccgaggtgaacgcggtctaaccggagctcaaggagctaaaggtgaaaaaggagaccgaggcgaacgcggtctaactggagctcaaggagctcaaaggtgaaaaaggagcccaaggtgaacgcggtctaaccggagcacaaggagctaaaggtgaaaaaggggaccaaggtgaacgcggtctaaccggagcacaaggtgccaaaggtgaaaaaggggaccaaggtgaacgcggtctaaccggagcacaaggagctaaaggtgaaaaaggagcccaaggtgaacgcggtctaactggaactcaaggagctaaaggtgaaaaaggagaccgaggcgaacgcggtctgactggagcccaaggagctaaaggtgaaaaaggagaccgaggcgaacgcggtctgactggagcccaaggtgctaaaggtgaaaaaggagcccaaggtgaacgcggtctaaccggagcccaaggtgctaaaggtgaaaaaggggaccaaggcgaacgcggtctaactggagcacaaggtgaaaaaggagaccgaggcgaacgcggtttaactggagctaaaggtgaaaaaggggaccaaggcgaacgtggtatcactggagctaaaggtgaaaaaggagcccaaggtgaacgcggtctaaccggagcccaaggtgctaaaggtgaaaaaggggaccaaggtgaacgcggtctcactggagcccaaggtgaaaaaggagcccaaggtcaggcaggtcgtgacggtgtaactccaaccgtaaccgttaaagataataaaaatgacggcactcatactatcactattaacgacggtagaggtaatgttacaagtactgttgtaagagatggtttcgatggcgcaagtccattagttgcgactcaacgaaatgacgcagataagacaacaactgttatcttctattacgataaaaatggaaacaatgaattagatgcttctgataagaaattaaaagaagttgtaattgcagatggtgctaaaggtgaaaaaggggacaaaggtgaacaaggtcttcaagggcgtgatggtgaacaaggaccaaaaggagaagatgggaaaaccccaacagttaaagtaactgatggtcaagatggaacgcatacaattacaattaacgatggtaaaggtggtataactactacagtagtaagagatggatttgatggtgcaagccctcttgtttctactcatagaaatgaagcagataaaacaacaactgttattttctattatgatctaaatgataataatcaatttgatgaaggagatacaaaacttaaagaagttgttatcgcagatggaaaacaaggaccaaaaggtgacaaaggtgataacggaaaagatggattcacaccagaagtaacagttacagataacaataacggaacacacaccatcacaatcacacaaccagacaacagaccatcattaacaacaatcgttaaaaacggtgaagatggaaaaacaccaaaagtcaaagcagaacgagatgatgcgaagaaacaaacaacattaacattctacattgacaaagatggagatggaagttacacagcaggaaaagacgagttagttcaaacaacagtagttaaagacggacaagacggagctgcaggagcatctggacgtgatggaaaagaagtattaaacggaaaagtagacccaacaacagaaggtaaagatggagacacattcgtaaatacacaaacaggagatgtattcgttaagaaaggtaacacttgggaaccagcaggaaacatcaaaggaccgaaaggtgacaaaggtgcagatggtgccaagggtgaaaaaggagcccaaggagaacgcggcctgactggagcgcaaggtgtcaagggtgaaaagggagatcagggtgaacgcggtctaactggatctaaaggtgaaaaaggagaccaaggtgaacgcggtttaactggagcgcaaggtgccaaaggtgacaaaggtgaacaaggtcttcaaggtcgtgatggagctcaaggaccaaaaggagcagatggacaaagaggaccagcgggaccacaaggaccaaaaggagaacaaggtaatccaggaactccaggtaaagatggaaaatctctaattgctgttaaaaatggtgtattagtaacaattacaccagtagaaggtcgtccacaaacaacatttgtagaggatggacaaaagggtgctgatgggaaaactccaacagtaacaataactgaggggcaaaacggcacacatacattaacggttcataatccaggaagtccagatgtgacaactacgatccgtgatggagctacaggacaagcaggtcgtgatggtaaagatgtattaaacggaaaagtaaatccacaaccaaaccaaggtaaaaatggagataaatatattaatatcgaaaccggtgatgtctatgttaaaaacaatggaaactgggataaagaaggcaacatcaaaggccctaaaggtgacaaaggtgcagatggtgctaaaggcgaaaaaggagaccaaggcgaacgcggcctaactggagcgcaaggagctaaaggtgcggatggcgcagtaggtcgtgatggacgtgacggtaaagacgtgttgaacggcaaagctaacccagaagcacatcaaggtaaagacggcgataaatacgttaatacagaaacaggcgacgtcttcgttaagaataacggcaactgggataaagagggcaacatcaaaggccctaaaggtgacaaaggtgcagatggtgctaaaggcgaaaaaggagaccgaggcgaacgcggcctgactggagcgcaaggagctaaaggtgcggatggagcagcaggtcgtgacggacgtgatggacgtgacggtaaagacgtgttgaacggcaaagttaacccagaagcaaatcaaggtaaagacggcgataaatacgttaatacagaaacaggcgacgtcttcgttaagaataacggcaactgggataaagagggcaacatcaaaggctctaagggtgacaaaggtgaacgcggagaagatggtaagactccagaagtaactgtaactccaggtaaagatggccatagtactgacattacattcactgttccaggtaaagatccagttacagtaaatgttaaggacggagaaaatggtctgaacggtaaaactccaaaagttgatttacttcgtgtccaaggaaaaaacggaaatccatctcatacaattgtgacattctatacagatgaaaacaatgacggcaaatatacaccaggaactgatgaacttctaggttcagaaatgattaaagatggtgctaaaggcgcggacggacgagatggtaaatcattgcttactgtcaaggatggtaaagaaactaaagtttaccaagaagatccagctaacccaggacaaccattaaatccagaaaaaccacttgcggtaattagagatggagtagatggaaaatcacctacagttacagctgttcgtaaagatgaagcagggcataaaggtgtagaaatcactgttgataaccatgatggttcacaaccaactacagtctttgttcaagatggtgctaagggaaaaactggtgcaaccggtcaggatggacaaact

SEQ ID NO: 37445 - DNA, 461 bp, Streptococcus pneumoniae
atggggtctttccgtcctgtcgcgggtaacctgcatcttcacaggtactaaaatttcaccgagtctctcgttgagacagtgcccaaatcattacgcctttcgtgcgggtcggaacttacccgacaaggaatttcgctaccttaggaccgttatagttacggccgccgtttactggggcttcaattcataccttcgcttacgctaagcactcctcttaaccttccagcaccgggcaggcgtcaccccctatacatcatcttacgatttagcagagagctgtgtttttgataaacagttgcttgggcctattcactgcggctgacttaaagtcagcaccccttctcccgaagttacggggtcattttgccgagttccttaacgagagttctctcgctcacctgaggctactcgcctcgactacctgtgtcggtttgcggtacgggtagagtatggttaaacgc

SEQ ID NO: 37446 - DNA, 366 bp, Streptococcus pneumoniae
atgctttcagcgtttatcccttccctacatagctacccagcgatgcctttggcaagacaactggtacaccagcggtaagtccactctggtcctctcgtactaggagcagatcctctcaaatttcctacgcccgcgacggatagggaccgaactgtctcacgacgttctgaacccagctcgcgtgccgctttaatgggcgaacagcccaacccttgggaccgactacagccccaggatgcgacgagccgacatcgaggtgccaaacctccccgtcgatgtgaactcttgggggagataagcctgttatccccagggtagcttttatccgttgagcgatggcccttccatacggaaccaccggatcac

SEQ ID NO: 37447 - DNA, 438 bp, Streptococcus pneumoniae
atgaaattaacttatgatgataaagttcagatctatgaacttagaaaacaaggatatagcttagagaagctttcaaataaatttgggataaacaattctaatattaggtacatgattaaattgattgatcgttacggaatagagttcgtcaaaaaagggaaaaatcgttactattctcctgatttaaaacaagaaatgattcataaagtctgacatgaaggctggactaaagatagagtttctcttgaatacggtctcccaagtcgtacgatacttcttaactggctagcacaatacaggaaaaacgggtatactattgttgagaaaacaagagagagagtacctgagatcggagaatgccatcctaaaaaagttaagagaactccgattgaaggaggaaaaagagaaagaagaaagacagaaattgttcaagaatta

SEQ ID NO: 37448 - DNA, 90 bp, Streptococcus pneumoniae
atgacgtcaaatcatcatgccccttatgacctgggctacacacgtgctacaatggctggtacaacgagtcgcaagccggtgacggcaagc

SEQ ID NO: 37449 - DNA, 438 bp, Streptococcus pneumoniae
atgaaattaagttatgatgataaagttcagatctatgaacttagaaaacaaggatatagcttagagaagctttcaaataaatttgggataaacaattctaatattaggtacatgattaaattgattgatcgttacggaatagagttcgtcaaaaaaggaaaaaatcgttactattctcctgatttaaaacaagaaatgattcataaagtctgacatgaaggctggactaaagatagagtttctcttgaatacggtctcccaagtcgtacgatacttcttaactggctagcacaatacaggaaaaacgggtatactattgttgagaaaacaagagggagagtacctgagagcggagaatgccatcctaaaaaagttaagagaactccgattgaaggaggaaaaagagaaagaagaaagacagaaattgttcaagaatta

SEQ ID NO: 37450 - DNA, 1937 bp, Streptococcus pneumoniae
acaatcactactcaacgtggacaagatggccaaagcactgttgtaactatcacaacatcaggtaaagatccagtaaccttcactgtaaaagatggtaagaatggtaaagatggccgtgcaccgaaaatcaaagtagaagatattacttcaccttcaagaattagacgcgatacagatgctgctgcaactccaacgcgtaacggtatccgtgttacagtttatgatgatgttaatgacaatggggtatacgacgaaggtgtcgataaagtattaaatagtaaagatatttataacggtatagatggacgtgatggttcagctccaactattactacaaaagataatggagatggaactcacactatcacagttcaaaacccagatggttctgaatcaacaacagttgttaaagatggtaaagacggtaaaactgcgaatatcactacaacagaaaacccagatggaagccacacaattacggtgacaaatccagatggttcaactaaagaaactgttgttaaaaacggtaaagacggtaagactcctaaagttgaagtaacggataacaacgatggaactcatactgttaaagttacagatggagacggcaatgttaccaacgctatcatcaaagatggtaaagacggtaaagctgcaacagcaacaactactgaaaatccagatggaagccacacagtaacaatcactaacccagacggaactaagaatgagtttgttgttaagaatggacgtgacggtgttgacggacgtactccaaccgcatctgttcgtgataatggagacggaagtcatacaatcgttattacaaatccagaaggtgtgacaactgaaaccacagttcgtgatggtaaatcaccaaaagtgactataactgatgaacaaaatggaactcataagatctctgttctaaatggtgacggaacaactactgaaacaatcattaaagatggtaaatcaccagtagcaacagttagagataaccaagatggtacttacactattcgtgtggaaaacggtaatggtactgtttctgaaaccacagttcgtgacggtaaatcaccaactgctaaggttgtggataatggagatggaactcacactatcacagttgtgaactcagacggaataactacaacaactacagttcgtgatggtagagaaccaaaacttgaagttattgataacaacgatggttcacacactattaaagtgacaggtgctgatggtaaaggaacgacaactacaatctttgatggtaaatcaccaaaagcgaacatcgttgataacggagatggaactcatacattaacaatcgtagattctgatggtcgtgaatacaaatctattatcaaagatggtaaagacggcaaagatagcgtttcaccaactgtaactgttaaaaataataacgatggaactcacgttgttacaatcactaatccagatggaagtaagacagaaatggtgattaaagacggtaaagatggtaaatcaccaaaagtttctgttgaagataatggtgatggtagtcatacaatcacaatcatcaattctgatggaactgtgacaaaaacagttattaaagatggcaaagatggtagagatggacgtgatggtcgagacggcaaagacggtaaagatggaaaatgtggatgccaagacaaaccagtaacaccatcaaatgacaaaccagttcctccaacaccaaatgtgccgacaccagaagtaccggttaaacctgtgccagcgcaaccaacaccaaatgtaccgacaccagaagtgccagtacaaccaactccagctgtttcaacaccagaagtaccggttaaaccagtaccagcggttccagaacaaccagtagtaccaacaccggctcaaccagcaactccagtaaatgctaacccagtagcaccaac

SEQ ID NO: 37451 - DNA, 198 bp, Streptococcus pneumoniae
atgctttcagcgtttatcccttccctacatagctacccagcgatgcctttggcaagacaactggtacaccagcggtaagtccactctggtcctctcgtactaggagcagatcctctcaaatttcctaggcccgcgacggatagggaccgaactgtctcacgacgttctgaacccagctcgcgtgccgctttaatgggc

SEQ ID NO: 37452 - DNA, 1323 bp, Streptococcus pneumoniae
gacccaagtagtcagaatttgttgctacaatttgttttattgtttatcttgacggtattaaatgcctttttctcagccacagaaatggccatggtttctcttaatcgtgcccgagttgaacaaaaggcggaagaaggagacagacgctacatccgcctgctgaaggtactagaaaatcctaaccactttttatcaaccattcaggtaggaatcaccctgattacaatcttatcaggggcgagtttaactaatactctaggacgtgtgattgcctcttggcttgggaatggcgaaacagcacaagccgtggcaacttttctatccttggcatttttgacctatatttccatcgtttttggggaattatatcctaagagaatcgctcttaatctaaaggatgccttggcaattcgtacagcgccgattatcaatgggatcggaaaactagtcagtccttttgtttggcttttagctgcttcgaccaatttcttgagccatttgactcctatgtcattcgatgatgcggatgaaaaaatgacccgtgatgaaattgcctatatgctgacaaatagtgaagaaacattggatgctgatgagattgagatgctacaaggtgtcttttcgctcgatgaactgatggcacgagaggttatggttcctcgaacggatgcctttatggtggatattcaggatgatagtcaagccattatccaaagtattttaaaacaaaattattctcgtatcccggtttatgatggggataaggacaatgtaattggaatcattcacaccaagagtctccttaaggcaggctttgtggacggttttgacaatattgtttggaagagaattttacaagatccactttttgtacctgaaactatttttgtggatgacttgctaaaagaactgcgaaatacccaaagacaaatggcaatcttgctggatgaatacggtggtatggctggtttagtgactttggaagacctcttagaggaaattgttggtgaaattgatgatgaaacggacaaagcagcaatagatgttcatcagattggcgaggatacctacattgttcaaggaactatgaccctcaatgatttcaataattactttgatgttgagctggaaagtgatgacgttgataccatcgctggttattatttgacaggagtgggaaccattccaacgactgagaaactcagctatgaattggtcagccaaaacaaacagtttatcttaaccaatgataaagtgaagaatggacgtgttaccaaggtaaaagtccaaatcacagaagtcgaaatagaagaagaaacagaa

SEQ ID NO: 37453 - DNA, 687 bp, Streptococcus pneumoniae
atgaataacaactttaataattttaataacatggatgatttatttaaccaattgatgggtggtatgcgaggatatagttctgaaaatcgccgttacttaattaatggacgcgaagtcacacctgaggaatttgctcactatcgtgcgactggtcaattaccaggaaatgcagaaactgatgtgcaaatgccacaacaggcatcaggtatgaaacaagacggtgtccttgcaaaactaggtcgaaacttgacagcagaagcgcgtgagggcaagttggatcctgttatcggacgaaacaaggaaattcaagaaacatctgaaatcctctcacgccgcaccaagaacaatcctgttttggtcggagatgcaggtgttggtaagacagcagttgtcgaaggtctagcgcaagccattgtgaacggagatgttcctgctgctatcaagaacaaggaaattatttctattgatatctcaggtcttgaggctggtactcaataccgtggtagctttgaagaaaatgtccaaaacttagtcaatgaagtgaaagaagcagggaatattatcctcttctttgatgaaattcaccaaattcttggtgctggtagcactggtggagacagtggttctaaagggcttgcggatattctcaagccagctctctctcgtggagaattgacagtgattggg

SEQ ID NO: 37454 - DNA, 891 bp, Streptococcus pneumoniae
atgaattttgtgttatctagtttatcagaaggtttgttgtggtcgattgtggcgattggggactacttgactttccgtattttggatattgcggatatgactgctgagggagcctttcctctgggggcagcagtcgttgtatcacagatacaggcaggggcaaatccttggcttgcgactttacttgctttgctggcaggtatggtagcaggtcttgtatcaggaatgctccacaccaagatgaaaatcccagctctcttgacagggattgtgaccttgacagggctctattcaatcaatattaaaatcatgggcagtgtacccaatctttccttgggagattctgcaaccgtctttaaacagttggcgagcttgggtctgacaaatgaaggagctgttttctcacttagtttggtctgttttttacttgtttgtttggtcttgacccttttgatgaaaacagagattggcttggtcttgcgttcgactggggataatatcccgatgagtgaggccaatggagtcaatgtagacaccatgaagattgttggttacatgatttcaaacggtttgattgctctatgtggttccttgtttgcccaaaatgatggattttcagatgtgacttctgggacaggaaccattgttgttggtttgagctcggtgattattgcggaagtcttgatacacgacttgaccattggaggccgcttattatccatcggaatcggtgctattgtttaccgtttgattattttaaatatctatgaaattccaaatctagatcaaaacttggtacgtctctttaatgcaatcttgctcgctttggttttatttgcaccagaattgcaaaagagattaaagattcgtggtctgaaattgagaaatgaa

SEQ ID NO: 37455 - DNA, 581 bp, Streptococcus pneumoniae
atgaaaacatcccttaaactttatttcactgccctagtggccagcttcttgctcctacttggtgcatgtagtacaaactcaagcactagtcagacagagaccagtagctctgctccaacagaggtaaccattaaaagttcactggccgaggtcaaactttccaaagttcctgaaaagattgtgacctttgacctcggcgctgcggatactattcgcgctttaggatttgaaaaaaatatcgtcggaatgcctacaaaaactgttccgacttatctaaaagacctagtgggaactgtcaaaaatgttggttctatgaaagaacctgatttagaagctatcgccgcccttgagcctgatttgattatcgcttcaccacgtacacaaaaattcgtagacaaattcaaagaaatcgccccaaccgttctcttccaagcaagcaaggacgactactggacttctaccaaggctaatatcgaatccttagcaagtgccttcggcgaaactggtacacagaaagccaaggaagaattggccaagctagacaagagcatccaagaagtcgctactaaaaatgaaagctc

SEQ ID NO: 37456 - DNA, 180 bp, Streptococcus pneumoniae
atgaataaacgcgtacaagcatttctagctaaaatgcaagaaaaagaactagatggtatcatcatcaacaatcttaaaaacgtctattatttgactggtttttggggctcaaacggaacagtctttatcagccgtgaccgtcaggtcttagtgacagactctcgctatatcatcgcagct

SEQ ID NO: 37457 - DNA, 795 bp, Streptococcus pneumoniae
atggcaaatcgtaaaattgtagtagctttgggaggaaatgcgattctttcttctgacccatcagcaaaggctcaacaagaagctttagttgaaacagctaagcatcttgtaaaattgataaaaaatggagatgatctgattatcactcacggtaatggacctcaagttgggaatctcttgctccaacatttggcatcagactctgaaaagaaccctgccttcccactcgactcacttgtcgctatgacagaaggtagcatcggtttctggttgaaaaatgctttgcaaaatgctctcttggatgaaggcatcgaaaaaaatgttgcctctgttgtaacgcaagttgtcgtagataaaaatgatccagcttttgttaacttgagtaaaccaatcggtcctttctattcagaagaagaagcaaaagcagaagccgaaaagagcggagcgactttcaaggaagatgctggccgtggctggcgtaaggtcgttgcctcaccaaaacctgttgacatcaaagaaattgaaaccatccgtactcttttaaataatggtcaagtcgtcgtagctgcaggtggtggcggtattcccgtcgtcaaagaaaacaatggacatttgactggtgtcgaagcggttattgataaagacttcgcttcccaacgtttggcagaattggttgatgcagacctcttcatcgttttgacaggtgtagattatgtatttgttaactacaacaagccaaaccaggaaaaattggaacatgtgaatgttgcccagctagaagaatatatcaaacaa

SEQ ID NO: 37458 - DNA, 990 bp, Streptococcus pneumoniae
atggaagaactaaatgaccagcagatcgttcgccgtgaaaaaatggctgcgctccgcgaacaaggaatcgatcctttcggaaaacgttttgaacgtactgcaaattcacaagaattaaaagataaatataccaacctcgataaagaacaattacacgataaaaacgaaacagctactatcgcaggacgcttggtaaccaaacgtggtaaaggaaaagttggttttgcccaccttcaagaccgcgaaggccagattcagatctacgttcgtaaggatgctgtcggtgaagaaaactacgaaatcttcaaaaaagcagaccttggtgacttccttggtgtcgaaggtgaagtgatgcgtacggatatgggagaactctctatcaaggcaacccacatcacacacttgtctaaggctcttcgtcctcttcctgagaaattccatggtttgacagacgttgaaacaatttaccgtaaacgttaccttgacttgatttctaatcgtgaaagctttgaacgctttgtcactcgttcaaaaatcatctctgaaatccgtcgttaccttgaccaaaaaggattccttgaagtggaaacacctgttcttcataatgaagccggtggtgctgctgcccgtccatttatcacccaccacaatgcccaaaacattgacatggtgcttcgtatcgcgactgagcttcacttaaaacgccttatcgtgggtggtatggaacgtgtctatgaaattggccgtatcttccgtaacgaaggaatggacgctactcataaccctgagttcacttctatcgaagtttaccaagcttatgcagacttccaagacatcatggacttgactgaaggcattatccaacacgctgctaaatcagtcaaaggtgatggcccagtcaactaccaaggtactgaaatcaagattaacgaccatttaagcgtgttcatatggtggatgctatcagagaaatactggtgtcgattctgg

SEQ ID NO: 37459 - DNA, 498 bp, Streptococcus pneumoniae
atgaagacggcttttataatcattgatgttcagaatgttttagtagaaactgggttccagacaaaaagtctattggaaaaaatttcttatttacaaaaccaggctagaagcaagaatattgaaattatctatgttcaacatattgagaactctgaagctcaaacatcagaagattggcagttatctgcgcttttaaatcgaaaacctgctgaaaaggtctttcagaagaagtataacagtattttcaaagaaactggcttaaaagaatacttggataagcaggggattgaaaaattagttttatgtggtatgcagacagaatattgtgtggatacctctgtcaaggttgcctttgaatatggctatcagcttattgttccagaaggtgctgtcacaacctttgatggggatgacattccagcagaaacgattaatgaattttatgaggacatttgggaggagcgctttgcagatgttctagattacaaacatattttc

SEQ ID NO: 37460 - DNA, 1125 bp, Streptococcus pneumoniae
atgtggatggaagaactttccaacggaaaatacaaattttttgagcgatacaaagacccttatactgagaaattaaaaaaagtttcagtaaccatggagaagaaaactccccaggcaagaaatcaagctgctatcttgttacaagagaagataaataaaaaactcagcacaaaacaagtagaaagcattacatttgaagaaatctataaccttttctataaatcatgggcgcaaacagtaaaggaatcaacaaaacataattgtaaatcagttgataagaagatgaaggaagtcataccatccgataccatacttgctaatcttgacaggcgttttcttcaagaggctattgaaaaaattattgaaagcaacggatatattacagctaaaaaagtacggcataggctcagaggtatctttaattacgctgttcaatactcttacattgaaaacaacgaggtcgattatactacgattcctcaaaaaccaaagactttagaagaactggaaaaaaagcgtaacaactttctcaccatgcaagaaataaaagcacttgtcgatgtccttaatcgtcgagaatatcaccaaaagtacgctgatatggttcttgtgctgacattaactggtatgagatatggtgagttaactgccttacaactgaagaatatagacttcgaaaacaacaaaattgagatcacaggtaattttgattcagtaaacaaaatcaagacgctaccaaagactacaaattcaatacggacaatcaaagtatcagagagtgtcatagaagctattcaaagacaaatagtacgacttagcgaacgtttccagccattgtcaagcgatgattatattttctgttttgaaaaatggaatcaacctacaacaatagcttgcttcatacagatattaaaaaaatatggaaaacaggccaaaatagaaaaaaatttatctagccatatttttaggcattctcatatttcgtttttagcagagtctggcctcccaataaaatcaataatggatcgagttgggcactcaaatgcaaaaatgactttggaaatctattctcatactactgaagatatggaggataaactggtcaataaattagatactattttt

SEQ ID NO: 37461 - DNA, 1176 bp, Streptococcus pneumoniae
atgaccttatctaagaaacaattacaactaagagctaaaatactggaaacagtttacacattaggtcccatttcacgaattgaaatcgctactaaaacaggaataacacctgcaacaactagcagtatcacaaatgatctgattaaagaaaatattctcttagaacttggtgaagacgaacacgatacaagcgtagggagaaaaaaaatcctgctagacattcaagctaaacgattttactacattggttgtgaactatctgaaaaacatttcacttttgctttaggagataatctaggaaatatcttaaaggaagagaaagaaattgttactaaacagttaatccaagaaaagggaaatcaactcattaaccagacactaaagcaattcttaaataactgctctgattatgaaatagaagcaattggaatcgcgctacctggtcgctatttagatgattataaaataacaacaaacaatcctttatggcaacatatcgacttagaaatgattcaatcccactttgataagcctttgtttttctctaacaatgttaactgtatggctataggtaaacgcctatttagtcgccaacagaatgaccctaattttgcttattttcattttgctagaggtatgcactgttcttatatctacgacggaaacatttatgggaaaggaaatctaatgattggagaaatagggcatacagttgtttcatctgagggagaagaatgtagttgcgggcgcaagggatgcttacaaacttttgctggagaatcttggttaatcaaaaaatcaaaaattctatatcatcaatctccctattctctacttcctagtttagtcaaaaatgccgatgatattgatatccaagttattttaaccgcttatcaattaggtgacactggaataatcacacttatccatcaagccttactctatcttagtcaaaccattttaaatatcagtatgatgattgactctcaaaaaatctacctacatagtcctttactaacaaatcaacacatcatccaaaaactatatagtgaaatgaactacaaacccaaactgctctataatcgcctacctgaagtcattattgaaccttacaatgattttacagccgcacactcagctattgcactttgtttgtatcatacaattctacattct

SEQ ID NO: 37462 - DNA, 1671 bp, Streptococcus pneumoniae
atggtactggataaggcaagttgtgatttgcttcaatatttgatggatcaagaaacgtccaaaacgattatggcgatttcgaaagatttgaaagagtcaagaaggaaaatttattatcacattgacaaaatcaatgctgctctggttgacgaggcgcttcacatcattagtattccacgaattggtattcacttaacggaagagcagagagatgcttgttgtaaactattatcggaagtagattcgtacgattatatcatgagtgcgcatgaacgtatgatgataatgttactatggataggtatttctaaagaacgtattacgattgaaaaattgatagagttaacagaggtatctaggaatactgttctcaatgatttgaatagtattcgttatcaactaactttggaacaatatcaggtgatcttgcaagtgagcaagtcacagggataccaccttcatgcccaccctcttaataaaattcagtatcttcaatcgcttctatatcatatttttatggaagaaaatgccacttttgtatctattttagaagataagatgaaagagaggttagatgatgagtgtttgctttctgttgaaatgaaccaattttttaaggaacaggttcctttagttgaacaagatttagggaagaaaataaaccatcatgaaataacttttatgttgcaggttctaccttatttgctgttaagctgtcataatgttgaacagtatcaagaaagacatcaggatatagagaaagaattttctttgataagaaaaagaatagagtatcaggtgtctaagaaattaggagaacggttgtttcaaaagtttgaaatttctttgtcaggacttgaagtttctcttgtagctgttctcctcctctcctatcgtaaggatttggatattcatgcagaaagtgatgattttcggcaattaaaacttgctttagaagaatttatctggtattttgaatcacaaatccgaatggagattgagaacaaggatgatttgttacgaaatttgatgatccactgtaaagccttgttatttagaaagacttacggtattttttctaaaaatcctctaacaaaacaaattcgatccaagtatggagaattatttttagtcactagaaaatctgcggaaattttagaaggagcatggtttattcggctaacagacgatgatattgcctatttgacgattcatattggaggatttttaaagtatacaccatcgtctcaaaaaaatatgaaaaaagtttatctcgtttgtgatgaaggtgttgcggtttcgagacttttgctgaaacaatgcaaactttattttccaaatgagcaaattgacactgtatttacaacagaacaatttaagagtgtggaagatattgcacaagttgatgtagtgattactactaatgatgatttggatagcagatttccgattttaagggttaatcctatccttgaagcagaagatattttgaaaatgctagactatcttaaacacaatatatttcgtaataagagcaaaagtttcagtgaaaatctttctagtcttatttcgtcttatattgtagacagcaagttggctagtaagttccaagaagaggttcaaacacttataaataaagaaatagtagttcaagcttttttggaagatatt

SEQ ID NO: 37463 - DNA, 653 bp, Streptococcus pneumoniae
atggttaaatacggtgttgttggagcagggtattttggagctgaattggctcgctacatgcaaaagaatgatggagcagagattactcttctctatgatccagataatgcagaggcgattgcagaagaattgggagcaaaagtagcaagttccttagatgagttggtttctagcgatgaagtagattgtgttatcgtcgcaactccaaataatcttcataaggaaccggttattaaggctgcacagcatggtaaaaatgttttctgtgaaaaaccaattgcgctttcttatcaagattgtcgcgagatggtagatgcgtgtaaagaaaacaatgtaacctttatggcaggacatattatgaatttctttaatggtgttcatcatgcaaaagaactcattaatcaaggagttatcggagacgttctatattgtcatacagctcgtaatggttgggaagaacaacaaccgtcagtatcatggaaaaaaattcgtgaaaaatcaggtggtcacttgtatcaccacatccatgaattggattgcgttcaattccttatggggggcatgcctgaaactgtaaccatgacaggtggaaatgtggcccatgaaggtgaacatttcggtgatgaagatgatatgatttttgtcaatatgga

SEQ ID NO: 37464 - DNA, 1719 bp, Streptococcus pneumoniae
atgcatagaaaaacagtgattgattttaggactttgggggagagatatacctttacccagcctattaaagagttgaaaacgagaaatgtagaagaagtggcagatttgctggcacaagtggaaagctaccaagagcaaggttattatgtggtggggtatgtcagctacgaggctgcacctgcttttgaggaaaaattagcagttcacaaggatcccctactgggagagtacctgctttattttactgttcatgatagcgtagaaacttcccctattcctctgacttatgaggatattgatttgccctcaaattggcaggaagtaacgtctgcagcagactatgaaaaggccattgcccaaattcaccatcatttacggcagggagatacctatcaggtcaactacaccgtccaacttaagcaaaagttaaatgccaatccttttgccatctacaatcgtatggtggtagagcaggaggcgggctacaatgcctatgtggaacatgacgagatggcagtgatttccatgagcccagagctcttttttgagcaaaatgatcgcgagttgacaacacgaccaatgaaggggacgactcagcgtggggtaactgaccaagaagatcttgaacaggccagttggttggaacaggatcccaaaaatcgctctgaaaatatgatgattgtggacctcttgcgcaatgatatgaaccgtatttctgaagttgggagcgagcacgtggagcgtctgtgtcaggtagagcagtattcaactgtttggcagatgacttcgaccatcaagagtcagttgcgagaggatgtggaccttgttgaaatcttccactcactctttccttgtggttccataacgggtgcaccgaaaattgcgacaatggagattatcaaggacttggagcctcaaccgcgtggagtctactgtggaacgattggtctcttgcttccaaatggacgacggatttttaatgtggccattcgtaccattcaacttcacaaaggtcaagccatttatggagttggcggagggattacttgggatagcacttgggaatctgaataccgtgaagttcatcaaaaggcagcagttctctatcgtaaacaagctcgcttccaattaattacaactggaaaaatcagccaaaaacaactgatgtttgaagaacaacatctggaaaggctgagaaaagctagtcggtattttgcttatccttttgacccagaaattttgagacaaaagattgaagcagagtgtcagacttgtgatgctaatcaagattaccgcttgcgaatttctctcagcaagtctggagagatagaattcagtcgtcaaatcttaacacctcttagtccaagtttttgtcaggccaaactttgtctgcaagaagcgaatttgaatcaatcctttacctattttaaaacgacttacagaccgcatttgagcatagaggaacaagagaagatttaccataatggaaaaggagaacttcttgaaacctctatcggaaatttggttctgaaaatcgatgggaaactctacacaccgcctatccgacttggaatcttgccaggaatttatcaccagtatttactagaaacaggacaggtagaagagaaagtcttgaccttggcagattttgcccaagcagaagctatttacggctgtaatgcagtgagaggcttgtatgagttgcaagtgataggattg

SEQ ID NO: 37465 - DNA, 1176 bp, Streptococcus pneumoniae
atgaaaaagtcagtttatatcattggttcaaaaggaattcctgctaagtatggaggatttgaaacttttgttgagaaattaacagccttccaacaagataaggctatccaatattatgtggcttgtatgcgtgaaaactctgcaaaatcagggactactgaggatgtttttgaacataatggtgctatctgttataacgtcgatgttcctaatattggtccagcgcgagctatagcgtatgatatcgctgcaattaacagagctattgagattgccaaagaaaataaggatgaagatccaatcttctatattttagcttgtcgaattggtccgttcatccatggaattaagaaaaaaatccaggagataggtgggactcttctagttaatccagatggccacgagtggttgcgagctaagtggagtgctcctgttcgtcgctactggaaaatttctgaaggtcttatggtcaaacatgcagatcttttagtgtgtgatagtaaaaatattgaaaaatatatccaagaagattataaacagtatcaacctaagacaacctatatcgcttatgggactgatacaacacgctccgtattaaagagtagtgatgaaaaagtacgttcttggttcaaagagaagaatgtttctgagaacgagtattatctagttgtaggacgttttgtaccagaaaacaactatgaatctatgattcgtggctttttggcgtctaactctaagaaggactttgtcttaatcacaaatgtagaacagaataaattttataatcagttgttggcaaaaactggttttgataaggacccacgagtaaaatttgtaggtacagtctatgagcaagagcttcttaaatatattcgtgaaaacgcctttgcttacttccacgggcatgaagttggtggaaccaatccttcgcttttagaagctctggcatcaactaaactgaatttattgctagatgttggctttaaccgagaagttgctgaagatggtgccatttactggaagaaagataatcttcatgagattattgaaacgagtgaacaaaaaacacaaaaagagattgatgagaaagatatactttcaataaaacaagtgacggagcggttctcttgggaattgatagttaatgagtatgagaaactttttttatgtgagaaa

SEQ ID NO: 37466 - DNA, 1146 bp, Streptococcus pneumoniae
atgattgttttacaatactttaagattttagctagattcgtttttatgtttttgataagtgcggtgttactgcctttcaaaataaaacctaataagattgtttttattaatttcaatgggaaaggatatggtgataatccgaaaagtatttgtgagtatcttagaactacttacccagatttagatttggtttggcttgcaagagataacgaaggttttccagatggggttagggttgttaaatatgggactttccaagctttttatgagcaagcgagttcgaaggtttgggtatataatgtaagagcttttgcaagaatactaaaaaaacgaggacagatttatattcaaacttggcatggtgcttctagttttaagttgatagaaaaacaagctgatttaccaataaattatgttttagaagctaagtatgatgcaagagtcacagatataatgatttcagatagcagaaaacaaactgaagaatttcaaaagtatttttggtattcaggagaaatttttgaggtggggatgccgagaaatgatgccttgtttcactataaggaagactacgacaagttaaataatatcagaaaagaactaagcattcattcagatgattatgttattttatatgcccctactttcagagatgatggggatgcatcttatttagatataaattttgaacggcttttgcaatgtgttgaacacggaattaaaaagaaatgtaaattcttaattaggttacaccctaatcactcccatttgtgtaataatatttcatttaataagaatataatcaatgctacgttttattcagatatgcaagagcttactttgttggcagatgttttagtcacagattattcttcctcgatatttgattttatgcttttaaacaagccttatgtcagatatgtgaatgatttagaaaaatatgctgagcttaggggggtatcagatacatattacgaattgccggattcgattattaaaactgctgaagaattgtatgacttactgcctaaaaaaatagaaaattttgattatgattctataaaaaaatatagaaatgaaatactgtgtccaatctttaatggaaccgctagtgaaaatgtaggagggagaataattcaagagttg

SEQ ID NO: 37467 - DNA, 6477 bp, Streptococcus pneumoniae
atggaaaagtattttggtgaaaaacaagagcgtttttcatttagaaaattatcagtaggacttgtatctgcaacgatttcaagtttattttttatgtctgtattagctagttcatctgtggatgctcaagaaactgcgggagttcactataaatatgtggcagattcagagctatcatcagaagaaaagaagcagcttgtctatgatattccgacatacgtggagaatgatgatgaaacttattatcttgtttataagttaaattctcaaaatcaactggcggaattaccaaatactggaagcaagaatgagaggcaagccctagttgctggtgctagcttagctgctctgggaattttaatttttgctgtttccaagaaaaaggttaagaataaaacggtattacatttagtattggttgcgggaatgggaaatggtgtcttagtttcagtccatgctttagaaaatcatcttttgctaaattacaatacggactatgaattgacctctggagaaaaattacctattcctaaagagatttcaggttacacttatattggatatatcaaagagggaaaaacgacttctgattttgaagtaagtaatcaagaaaaatcagcagccactcctacaaaacaacaaaaggtggattataatgttacaccaaattttgtagaccatccatcaacagtacaagctattcaggaacaaacacctgtttcttcaactaagccgacagaagttcaagtagttgaaaaacctttctctactgaattaatcaatccaagaaaagaagagaaacaatcttcagattctcaagaacaattagccgaacataagaatctagaaacgaagaaagaggagaagatttctccaaaggaaaagactggggtaaatacattaaatccacaggatgaagtgctatcaggtcagttgaacaaaccggaactcttatatcgtgacgaaactatagaaacaaaaatagattttcaagaagaaattcaagaaaatcctgatttagcagaaggaactgtaagagtaaaacaagaaggtgcattaggtaagaaagttgaaatcgtcagaatattttctgtaaacaatgaagaagtttcacgagaaattatttcaacttcaacgactgcgcctgtttcaagaatagtcgaaaaaggtactaaaaaagctcaagttataaaggaacaagctgagactggtgcagaacataaggaagtacagtctggagctattgttgaacccgcaattcagcctgaactaccagcagctgtattaaccgacaaaggtgagtcagcagtccaaccagagttgccagaagctgtagtaagtgataaaggcgtaccagaagttcaaccagcgttaccagaggcagtcatgactgacaagggtgatccagagcaggtagaaccgctaccagaatatacaggagtacaagctggcgctattgttgaacctgaaaaagttgaaccggaatatgctggagtacaagctggcgctattgttgaaccagagcaggtagcaccactaccagaatacacaggggtgcaagccggagcgatagtcgagccagagaaagtagaagcaccgaaggaatacacaggagtgcaggctggagcgatagtcgaaccagagaaggtagaagcaccgaaggaatacacaggagtgcaagccggagcaatagtagaaccagaaaaagtagaaccatcaaaagaatacacaggggtgcaggctggcgctattgttgaaccagagcagatagcaccactaccagaatacacaggggtgcaagccggagcgatagtcgagccagagaaagtagaagcactgaaagaatatactggtaaaatcgaacaacctagtgcagaagatactaaaccaaataatgaaaatactaatacaccagaagaaatgagtattcagaaaaaatctagtgcattaattaatatgaactttattacagattcgtcgaaggttactggagtaggatcagctacttttattgcaccaaatgtacttttaacagtagcacataatttcattaataattctactgataatactactggcgaatttagaggtgataaatctaaaaacgtatatgagtgggtgactcctgatggacaaaaaggaacatttactgctaacaatattcatttttataataaaaaagattatccaaaaggatttatctatgatttagcagtgattaagctacctgaaacaactggcagagaacatgtagaattagttaaaaattattcgaaagtaaatcttaatgacaaactaaatgttcatggatatccagctgggaaatatacgcacttaaaagatgctacggtagaaatggaacaagaatatgcgaataacacctacggtgttcaatatcaaggtggaaatcctggtatgagtggtggaggaatatttaatgctaatggtgaagttattggtgtgcatcaaaatggagcacaaaatcgctcaggcggattgattttatctcctacacaattagcttggattaagagtattatagcaggtaatgaaattccaccagtatacgatgaactttatcgtcataaagatgagaaaaaagatgacgctaaagatgaaaaagaagttattaagaaattagaacttagaaatatatcttctgtagaactatattcaaaagatggtaataagtatcgacatgtaacttcacttgcttctttaccaagtaatgcagaaaattactttatgaaagttaaatcagagaactttaaagatgtgatgctaccagttacaagcattactaatgatactaaagataatagagatgtttataagatagtagcaagtgcaaatagtctgatacaacatgaaaataataatgtactagaaaattatacatactatttaccaaaaactcagcaaagtgaaactggggtatatacatcatttaaaaatttagtagatgcaatgaatagcaatcctaatggcacattccgtttaggagcaactatggatgctcgtgaagttgaacttccagatggtcaagaaagttatgtgaataatgtattccatggaatattagtaggaacaaataatgagaaatattatgctatttataatttgaaaaaaccattatttggggaattaaatggtgctacagtagaaaaactttcactaaaagatgttaatatttccgcaaaggacgatactgcaacacttgcgaaagaagcaaataacaatactcatattgataacgttcatgctgatggagcgatagctggggaacgtagcataggaggattagtatcacaagttaataattctactatttctaacagtagctatacaggtagaataactaatacatataaaacagttgctagttatcaaatcggaggtttagtaggcaaactttctggtccgaggggattaatagataagtcgttcgcatcaatcgatttatcttcaaatgcaacacaaggagaccagtctattggtggaatagttggtgcagtagaaaatagtgcgcttattagtaatagttatgctgaaggaaatctaaataatgttcaacgttttgcaaacgttggtggagtagttggtaatctttgggatccggttggaggattagaaaaatccggtcgactttctaatgtactaagcgatgttaatgtaacgaatggtaatgctattgcaggttataattttaatggtataaaagcaaatggcacatacagtaataaaaataataaggttgtgaacgtagtacaagaagatgatgaaatcttaactaaggattctactgttcaaagaggagaagtattagaagatgcacaaataaaagagaaaaaagctacttttgtatctaaaaatactattaaaacagaagattttaatttctcttctagatatgtaactgactataaaaatcttgagaatgctgattcatcaaaagaaaaagtatataaaaatattgaaaaactattaccgttttataatagagaaacaattgttaagtacggaaatttagtagagacaagtagtaatctttataataaagaattattgtcagtagtccctatgaaagataaagaagtaattagtgatattaacaaaaataaatcaagtataaataaactattactatattacgcggataatacatcagagacacttaatgtaaattatcaaactgatttttcaaatgtagcagagtatagaataggcggtacaaacttaatttatacaccgaatacattacttcgcaattatcaaaatattttagatgaagtattaccagcattaaatagtgtagaatataaatcagaggcaattagaaaagtattagatgtttctaaggatgttagtttaacggagttatatttagaagaacaattcaataccacaaaaactaatttgaaagatagtttgacaaaacttcttactgcagatgctgcaatagctgaaaataacaataaggtaatagataattatgtaatcgagaaaattaaaaataataaagaagctttacttctaggattaacatacttagagcgttggtacgacttcaaatatcgtgatacaaaagcgaaagatttagtcatgtaccacttggatttcttcggtaaatcaaatagttcagcgttagataatgttatcgaactaggtaaatcgggatataataacttactagcaaaaaataatgttataacttataatgttttattagcgaaaaattataagactaataatttatttgatgcattagagaaatatagaaaagcatttgtaccagataaaacaaataatgagtggtttaaagaacaaactaaagcatatattgtagaagaaaaatctactattaaagaggtaagtgataagcaatcaatagctggtagtccatattcaattggagtatatgatagattaactagcccatcttggaaatatccaagtatggtgttgccgctattaacattacctgaaaaatcggtgtttattatagccaacatttcgactataggtttcggtgcttatgatagatatagaagtaaagaacatccagcaggaactgatttaaatgactatgttgagaaaaaagctaaagaagcggctgttagatttagagatcactatgattattggtatagaatactagatgataaaaataaagaaaaattatatagaagtgttctagtctatgatgcatttagatttggtacagatgaaaaagaagataaagatacatatcaagcaacttttgaaactaatcatccagctataaaacatttcttcggtccagcgggaaataatgttgttcataattctaatggagcatatgctacaggggatgcattctattatatggcatatcgcatgcttgataaagatggtgcggtaacttatacacacgaaatgacacataactcagatagagaaatttatcttggaggctatggaagacgaaatggacttggaccagagttttatgctaaaggactgctacaagctcctgatcatcctaatgatccaacagtcactattaattccatattaaaatatgatcaatcagaagaatcaacaaggcttcaagtagcagatccaactcaacgatttggaagtgttgatgatctaaataagtatatgcataatatgtttgatgtaatatacatgcttgaaatactagaaggtaaagctgtagctaaattagatacaaatcaaaaatatgatttattaagaaaaatagaaaatgaatataaacctgatcctgatggaaattctgtttatgcaacgaatgttgtacgtagattaaaaccagaagaacttactaaattaactacatttaacagtttgatagaacatgatattataacaagaagaggttatgtagatgaagcaacttataagcggaatggctactatacaattaatctattctcaccaatttattcagcattgagcagtaaaataggaacaccaggagatttaatgggacgacgtattgcatttgagttattggcagccaaggggtacaaagacggtatggttccatatatttctaatcagtatgaaaaagaagcgaaagctcaaggaaaagttattacatcatatggtaaacaaataggtttagttactgatgaaattgttctttcaaaagtatttaataaccagtataattcttggatagatttcaagaaagatatgtataaagaaagagaagataaatttggaaagttaaataaagttagttttatcgatccaaacggttcttgggctcgacaacagaaagtgactattgataatattaatagacttgaaaaaatgattgaagatgcagtaaaatttgatgctgaggatgaagttgccaaattatatcctgagacaaatagtagagttcttaaactgaaaaaagcaatctttaaagcttatcttgaccaaaccggtgattttagaagttcaatttttgagaataaaaaa

SEQ ID NO: 37468 - DNA, 434 bp, Streptococcus pneumoniae
tcatctgaacaagaaattacgatttattcaccaatcaatcaagaagaattgggtacagttccagccatgactcagactgaagctgatgaggctatgcaagctgcgcgtgcagccctgccagcatggcgagctttatcagcagttgaacgtgcggcttatttacataaaacagcagctattttagaacgcgataaggaagaaattggtactatccttgccaaagaagtagcaaaagggattacagcagcaattggagaagtagtgcgtacagcagacttgattcgttatgctgctgaggaaggtctccgtatcactggacaagcaatggaaggtggtggttttgaggcagcaagtaaaaacaaactggctgttgtccgtcgtgaaccagttggtatcgtgctagcgattgctcccccctttaatttatcagttaa

SEQ ID NO: 37469 - DNA, 1278 bp, Streptococcus pneumoniae
ttgccaaattgtatcattgaaattattgctcaaatttgttatgatataaatatgaataaaagtagactaggacgtggcagacacgggaaaacgagacatgtattattggctttgattggtattttagcaatttctatttgcctattaggcggatttattgcttttaagatctaccagcaaaaaagttttgagcaaaagattgaatcgctcaaaaaagagaaagatgatcaattgagtgagggaaatcagaaggagcattttcgtcaggggcaagccgaagtgattgcctattatcctctccaaggggagaaagtgatttcctctgttagggagttgataaatcaagatgttaaggacaagctagaaagtaaggacaatcttgttttctactatacagagcaagaagagtcaggtttaaagggagtcgttaatcgtaatgtgaccaaacaaatctatgatttagttgcttttaaggttgaagagactgaaaagaccagtctaggaaaggttcacttaacagaagatgggcaaccttttacacttgaccaactgttttcagatgctagtaaggctaaggaacagctgataaaagagttgacctccttcatagaggataaaaaaatagagcaagaccagagtgagcagattgtaaaaaacttctccgaccaagacttgtctgcatggaattttgattacaaggatagtcagattatcctttatccaagtcctgtggttgaaaatttagaagagatagccttgccagtatctgctttctttgatgttatccaatcttcgtacttactcgaaaaagatgcggccttgtaccaatcttactttgataagaaatatcaaaaagttgtcgctctaacctttgatgatggtccaaatccagcaacgaccccgcaggtattagagaccctagctaaatatgatattaaagcgactttctttgtgcttgggaaaaatgtttctgggaatgaggacttggtgaagaggataaaatctgaaggtcatgttgttggaaaccatagttggagccatccgattctctcgcaactttctcttgatgaagctaaaaagcagattactgatactgaggatgtgctaactaaagtgctgggttctagttcaaaactcatgcgcccgccttatggagccattacagatgatattcgcaatagcttggatttgagctttatcatgtgggatgtggatagtctggactggaagagtaaaaatgaagcatctattttgacggaaattcagcatcaagtagct

SEQ ID NO: 37470 - DNA, 1191 bp, Streptococcus pneumoniae
gtgactataaaaattaataatttgttttttgtttgtctatccttttttgggatagttttaagtagttcacaagtgatagtgaacttgggattgtctagtattattcagtacatttcttattttatgttgatgttgtgtgtatttttaacattaattaagaatactctcaacgtgtttgcaaatagaatcatatattttttgattatttcatttttgtttattattgggattaatttacaaaatcttccattatcaagaaagatttatttatcattctctatgttaattatttctagcttatccaccttaccgataaagctaataaataatctcagtgatttaagaaggatatcatattacttattgcacagcatatttttatctgtatttttaggtttggtttttaaaatatctttagtaacagttgctgtagagggaattggcttttcatatggttttaatggaggtttgactcataaaaatttttatgcaattacaattttagtttcctatattctactatatgtcagcagaaaatatgacgctaaacatcagattgatagttttgtattatggttggatctttttttacttttaatatctaatacgcgaacagtttatataatactagttgttttttggattattattaatagaaattttataaataatattaaaaaagagcatagactggtagtgacagcaacgacaatagtcatctctttactggcgttaacattttttttcaaacatataattaataatagtgaatcatatagccatcgagtgttaggtgttgtgaatttttttaaatattatgaatcagataggtttcatttgttttttggggatgctgaattagcctttggaaatacgacgaagggttatggacacaatattagaagtgtgttaggttgggatggaacggtagagatgcctttactcagtgtaatgattaaaaatggttatgttgggttagttggttacattatagtgctgtttaagtttatatcttcaataatctcagttaaaaatagcacaaaaaaaaatattggattatcaatctttattccgttacttctatctgcaacagttgaaaattatatcgtcaacattagctttgtattcatgcctgtctgcttttgtattttatgttcaattaaaaatataaaattagtaaataacagaaag

SEQ ID NO: 37471 - DNA, 1136 bp, Streptococcus pneumoniae
atgtggatggaagaattgccaaacggcaaatataaattttttgagagatacaaagatccatatactgagaaattaaaaaaagtctcagtaacgatggagaaaaaaactccccaagcaagaaatcaagctgcgattttacttcaggaaaagataaaacaaaagttaggagaaaaacaacattctgtttctaatataacttttgaaaaactatatgaagaatttgaggagaattggaaacacggcgtaaaaaactcaaccgtctacgcttcaaagaatgtaaaaaaagagattttaaagcagatagagggcgactacctagttagaaatttgatagacgtttattacaaaaagtaatagatcaactattacaagatgggagatctcataactatgtttctaaaatcaaattcaagctcaatcagataatgaaatttgctatcagaatgaattatattgatacaaatgaaatgctatttgttgaaacgcctagaaaagtaattacatccgacgaactcagaaagaaaaatacaaaatacttagaccaaaaagagtttaagttattcatccaaaatttaaaagacgaggccctatgtgattatcgaattacaaagtatatccgaatagctaaagttctttttcttactggcatgaggtatggagagctggcagccttaaactacaaggaagatatagatttttctaaaaagactattcacatcaagcatacatacgatttcagacaaaaagagagaactacaccaaagacaatcaagtccgatagggttataacagcacctcaaaaagtgttagatattatcaaagagcaaataatagagaatgcgacaaatggatttgatacagattttattttcatcaatactctaggagaaccaataacaaatgccagggttatttgtgcattgaaaagacatggtcaaaaaatcggcatagaaaaaaacataactacacatacatttagacattctcacatatccctacttgctgagctgggcattcccttgactgccatcatggacagagtagggcatagtgactcaaagaccacactagagatttattctcacgttactcaaaaaatggtatcagacatatctagcaagttagacaagataaaa

SEQ ID NO: 37472 - DNA, 729 bp, Streptococcus pneumoniae
atgattggctttctggcccatccctttaaagactttaaagaaaatgttttgtactttattccagttgccatcggtatgcttctgggaatcggcttattttcctacccgattgaatacctgcttgaaaattatcaggtttttgtattatggagctttgcgggagctattatcggtacagttcctagcctcctcaaagaatcaactcgagaatctgaccgagacaagattgatttagcttggttatggacaacctttatcatttctggattaggactctatgccttaaattttgtcgttggaaccttaagcgccagctttcttaacttcgtcctagcaggcgcactattggcccttggcgtcttggttcctggcctcagcccatcaaatttacttttgattttgggactctatgctcctatgttgactggttttaaaacttttgatttcttgggaaccttctttccgattggaattggtgcaggtgcaactctcatcgttttttcaaaattgatggattatgccttaaacaactaccactcacgtgtctatcatttcatcatcggtatcgtcctatcaagtacccttttgatcttaattccaaatgcaggaaacgctgaaagtatccaatacacaggactttcacttgtcggttatgtcatcatcgccttcttctttgcgctgggaatctggcttggtatttggatgagtcaattggaggataaatataaa

SEQ ID NO: 37473 - DNA, 726 bp, Streptococcus pneumoniae
atgagtaatgtagataagattcgaaaaatacatattatcgtttgttggatgtatatatttttatcattcagggcgattataaatgacacggagtattttttgcttatttttttagcttttatctactcaatagtatcactacctctatattctgtgaaaaataaaatagtatctatctgtctagttataaattcgattctgttaatgagttttcccattttaatcaataaatttttcccagaaagttttttgacttatatcgtattaataagtgtttttattacagagttgataatttttcatttaattgggaaagattttgatactaaattgactaacgaatataagaaaattagtcagtttagaagcaaggtgtctcaatctccttggataaaatatttagagatttctagttttatattaactatatttccatctattctttatggtacagttgataatcatgtactgactcttatctttttgataaaaatttgtgtagatactacgataaaatttttattcatcagattatttgacacaagtactttaatgaagaggagaatattttttcttttcgcattggatgttatagcttacttatttttaggatatcttttagtgattcaaaaagcaggctatttgttttcggttttacttcttttttctaatttttcagttccatttatcaaagaaaaggaatacgaattatttaaaaatagcaag

SEQ ID NO: 37474 - DNA, 1612 bp, Streptococcus pneumoniae
aaattagttgatatcaatatcctctattcatctcaagaagctaatctggctaatctacgaaagaagcaggctaagaatcctgggaaaaaagtaaatgtttctgctagagtcctaagttcttacattttttccagtctcttgatgctcatctgttttagtaatatagccattcattttccttttgaggaaatgcctatttattttagctcgatggttgctattttactggtgctggccttttcaacttctttcactgccttttacaatgtcttttatgagagtaaggacctggcctcctataggccctatgcctttaaagaatcagagattataatggccaaaggtctgtctgtcctcttgccagctctaactggaattgtaccaatcctagcttattttctagccctctatattagtctagctccttctctttggctgggtttgcctttgatgctactgtccttgaccttattatttgtctctgttactttagtgacggtagtggcagtacatttcttggctcagactagggtcttcagaaagtatcagtctattttttcgaatgtgatgattgggataggagttctcatacctttaatatttatcttctttcttcagtcgacttttggaagtattgttgacaaagttagagacattccatttctcctttatcctcttcatatcttttacaaaatagcagtggagcctttttcgacagaagccttagtgggtctgctcgcttggataggactaactctcttcctgctttatctgaccaaaaagaaggtccttcctcgtttttatgacgtgatcctgcttaacagtgaggagaaggtcaaaaaagaacgtcgcagcaaggagaggatttcaactactaaaaagggctttttccgtatggttttacgctaccacctcaccctcttgggacaggggactggtgtgattacagtgctttttacaagtgctttccttccttatctcatgatgatcagtctgatttccaaaatccgagattctcagatagttccagacattcatcctccatactggttacccttgttttttgtaggagtgtttatagcagttgtcaataacaatatcaccagcctgcattcaattgccttgtccttggagagggaaaatgttgattttctgaagagtttaccctttgactttgctcgttatgtgaaagtgaaattttggattatctttgctgttcagtcctttttaccagttctgactttgctcggtctttctctatatctaggcttgtccatcctttcgatgatttaccttcttgtagtctggatcattgccagtgtcatcctttcttgccaccattactttaaggacgttaaaaatctgtcaaccaattggagtagcattacggacctggtgaatcgttcaaatggcatagtcgccatagttttattgtttatttatagtgcaatcctgatggcccttgtaattgggagcatattcttggttcagtctctctcccctatccttgccatcaacttgggagtaggagctcttatcgtcttgcttgctcttgctatttttggctatcattattacctgtcacgcatattggcagaaatagaaaaaagat

SEQ ID NO: 37475 - DNA, 1980 bp, Streptococcus pneumoniae
atgaaattaaaattatgtatcattggattcttcttttgtttgattgctacaattggtctggtcactattagtgataccgaaatccccatacctttaccaattgatggagctttttctatccaaggaaaaagtaatctttctaataacgaaatatacgaaatggttcgtgacttatcaaaaacggaaaaggttaccatttacaagccaatcgttcagagttcgggtcagttgaagtatgtaaattttgatgatgtaaataatgaacaattaaagtcagcaccaatagtagggatgtattacacacttgggaaaatggatgtagacagtttgaaaccacttacgatgacgggactacaaacagtctatatggcttatccttggtatataggaggaatattacaattcactggaactttaagaatactgttaatgggttcaatttatttaactttattagttgttttatttgttgttaggacgaggcagatcaaagaaggagtgatacgacgttctttgggcttgcctatatacgacttaagaagagagtatggcatttctcttatttttgaactgattatgatggctttattgatgatttcttacagttcttttttgggtaatggtttcttcacctatagttctaagttatttttctctctgcttttaacgaattttatactatttcaaatcattgatcttattacttttgttttattttggttgacgattcagattgaaaagcctattgaaattattaaaaacaaggcaaaaaacaagcttatttttgtcgtatggcttgctattatttcgattatcatccttgtctcaggagtttttttacaagaaacaaagagtagtcaatctagtattaacatacagatacagaatttagtaccatgggatacagtaaaagactggagaaggattgagttccttggaattgaaagtaactctactaaaaatagagaagttaatgattcagatggtcagtatctacagatagttgctgccttaaaaaacttagatttcttatatatagaacggtcttcagcatatgttccagatttcatgaaaacttcacatgttatagaaaatttttctaaacaattagaaaatgacgggataacgaatccagaaataaataaagagttaatttatatcaaccaaacaggtgctaacctacaaaataaagtgaatggaacaaactatcatcttttagataataagatagcaaccatctatattcctgagaagtggaaagaaaaccagaaatctattgagaatacagttgtagcagaacaatttattggaacaaactatacaagagaacagcttgcagttcaaataattcctgatggggaaaaaattttttattttaatgaggatgctgataataatcttaaaatgaaagatattttaccgctggcaaatgtagcagatagcaaagataatatagttgttgtgttagatacggacaaaatgatggaaaataataagttttctttggctagtaacatactatataaatctctttttagtcctgaagcggtaaaaaaaataaatgagatgactgtcctgttgaatttctcaatgaatccagtagatgtttaccaaattgtgaaattaaagattcaatccttagagcaccaaattttactttcacaaatcttgcagaagataatttacagtattgtctttatactcatttatcaatatgtccaactttttattactctaaaacagaatgaatatgtgaaaaaaatcattttgggtctgtcaaaaacatatatagcaatttcaagtctcaaatattttatgatgactattacaatggttattctatttacatttcttatgacagggcaaatagagttgctatatattggagcggcttctctgctagttttgatgttgtcaatcataatgagttttagaaaattatctgaaagctacactaaaattttaaaaggagatgaatca

SEQ ID NO: 37476 - DNA, 558 bp, Streptococcus pneumoniae
atgactagcgaataccagaaaatgatagcaggagagttttaccgtccatcagacccagaactgagagccttagctcaggcttctcgccaaaaacaggccgcctttaacaaggaagagaaccccttgaagggagccgaaatcatcaagacttggtttgcctcaaccgggaaaaatctttacatcaacactcgcttgatggtggactacggtgtcaacatccatctaggggaaaatttttattctaattggaacttgaccatgctggatatctgtcccattcgtatcggggacaatgctatgattggtcctaattgtcagtttttgacacccctccatccactagatccacaggaacgcaattcaggtatcgagtacggaaagcctatcacaatcggagataatttctggactggtggtggcgtcattgtccttcctggagtgacactgggaaataatgtcgttgcaggagcaggggcagtaattaccaaatcttttggcgacaacgttgtcctagctggcaatcctgcgcgcgtgattaaggaaatacctgttaaatag

SEQ ID NO: 37477 - DNA, 732 bp, Streptococcus pneumoniae
atgatagacatccattcgcatatcgtttttgatgtagatgacggtcccaagtcaagagaggaaagcaaggctctcttggcagaatcctacagacagggggtgcgaaccattgtttctacctctcaccgtcgcaagggcatgtttgaaactccggaagagaagatagcagaaaactttcttcaggttcgggaaatagctaaggaagtggcgagtgacttggtcattgcttacggggctgaaatttattacacaccagatgttctggataagctggaaaaaaagcggattccgaccctcaatgatagtcgttatgccttgatagagtttagtatgaacactccttatcgcgatattcatagcgccttgagcaagatcttgatgttgggaattactccagtcattgcccacattgagcgctatgatgctcttgaaaataatgaaaaacgcgttcgagaactgatcgatatgggctgttacacgcaagtaaatagttcacatgtcctcaaacccaaactttttggcgaacgttataaattcatgaaaaaaagagctcagtattttttagagcaggatttggttcatgtcattgcaagtgatatgcacaatctagacggtagacctcctcatatggcagaagcatatgaccttgttacccaaaaatacggagaagcgaaggctcaggaactttttatagacaatcctcgaaaaattgtaatggatcaactaatttag

SEQ ID NO: 37478 - DNA, 693 bp, Streptococcus pneumoniae
atgaaagaacaaaatacgatagaaatcgatgtatttcaattagttaaaagcttgtggaaacgcaagctaatgattttaatagtggcacttgtgacaggtgcgggggcttttgcatatagcacttttattgttaagccagaatatacgagtaccacgcgaatttacgtagtgaatcgcaatcaaggagacaagccggggttgacaaatcaggatttgcaggcaggaacttatctggtaaaagactaccgtgagattatcctttcgcaggatgttttggaggaagttgtttctgatttgaaactagatttgacgccaaaaggtttggctaataaaattaaagtgacagtaccagttgatacccgtattgtctctatttcagttaatgatcgagttcctgaagaggcaagccgtatcgctaactctttgagagaagtagctgctcaaaaaattatcagtattactcgtgtttctgacgtgacaacactggaggaggcaaggccggcgatatccccgtcttcgccaaatattaaacgcaatacactaattggttttttggcaggggtgattggaactagtgttatagttcttcatcttgaacttttggatactcgtgtgaaacgtccggaagatatcgaaaatacattgcagatgacacttttgggagttgtgccaaacttgggtaagttgaaatag

SEQ ID NO: 37479 - DNA, 636 bp, Streptococcus pneumoniae
atgaaaaatggaaatagaatttatagttggaggttgtttatgtacggtataataaaacgattaggtgatatattattatctttaatagggataataatattgtgtccggtttttatgataattgcaattgcgattaaacttgattcagaaggtccggttatatttaagcaaaaacgctttggtattcataaagaatacttctatattttgaaatttaggtctatgaaaatagatgcacctaaaaatgtggcgcctcgaaacttatataatccagagcaatggattacaaaagtaggggctttcttgcgaaaaacatctttggatgaactaccacaattgtttaatattcttgttggtaatatgagtattgtaggtcctagaccagcgggtataaatgaactagatttgattgcagagagagataagtatggagcaaatgatatcttgccagggttaactggatgggcacaaattaacgggcgtgatactttgtctgttgagatgaagacggagttagatggctactatgttaaacatctgtctttgataatggatattagatgtatagttaagacaataccttacgtactgaaacgaaaaggtattgtagagggtagtggtaagaaagaaagttaa

SEQ ID NO: 37480 - DNA, 1230 bp, Streptococcus pneumoniae
atgaaaatactatttgtttgccaacattataagccagaaccattcaggttgtcagatatttgtgaagatttagttcgaaaagggcatgaagtctctgttttggctgggattcctaattaccctgaagggaagatatatgcagattatcgtcataataaaaaaagacgtgagattatagaaggtgttacgatatatcgttcttatacaatccctagaaaaaaaagtgttgtatttcgattgttgaattattttagctttgcaattagttctactttaggagttttattggggaggtataaaacgaaagatggatcgaattttgactgtgtattcgttaaccaattgtctccagttatgatggcatgggctggtatggcttataaaaaaaaatataagaaaccgatgtttctatattgtatggatgtttggccagatagtttaaccgtaggtggagtgaaacaagatggcttgattttcaagctgtttaaatttatctcaaaaaaagtttaccgagctagtgattatatatttgtcactagtccatcatttaaaaattattttgtgaagcaatttgacatatccgaacaaaagattacatatttgccacaatatgcagaagatctttttatccctgatgaatctatagttaataaagaaagtgttgacctaacttttgctggtaatattggcaaagcacaaaatttggaaactattttgaaagctgccagtttgatagagaagaataccaatttacccaagaaaattcattttcattttgttggagatggtacggaattgttaagcatgaaagcattagctcatgaattggagttaaagaatatttccttctatggaagacgttctttggaggaaatgccatccttctataaaaaatcagatgctatgttagtttctttaataggagactcgatagtttctcgtactatacctgggaaggtacaatcttatatggcggcaggcaaaccaattataggtgcaatttcaggagatgctaaaataattgtagaagaagcaaattgtggatatgttagtcccgaacgagatgtaaaacaattggcaaaaaatatttgtaaatttagtatgttatctattaagagacaaagagagttaggaaagaaagctcgttgttactatgaaaatcacttttcaaaagagcagtttatgctcgaactggagacatgtttagagagggaaagtaagaaagaataa

SEQ ID NO: 37481 - DNA, 1098 bp, Streptococcus pneumoniae
atgaaaaaagtagttgtagtatttggaactcgtccagaagccatcaagatgtgtcctttggtcaaagagttaagaacacgtaagaatattgaaacattagtttgcgttacgggccaacaccgtcaaatgttggatcaggtcttggacacatttgggattattcccgattttgatttgtctattatgaaagataaacaaactttatttgatgtgaccattggcattttggaaggaatgaaggctattttagagtcagaaaaacctgatttggtgttagttcatggggatacaagtacgaccttcgctagttcactggcggccttttatttacagattccaattggtcatgttgaagctggtttgcgcacttacgatatctattcaccatatcctgaagagtttaatcgtcaagcagttggggttttggctcagtatcattttacaccaacacaactttcaaaagataatcttttaagagaaggaaaaactccagagagcatatttgtgacaggtaatacggcgattgatgctttacaaactacaattcaagaggactatacgcatcctgagttagaatggataggagaaagcaggtttattctaattacagctcatcgtcgtgaaaatcttggtgaaccgatgagacatatgtttagagcaattagaaggattattgaagaatattcagatgtcaaggctatttatcctatccatatgaatcctcgtgttcgccaaattgctgaggaagaactaagtggctgtgaacgtatcaagatgatcgaacctttagaagtattagattttcacaattttttatcaagaagttatttaattttaacagatagtggtggtattcaggaagaggctccaagtttaggaaaacctgttttggttatgagagatacaactgaacgtccagagggaattgaagcagggactttgaaacttgtaggtgctgatgaaaataatatttataggcattttaaagaattattagaaaatgattcagtttatcaagcaatgagtcaagcttcaaatccatatggagatggaacggcttgtaagaaaattgcagacatactagaaggagaagtgtaa

SEQ ID NO: 37482 - DNA, 1056 bp, Streptococcus pneumoniae
atgtcacaatttacaggaaaaactctcctaattacaggagggacaggttcatttgggaatgcggttctcaagcgttttttagaaacagatgtctcagagattcgtatattttcgcgagatgaaaagaaacaagatgatatgcgtcatgagtttcaggtaaaagtaccagaagtggctgggaaaatccgtttttaccttggagatgtgcgtgacttagcttcggtaaaaaatgctatgcatggtgtggattatgtttttcacgctgctgctcttaaacaagtaccttcttgtgaatttttccctgtagaagcggtaaaaactaacattttgggaacggagaatgtcctcactgcggctatcgaagctggtgtaaagcaagttatctgtctttctacagataaggcggcttatcctgtcaatgctatgggaacatccaaggctatgatggaaaagattgctgttgctaagtccaggacggtaaatcctgagcatacaaagatatgtgtgactcgctatgggaatgttctgtgtagccgtggatctgtcgttcctctttggattgagcaaattaagcaaggaaatgctcttacaattactgaacctagcatgacacgttttgtgatgacattggaagaagcagtagacttggttttatttgcatttgaagaagggaaatctggagatatactagttcagaaagcaccagcatgtacgattgaagtgttggctaaggctgtatcagaaatttttgcctcagaacaagatattaagattataggtattagacacggagaaaaaaggtatgaaacactattaactaacgaagagtgcgcaaatgcaattgatttgggtgatttttatagagttcctagtgataatcgtaatcttaactatgataagtatttcaaagatggtagtacgaatagaaatttgttgacagaattcaatagtaataataccgatttgatggatgtagagcaagttaaaagaaagttgctagaattagatgaaatacagacagcaattcgtgatatggtagcagacgaagagatgtaa

SEQ ID NO: 37483 - DNA, 1185 bp, Streptococcus pneumoniae
atgaaaattaagacagattatagtgatattcactttaaagataatggcaaacttaagttattgattattgtgggaacacgtccagagattatacgtctaagtagtgttatcactaaatgtcgaaagtattttgatgttattttggcacatactggacaaaactatgattacaatttaaatggtattttctttgataatttagggttagacactccggacgtatacatggatgctgttggagatgatcttggtgctactgtagggaatattattaatacttcatacaaattgatgaatcaaattaaaccagatgctttattgattttaggggatacaaattcttgtttatcagctattgctgccaagcgtttacatattccaatttttcatatggaggctggcaatcgctgtaaagatgagtgcctaccggaagagactaatcgtcggattgttgatgttatttcagatgttaacttagcatactctgaacatgcacgtaagtatttacatgagtgtggtttacctaaagagcgcacatatgtaactggttctcctatggcagaagtgttacataaaaatttatctgctattgagtcttcagatatccatgaacgtttgggattgaaaaaaggaggttatatcttactttcagctcaccgtgaggaaaatattgatacagataaaaattttatttctctctttacagcaattaatcaattagctgaaaagtataatatgccaatcttatattcttgccatcctagatcaaagaaaaggctacaagagagcggttttaaactagataaacgtgtgattcagcatgagccactaggattccatgactataattgtttacagatgaatgcatttgttgtagtatctgattcgggaactttaccggaagaaagtagtttctttactagtcaaggttatccttttcccgctgtatgtattcgtacaagtacagaacgtcctgagtccttagataaggcaggatttattttggcaggcattgatgaaaattctcttcttcaagcagttgaaactgctgttagcttggcacaagatgaggattttggattaccggttccggattatgttgaggaaaatgtctctactaaagttgttaagataatacagagctatacagggatagtggataaaatagtttggaggaaaagctga

SEQ ID NO: 37484 - DNA, 1233 bp, Streptococcus pneumoniae
atgaaattattttggacaaacaacatatatagacagttgctgctaaacagctgtttttcatcattcggcgacagtattttctacctcgccattatcaattatgtggctcagtacaatttcgctccgctagcgattttactgatttccatttcagagatggttcccctactatcgcaactctttctcgggattctaggagattttcaagaaaatagagtcaaacacgcactctggattgccaaaatcaaaatcctgctctacgctattttgacagtatttctcgtcttgtcgcccttttcattagtttcagtcattatgattgtcatcatcaacctcatctctgacaccttgagctacctgtctgcctacatgatgaacgccctctacatcagtgtaattaaggacgacctgcatgatgccatggggttcaggcagtctctgatgagggttgtccgtattgtcgccaatctggctggcgcattccttatcaatgttataagtattcaaactatttcccttatcaacactctgacttttgtcattgcctttttgggcctgtatgttattcgacataccttgtatgaggttgaaaaaagaattgaaatgtcacatacagcactgagttttaagaaatattttcaacatcttaaacagtcgctggctgtgctcctgaggttaaaagataccgtcatactactgtttctgacgaccagtatgattgccatcttggatgtgtcccctcggctgattgccctccgcttcatccaacagacactagcacaactgagcattgggcaactcctcgccctgctctccatcatcatgtcttgtggagctatccttggcaatatgaccagcagtaatctatttaaaaatatccgtttcacgcacctcttggttttctgtgagatttccctattgactctaataactagtatcctttgtcaagcctatatcgtaattttcatgaccagtttcatcagttctacgattatcggcattctcagccctcgcctacaagcagctgtctttgcccatatccccagtgacaagatggggacggtgggctctgctctgagcacagtggacattctcgccccgtccctgctctccctattagccctatccatagcatcgggcgtttcggtgcagttagcattgatatttttgtatcttattttaattgctcttatcttttgtcaatggttagtcaagttcaacactcataactaa

SEQ ID NO: 37485 - DNA, 852 bp, Streptococcus pneumoniae
atgtcaaggactaaactacgagccttattgggatacttgttgatgttggtagcctgtttgattcctatttattgttttggacagatggtgttgcagtctcttggacaggtgaaaggtcatgctacatttgtgaaatccatgacaactgaaatgtaccaagaacaacagaaccattctctcgcctacaatcaacgcttggcttcgcaaaatcgcattgtagatccttttttggcggagggatatgaggtcaattaccaagtgtctgacgaccctgatgcagtctatggttacttgtctattccaagtttggaaatcatggagccggtttatttgggagcagattatcatcatttagggatgggcttggctcatgtggatggtacaccgctgcctctggatggtacagggattcgctcagtgattgctgggcaccgtgcagagccaagccatgtctttttccgccatttggatcagctaaaagttggagatgctctttattatgataatggccaggaaattgtagaatatcagatgatggacacagagattattttaccgtcggaatgggaaaaattagaatcggttagctctaaaaatatcatgaccttgataacctgcgatccgattcctacctttaataaacgcttattagtgaattttgaacgagtcgctgtttatcaaaaatcagatccacaaacagctgcagttgcgagggttgcttttacgaaagaaggacaatctgtatcgcgtgttgcaacctctcaatggttgtaccgtgggctagtggtactggcatttctgggaatcctgtttgttttgtggaagctagcacgtttactacgagggaaataa

SEQ ID NO: 37486 - DNA, 6423 bp, Streptococcus pneumoniae
atgaaaaaaagtacagtattgtcattaaccacagctgcagttattttagcagcctatgcccctaatgaggtagtcttagcagacacatctagctctgaagatgctttaaacatctctgataaagaaaaagtagcagaaaataaagagaaacatgaaaatatccatagtgctatggaaacttcacaggattttaaagagaagaaaacagcagtcattaaggaaaaagaagttgttagtaaaaatcctgtgatagacaataacactagcaatgaagaagcaaaaatcaaagaagaaaattccaataaatcccaaggagattatacggactcatttgtgaataaaaacacagaaaatcccaaaaaagaagataaagttgtctatattgctgaatttaaagataaagaatctggagaaaaagcaatcaaggaactatccagtcttaagaatacaaaagttttatatacttatgatagaatttttaacggtagtgccatagaaacaactccagataacttggacaaaattaaacaaatagaaggtatttcatcggttgaaagggcacaaaaagtccaacccatgatgaatcatgccagaaaggaaattggagttgaggaagctattgattacctaaagtctatcaatgctccgtttgggaaaaattttgatggtagaggtatggtcatttcaaatatcgatactggaacagattatagacataaggctatgagaatcgatgatgatgccaaagcctcaatgagatttaaaaaagaagacttaaaaggcactgataaaaattattggttgagtgataaaatccctcatgcgttcaattattataatggtggcaaaatcactgtagaaaaatatgatgatggaagggattattttgacccacatgggatgcatattgcagggattcttgctggaaatgatactgaacaagacatcaaaaactttaacggcatagatggaattgcacctaatgcacaaattttctcttacaaaatgtattctgacgcaggatctgggtttgcgggtgatgaaacaatgtttcatgctattgaagattctatcaaacacaacgttgatgttgtttcggtatcatctggttttacaggaacaggtcttgtaggtgagaaatattggcaagctattcgggcattaagaaaagcaggcattccaatggttgtcgctacgggtaactatgcgacttctgcttcaagttcttcatgggatttagtagcaaataatcatctgaaaatgaccgacactggaaatgtaacacgaactgcagcacatgaagatgcgatagcggtcgcttctgctaaaaatcaaacagttgagtttgataaagttaacataggtggagaaagttttaaatacagaaatataggggcctttttcgataagagtaaaatcacaacaaatgaagatggaacaaaagctcctagtaaattaaaatttgtatatataggcaaggggcaagaccaagatttgataggtttggatcttaggggcaaaattgcagtaatggatagaatttatacaaaggatttaaaaaatgcttttaaaaaagctatggataagggtgcacgcgccattatggttgtaaatactgtaaattactacaatagagataattggacagagcttccagctatgggatatgaagcggatgaaggtactaaaagtcaagtgttttcaatttcaggagatgatggtgtaaagctatggaacatgattaatcctgataaaaaaactgaagtcaaaagaaataataaagaagattttaaagataaattggagcaatactatccaattgatatggaaagttttaattccaacaaaccgaatgtaggtgacgaaaaagagattgactttaagtttgcacctgacacagacaaagaactctataaagaagatatcatcgttccagcaggatctacatcttgggggccaagaatagatttacttttaaaacccgatgtttcagcacctggtaaaaatattaaatccacgcttaatgttattaatggcaaatcaacttatggctatatgtcaggaactagtatggcgactccaatcgtggcagcttctactgttttgattagaccgaaattaaaggaaatgcttgaaagacctgtattgaaaaatcttaagggagatgacaaaatagatcttacaagtcttacaaaaattgccctacaaaatactgcgcgacctatgatggatgcaacttcttggaaagaaaaaagtcaatactttgcatcacctagacaacagggagcaggcctaattaatgtggccaatgctttgagaaatgaagttgtagcaactttcaaaaacactgattctaaaggtttggtaaactcatatggttccatttctcttaaagaaataaaaggtgataaaaaatactttacaatcaagcttcacaatacatcaaacagacctttgacttttaaagtttcagcatcagcgataactacagattctctaactgacagattaaaacttgatgaaacatataaagatgaaaaatctccagatggtaagcaaattgttccagaaattcacccagaaaaagtcaaaggagcaaatatcacatttgagcatgatactttcactataggcgcaaattctagctttgatttgaatgcggttataaatgttggagaggccaaaaacaaaaataaatttgtagaatcatttattcattttgagtcagtggaagaaatggaagctctaaactccaacgggaagaaaataaacttccaaccttctttgtcgatgcctctaatgggatttgctgggaattggaaccacgaaccaatccttgataaatgggcttgggaagaagggtcaagatcaaaaacactgggaggttatgatgatgatggtaaaccgaaaattccaggaaccttaaataagggaattggtggagaacatggtatagataaatttaatccagcaggagttatacaaaatagaaaagataaaaatacaacatccctggatcaaaatccagaattatttgctttcaataacgaagggatcaacgctccatcatcaagtggttctaagattgctaacatttatcctttagattcaaatggaaatcctcaagatgctcaacttgaaagaggattaacaccttctccacttgtattaagaagtgcagaagaaggattgatttcaatagtaaatacaaataaagagggagaaaatcaaagagacttaaaagtcatttcgagagaacactttattagaggaattttaaattctaaaagcaatgatgcaaagggaatcaaatcatctaaactaaaagtttggggtgacttgaagtgggatggactcatctataatcctagaggtagagaagaaaatgcaccagaaagtaaggataatcaagatcctgctactaagataagaggtcaatttgaaccgattgcggaaggtcaatatttctataaatttaaatatagattaactaaagattacccatggcaggtttcctatattcctgtaaaaattgataacaccgcccctaagattgtttcggttgatttttcaaatcctgaaaaaattaagttgattacaaaggatacttatcataaggtaaaagatcagtataagaatgaaacgctatttgcgagagatcaaaaagaacatcctgaaaaatttgacgagattgcgaacgaagtttggtatgctggcgccgctcttgttaatgaagatggagaggttgaaaaaaatcttgaagtaacttacgcaggtgagggtcaaggaagaaatagaaaacttgataaagacggaaataccatttatgaaattaaaggtgcgggagatttaaggggaaaaatcattgaagtcattgcattagatggttctagcaatttcacaaagattcatagaattaaatttgctaatcaggctgatgaaaaggggatgatttcctattatctagtagatcctgatcaagattcatctaaatatcaaaagcttggcgagattgcagaatctaaatttaaaaatttaggaaatggaaaagagggtagtctaaaaaaagatacaactggggtagaacatcatcatcaagaaaatgaagagtctattaaagaaaaatctagttttactattgatagaaatatttcaacaattagagactttgaaaataaagacttaaagaaactcattaaaaagaaatttagagaagttgatgattttacaagtgaaactggtaagagaatggaggaatacgattataaatacgatgataaaggaaatataatagcctacgatgatgggactgatctagaatatgaaactgagaaacttgacgaaatcaaatcaaaaatttatggtgttctaagtccgtctaaagatggacactttgaaattcttggaaagataagtaatgtttctaaaaatgccaaggtatattatgggaataactataaatctatagaaatcaaagcgaccaagtatgatttccactcaaaaacgatgacatttgatctatacgctaatattaatgatattgtggatggattagcttttgcaggagatatgagattatttgttaaagataatgatcagaaaaaagctgaaattaaaattagaatgcctgaaaaaattaaggaaactaaatcagaatatccctatgtatcaagttatgggaatgtcatagaattaggggaaggagatctttcaaaaaacaaaccagacaatttaactaaaatggaatctggtaaaatctattctgattcagaaaaacaacaatatctgttaaaggataatatcattctaagaaaaggctatgcactaaaagtgactacctataatcctggaaaaacggatatgttagaaggaaatggagtctatagcaaggaagatatagcaaaaatacaaaaggccaatcctaatctaagagccctttcagaaacaacaatttatgctgatagtagaaatgttgaagatggaagaagtacccaatctgtattaatgtcggctttggacggctttaacattataaggtatcaagtgtttacatttaaaatgaacgataaaggggaagctatcgataaagacggaaatcttgtgacagattcttctaaacttgtattatttggtaaggatgataaagaatacactggagaggataagttcaatgtagaagctataaaagaagatggctccatgttatttattgataccaaaccagtaaacctttcaatggataagaactactttaatccatctaaatctaataaaatttatgtacgaaatccagaattttatttaagaggtaagatttctgataagggtggttttaactgggaattgagagttaatgaatcggttgtagataattatttaatctacggagatttacacattgataacactagagattttaatattaagctgaatgttaaagacggtgacatcatggactggggaatgaaagactataaagcaaacggatttccagataaggtaacagatatggatggaaatgtttatcttcaaactggctatagcgatttgaatgctaaagcagttggagtccactatcagtttttatatgataatgttaaacccgaagtaaacattgatcctaagggaaatactagtatcgaatatgctgatggaaaatctgtagtctttaacatcaatgataaaagaaataatggattcgatggtgagattcaagaacaacatatttatataaatggaaaagaatatacatcatttaatgatattaaacaaataatagacaagacactaaacattaagattgttgtaaaagattttgcaagaaatacaaccgtaaaagaattcattttaaataaagatacgggagaggtaagtgaattaaaacctcatagggtaactgtgaccattcaaaatggaaaagaaatgagttcaacgatagtgtcggaagaagattttattttacctgtttataagggtgaattagaaaaaggataccaatttgatggttgggaaatttctggtttcgaaggtaaaaaagacgctggctatgttattaatctatcaaaagatacctttataaaacctgtattcaagaaaatagaggagaaaaaggaggaagaaaataaacctacttttgatgtatcgaaaaagaaagataacccacaagtaaaccatagtcaattaaatgaaagtcacagaaaagaggatttacaaagagaagagcattcacaaaaatctgattcaactaaggatgttacagctacagttcttgataaaaacaatatcagtagtaaatcaactactaacaatcctaataagttgccaaaaactggaacagcaagcggagcccagacactattagctgccggaataatgtttatagtaggaatttttcttggattgaagaaaaaaaatcaagattaa

SEQ ID NO: 37487 - DNA, 456 bp, Streptococcus pneumoniae
atgaacagaagagaggcagtcgaatttgttaacatgtgtatgattaaaaacggagataaggtcctggtccaagaccgagttaatcccgactggtctggcattacttttcctggtggtcatgttgaacgtggcgaatcctttgtcgatgctgtcattcgtgaagtgaaagaagaaactggtctgatcatttccaaaccccaactctgtggtatcaaaaactggtatgacgacaaggattatcgttatgtcgtccttttttacaagacagaacactttactggtgaactccagtcttcagacgaagggaaagtttggtgggaggactttgaaaatctttctcatctaaaacttgcaaccgatgatatgtctgatatgcttcgtgtgtttctagaagaagatctcagtgaattcttttactacaaaaacggtgacgactggctttatgatttgaagtaa

SEQ ID NO: 37488 - DNA, 2259 bp, Streptococcus pneumoniae
atgctttgtcaaaactgtaaaattaacgactcaacaattcatctttacaccaatctcaatggaaaacaaaaacaaattgacctctgtcaaaactgctataagattatcaaaacagatcctaacaatagcctcttcaaaggtatgacggatctgaacaatcgtgacttcgatccctttggtgatttcttcaatgatctaaacaatttcagaccttctagcaatactcctcctattcccccaacccaatcaggtggaggttacggtggaaacggcggttatggttcccaaaatcgtggatctgctcaaactccgccacctagccaagaaaaaggcctgctggaagaatttggtattaatgtaactgaaattgcccgtcgtggagacattgaccccgttattgggcgcgacgatgagattatccgtgtcatcgagattctcaatcgtagaaccaagaataatcctgtccttatcggtgaacctggtgtcggaaaaacggccgttgtcgaaggtctagctcagaaaattgtcgatggcgatgtgccacataaactccaaggtaaacaagtcatccgtctggatgtggttagcttagttcaaggaacggggattcgaggacaatttgaagaacgcatgcaaaaactcatggaagaaattcgcaaacgtgaagacatcatcctctttatcgatgaaatccatgaaattgttggtgctggttctgcgagtgatggtaatatggacgcaggaaatatcctcaagccagcccttgctcgtggagaactgcaactagtcggtgctactaccctcaatgaataccgtatcattgaaaaggatgctgccctcgagcgtcgtatgcagcctgttaaagtcgatgaaccaacggtggacgaaacaatcactattctcaaagggattcaaaagaaatacgaagattaccaccacgttcaatatacagatgctgcgattgaagcagctgcaactctttccaatcgctacatccaagatcgcttcttgcctgacaaggccattgacctcctagatgaagctggttctaagatgaacttgaccttgaattttgtggatcctaaagtaattgatcagcgcttgattgaggctgaaaatctcaagtctcaagctacacgagaagaagattttgagaaggcggcctacttccgcgaccagattgccaagtataaggaaatgcaaaagaaaaagatcacagaccaggatactcctagcatcagcgagaaaactattgagcacattatcgagcagaaaaccaatatccctgttggtgatttgaaagagaaagaacaatctcaactcatccatctagccgaagatctcaagtctcatgttattggtcaagatgatgcagtcgataagattgccaaggctattcgccgtaatcgtgtcggacttggtacccctaaccgcccaatcggaagcttcctcttcgttgggccaactggtgtcggtaagacagaactttccaaacaactggctatcgaactttttggttctgctgatagtatgattcgctttgatatgagtgaatacatggaaaaacatagtgtggctaagttggtcggcgctcctccaggttatgttggctatgatgaggctggtcaattaactgaaaaagttcgccacaatccatattctctcatccttctcgatgaagtggaaaaagctcacccagatgttatgcacatgtttcttcaagtcttggacgatggtcgtttgacagacgggcaaggacgcaccgttagcttcaaggatgccatcattatcatgacctcaaatgcaggtacaggaaagaccgaagctagcgttggatttggtgctgctagagaaggacgtaccaattctgtcctcggtgaactcggtaacttctttagcccagagtttatgaaccgttttgatggcattatcgaatttaaggctctcagcaaggataacctccttcagattgtcgagctcatgctagcagatgttaacaagcgcctctctagcaacaacattcgtttggatgtaactgataaggtcaaggaaaagttggttgacctaggttatgatccaaaaatgggagcacgcccacttcgtcggactattcaagactatattgaggacacaatcactgactactaccttgaaaatccaagcgaaaaagatctcaaagcagttatgactagcaagggaaacattcagattaaatctgccaaaaaagctgaagttaaaagttctgaaaaagaaaaataa

SEQ ID NO: 37489 - DNA, 1347 bp, Streptococcus pneumoniae
atgaattacgaaaagtatttaaactatttggactatgaaactgaaatagaagacgcataccataatttattattagaatataaaattagtgataattttagtgatgaacattggttatataatttgccgtctaatatcacccaatctaagggatttaaaatacacctgagcgcttcaatattaaatgctaatttggttgctaaaaaattctttgattttatattttctagagagaagaagataaatttcaaaattttggttagcattaaagaactttctttgcaaaatacagggcttaatggttattcacaagtcgggaaattcattacaatttatccaaaagataataaagagtttcaacgtttgttacacaaattagaaatattgtataaaggtgtaaagggtgtaaacataccatcagatttcagatttcaacttagcgaggttgtatattacagatatggggagttcgtaaaagatagcactttcaaggataaaagagataagaaaatcccttcaaatgtgaatgttccaataagggattactatattccaagatataacactattcctgatcaatatattattttggaagtgatttctaaaaatgccaaaggtggagtttataaagtatttaatactcaaaagcgagtttattctttattaaaagaagctagtgatttatcgttggttgattttacaaatagagattctgtgaatcgtttaataaatgaaagagaaatattagtagaattggaaaaggaggaatttactccaaaagtttttaacgatttttacataaagaattcgtattttgtggaatttgagtttattattgcagataaattaagcgagtataatatggttagtggctcgtatgattggtttttaacattaattgattatatggagataataaactccaaatataatctttcctatagagatttatcatttaataatatacttattgataatagaaataatatttatattatagactttgagcatgccctaaggaaagaaactcaaattgaagaaaaaaagttgcctctatttggaactccagggttttatgaaaccaacttaaatttattgaataatcaaccagaggatattatgggattggttttgttattatattggagtcagaatttagatgattttaacgtcttttcaaaaatgagttttttagaagcgatggagtatgcaatgaattttaattcgcgtcgcttagacacacttgataaatcagattggctttatgatatttataaaaaagcgttcaattataaatatgatactttttctgaattaaaaaaagattttatagaggtattaaaataa

SEQ ID NO: 37490 - DNA, 312 bp, Streptococcus pneumoniae
atgatagaggcacagggtttcttagtggataagcaaacaagatgcattcattaccatagcaagctggatattattgctttacaatgctatgattgtaaaaagtattatgcttgttatcggtgtcatgattcattagaacatcacccttttgagccgtatcccttatctttgatacaggataagcctattttatgtggtgtttgtctaaaactactaacatataagcaatataaagaaagcttaagttgccccttttgtttttctcgctttaatccaggttgccaaaatcataaggaacgctattttaaatag

SEQ ID NO: 37491 - DNA, 2373 bp, Streptococcus pneumoniae
gtgtttagacgtttaggtcaagatttccagcttaggaaagtgaaaaagattttaaagcagattaatgccctgaaaggcaagatgtcctctctttcggatcaagaattagtagctaaaacagtagagtttcgtcagcgtctttccgagggagaaagtctagacgatattttggttgaagcttttgctgtggtgcgtgaagcagataagcggattttagggatgtttccttatgatgttcaagtcatgggagctattgtcatgcactatggaaatgttgctgagatgaatacgggggaaggtaagaccttgacagctaccatgcctgtctatttgaacgctttttcaggagaaggagtgatggttgtgactcctaatgagtatttatcaaagcgtgatgccgaggaaatgggtcaagtttatcgttttctaggattgaccattggtgtaccatttacggaagatccaaagaaggagatgaaagctgaagaaaagaagcttatctatgcttcggatatcatctacacaaccaatagtaatttaggttttgattatctaaatgataacctagcctcgaatgaagaaggtaagtttttacgaccgtttaactatgtgattattgatgaaattgatgatatcttgcttgatagtgcacaaactcctctgattattgcgggttctcctcgtgttcagtctaattactatgcgatcattgatacacttgtaacaaccttggtcgaaggagaggattatatctttaaagaggagaaagaggaggtttggctcactactaagggggccaagtctgctgagaatttcctagggattgataatttatacaaggaagagcatgcgtcttttgctcgtcatttggtttatgcgattcgagctcataagctctttactaaagataaggactatatcattcgtggaaatgagatggtactggttgataagggaacagggcgtctaatggaaatgactaaacttcaaggaggtctccatcaggctattgaagccaaggaacatgtcaaattatctcctgagacgcgggctatggcctcgatcacctatcagagtctttttaagatgtttaataagatatctggtatgacagggacaggtaaggtcgcggaaaaagagtttattgaaacttacaatatgtctgtagtacgcattccaaccaatcgtccgagacaacggattgactatccagataatctatatatcactttacctgaaaaagtgtatgcatccttggagtacatcaagcaataccatgctaagggaaatcctttactcgtttttgtaggctcagttgaaatgtctcaactctattcgtctctcttgtttcgtgaagggattgcccataatgtcctaaatgctaataatgcggcgcgtgaggctcagattatctccgagtcaggtcagatgggggctgtgacagtggctacctctatggcaggacgtggtacggatatcaagcttggtaaaggagtcgcagagcttgggggcttgattgttattgggactgagcggatggaaagtcagcggatcgacctacaaattcgtggccgttctggtcgtcagggagatcctggtatgagtaaattttttgtatccttagaggatgatgttatcaagaaatttggtccatcttgggtgcataaaaagtacaaagactatcaggttcaagatatgactcaaccggaagtattgaaaggtcgtaaataccggaaactagtcgaaaaggctcagcatgccagtgatagtgctggacgttcagcacgtcgtcagactctggagtatgctgaaagtatgaatatacaacgggatatagtctataaagagagaaatcgtctaatagatggttctcgtgacttagaggatgttgttgtggatatcattgagagatatacagaagaggtagcggctgatcactatgctagtcgtgaattattgtttcactttattgtgaccaatattagttttcatgttaaagaggttccagattatatagatgtaactgacaaaactgcagttcgtagctttatgaagcaggtgattgataaagaactttctgaaaagaaagaattacttaatcaacatgacttatatgaacagtttttacgactttcactgcttaaagccattgatgacaactgggtagagcaggtagactatctacaacagctatccatggctatcggtggtcaatctgctagtcagaaaaatccaatcgtagagtactatcaagaagcctacgcgggctttgaagctatgaaagaacagattcatgcggatatggtgcgtaatctcctgatggggctggttgaggtcactccaaaaggtgaaatcgtgactcattttccataa

SEQ ID NO: 37492 - DNA, 1536 bp, Streptococcus pneumoniae
atgtcaaaggaacttaatattttacagataggacttgccaattgggaaaatcactatgacatacctgaaaatatgagttggtattatttttacccaaactcatcaaaagcccttcgtgaaataattgaaaaagaggatattaaccgttttcatgcagttttaatagaagatggtcagtattccagagacttattttcctatgtaaaatattttgaaccttatactttattttataaccagaatctacaaataaatgatagagaggttgtggattttctaaaaaaacgatgtgcacaagcaattgattttttaagtccccaacaactaatcaatgatttaagtaaatctctttttggcggtgggtatggtgataaactctttcctccgacgatacaagtcaatccaaattttacaggagctatttcttatcaaggattggattatgtcagtttggaaggtgagtttgggcaagattttgcccagcttgcctattgggcttataatattatggtgcaaaaaacactccctattgagttgtggcttgaatatgagaaggaaggcaattgtgactttcgtttagtaatccgtaaaatgtggagtgggtctgttgatgatttctttgaagaagtaatagtatctgaaaaagacttggagcaagcactttttatggatagtcgagacggagactactttctctcgatatctgttgaagcaagaggtcgtggaactatcaaactaggtaatcttcaccaacgatggagtcgaaaacaatttggtaagtttgtacttggtggaaatatcctacatgattccaagcgtgatgaaataaactatttcttccatccaggtgattttaaaccgcctttgactgtctattttgcaggttatcgacctgcagaaggattcgagggttactttatgatgaaaactcttggatgtcccttcattttattttctgatccacgtttagaggggggagctttttatctcggaacggatgagctagagggaaaagtaaaggatacgatcactcactatcttgattatttaggctttgatcataaggatttgattttatcaggtctttctatgggaacgtttccggctctctattatggtgcttcttttgaaccccatgccatcatagttggtaagcccttggctaatttaggaactatagctagtcgtggacgtttggacgcaccgggtgtctctaacttagcttttgattgtttaattcatcatacaggtgggacaagttctcaagatatgacggagttggatcagcgtttttggaaaatttttaaacaagcaaatttttcaaagacaacctttggtttatcctatatgaaagatgaagaaatggatccacaagcctatgaacaattagtgtcttatctgtgtaatacaggtgcgaagattttatctaaaggaactgctggacgacacaatgatgatacagataccaatatttcttggtttttgcacttttatagaatggtcttagagactggttttggaagggagaaaagatga

SEQ ID NO: 37493 - DNA, 1581 bp, Streptococcus pneumoniae
atgtattattttattccagcttggtatgggtcagaaagaacatggcatgcagatatcactccatggtatttttctcattttcgtctagagtttgatgatacctttcaccagattcggctctttcaagagcaagatatagattctcgtctattagtattagcttaccagcctcatctacgttattttttatatagacatggtgtgttagaaatggatacttattccgtttttgatgttatgcaagattttcataatctccatacccaagttttaagcattagagatattgagtgggatgatgactgtgaatttatttatagtccctttacgattatcgttcaaaaaaatgggaagaaatttgctaaggttgaacatggagttgaaggcttcatcagtgatatacagtattttgaaccaaatggtcaaatacatatgcaccatatcgtggatgatcgtgggtttgtatcgagcattatcttttttgaagatgggcaagcagcctatcaagaatatctgaacctcaagggagagtggcaattcagagagcgtttaaaagaaggaggacaggtagaagtcaatccaattttgggttatcgctttaaaatgcttacctatcaaaatatgggagatctggtggcagaattttttgagaattatctgcaaacgtatgtgaaggatcaggatatttttatgcttccttctcattctcatcatgaccagttggtactagatcgtttacctagtactaatcctaaactgttgagtctgttcattggacgtaatcctcaagatacctttagggatttagatgtaacttttgaaaaatcggatttgattttggtggatagagaggatagtttacgattgttgcaggagttgtatcctgaacgaatgcatcaatgttatcatttatcatcttttgacacccgattacgattgggacgaagccaaactaagaaagaatccatcatttattttcaactggattttgagcaggggattgataatcaagctctgcttcaagtcttgtcctttgtcgctgaaaataaggatactgaggtgatttttggagcctttgctgctagtcaggagcaaatgaatgaggttgaagggattgttgagtctttcatccaagaaaacattcaatccgaaaatctgggaaaggcgattgattatggtgatgcagaaaatcctctggaagaaaatcaacaccaggacttacgcttacagtttgttaacttgaatgatgagttagatttgataaaaacactagaatttgtccgtttgattgtggatttaaatagacatcctcatctctacacacagattgctgggattagtgcaggaattcctcaaatcaacctagttgaaaccgtctatgttgaacatttaaaaaatggttatttgttagcagatgttacagaattttctaaggctgcacattattacacagataggttgaaggagtggaatgagtccttgatatattcaattgataagattaaggagcacacaggacaacaatttcttggaaaattagagaaatggatagaggaggttaaaaatgtcaaaggaacttaa

SEQ ID NO: 37494 - DNA, 14331 bp, Streptococcus pneumoniae
atgaccgaaacggtagaagataaagtaagtcattcaattactgggcttgatatcctcaaggggatagttgctgcgggagctgtcataagtggaaccgttgcaactcaaacgaaggtatttacaaatgagtcagcagtacttgaaaaaactgtagagaaaacggatgctttggcaacaaatgatacagtagttctaggtacgatatctacaagtaattcagcgagttcaactagtttgtcagcttcagagtcggcaagtacatctgcatctgagtcagcctcaaccagcgcttcgacctcagcaagtacaagtgcatcagaatcagcaagtacatcggcttcgacaagtatttctgcatcatctactgtggtaggttcacaaacagctgccgctacagaagcaactgctaagaaggtcgaagaagatcgtaagaaaccagctagtgattatgtagcatcagttacaaatgtcaatctccaatcttatgctaagcgacgcaagcgttcagtggattccatcgagcaattgctggcttctataaaaaatgctgctgttttttctggcaatacgattgtaaatggcgcccctgcaattaatgcaagtctaaacattgctaaaagtgagacaaaagtttatacaggtgaaggtgtagattcggtatatcgtgttccaatttactataaattgaaagtgacaaatgatggttcaaaattgacctttacctatacggttacgtatgtgaatcctaaaacaaatgatcttggtaatatatcaagtatgcgtcctggatattctatctataattcaggtacttcaacacaaacaatgttaacccttggcagtgatcttggtaaaccttcaggtgtaaagaactacattactgacaaaaatggtagacaggttctatcctataatacatctacaatgacgacgcagggtagtgggtatacttggggaaatggtgcccaaatgaatggtttctttgctaagaaaggatatggattaacatcatcttggactgtaccaattactggaacggatacatcctttacatttaccccttacgctgctagaacagatagaattggaattaactacttcaatggtggaggaaaggtagttgaatctagcacgaccagtcagtcactttcacagtctaagtcactctcagtaagtgctagtcaaagcgcctcagcttcagcatcaacaagtgcgtcggcttcagcatcaaccagtgcctcggcttcagcgtcaaccagtgcgtcagcttcagcaagtaccagtgcttcagtctcagcatcaacaagtgcttcagcctcagcatcgacaagtgcctcggcttcagcaagcacatcagcatctgaatcagcgtcaaccagtgcttcggcttcagcaagtaccagtgcttcagcttcagcatcaaccagcgcctcggcctcagcaagcacctcagcttctgaatcggcctcaaccagcgcctcggcctcagcaagcacctcagcttctgaatcggcctcaaccagcgcctcagcctcagcatcaacgagtgcttcggcttcagcaagcacaagcgcctcgggttcagcatcaacgagtacgtcagcttcagcgtcaaccagtgcttcagcctcagcatcaacaagtgcgtcagcctcagcaagtatctcagcgtctgaatcggcatcaacgagtgcgtctgagtcagcatcaacgagtacgtcagcctcagcaagcacctcagcttctgaatcggcctcaaccagtgcgtcagcctcagcatcgacaagcgcctcagcttcagcaagtaccagtgcttcagcctcagcgtcgacaagtgcgtcggcctcaaccagtgcatctgaatcggcatcaaccagtgcgtcagcctcagcaagtactagtgcatcggcttcagcatcaaccagtgcctcggcttcagcgtcaaccagtgcgtcagcttcagcaagtaccagtgcttcagtctcagcatcaacaagtgcttcagcctcagcatcgacaagtgcctcggcttcagcaagcacatcagcatctgaatcagcgtcgacaagcgcctcagcttcagcaagtaccagtgcgtcagcctcagcgtcgacaagtgcgtcagcctcagcaagtactagtgcatcagcttcagcatcaacgagtgcatcggcttcggcgtcaaccagtgcatcagagtcagcaagtaccagtgcgtcagcttccgcatcaacaagtgcctcggcttcagcaagcaccagtgcgtcggcttcagcaagtactagcgcctcagcctcagcctcaaccagtgcgtcagcctcagcaagtatctcagcgtctgaatcggcatcaacgagtgcgtccgcttcagcaagtactagcgcctcagcctcagcgtcaacaagtgcatcggcttcagcgtcaacgagtgcgtctgaatcggcatcaacgagtgcgtccgcttcagcaagtactagcgcctcagcctcagcgtcaacaagtgcatcggcttcagcatcaacgagtgcgtccgcttcagcaagtactagcgcctcagcctcagcgtcaacaagtgcatcggcttcagcgtcaacgagtgcgtctgagtcagcatcaacgagtgcgtcagcctcagcaagcacatcagcttctgaatctgcatcaaccagtgcgtcagcctcagcatcgacaagcgcctcagcttcagcaagtaccagtgcgtcagcctcagcgtcgacaagtgcgtcggcttcagcaagtaccagtgcgtcagcctcagcaagtaccagtgcgtcagcctcagcgtcgacaagtgcgtcggcctcaaccagtgcatctgaatcggcatcaaccagtgcgtcagcctcagcaagtactagtgcatcagcttcagcatcaacgagtgcatcggcttcagcatcaaccagtgcatcagagtcagcaagtaccagtgcgtcagcttccgcatcaacaagtgcctcggcttcagcaagtactagcgcctcagcctcagcgtcaacaagtgcttcagcttccgcgtcaaccagcgcctcggcctcagcaagtatctcagcgtctgaatcggcatcaacaagtgcctcggcttcagcatcaacgagtgcatcagtctcagcaagcaccagtgcgtcggcctcagcaagcaccagcgcgtctgaatccgcatcaaccagtgcctcagcttcagcaagtacctcagcatctgaatcagcatcaacaagtgcctcggcttcagcaagcacaagtgcttcagcctcagcaagtatctcagcgtctgaatcggcatcaacgagtgcgtccgcttcagcaagtactagcgcctcagcatcagcgtcaacaagtgcttcggcttcagcgtcaacgagtgcgtctgagtcagcatcaacgagtacgtcagcctcagcaagcacatcagcttctgaatctgcatcaaccagtgcgtcagcctcagcatcgacaagcgcctcagcttcagcaagtaccagtgcgtcagcctcagcaagtaccagtgcttcagcctcagcgtcgacaagtgcgtcggcctcaaccagtgcatctgaatcggcatcaaccagtgcgtcagcctcagcaagtactagcgcctcagcctcagcatcaacgagtgcgtccgcttcagcaagtactagtgcatcagcttcagcaagtactagcgcctcagcctcagcgtcgacaagcgcctcagcttcagcaagtaccagtgcgtcagcctcagcgtcgacaagtgcgtcggcttcagcaagtacctcagcgtctgaatcagcatcaacaagtgcgtcggcttcagcatcaacgagtgcatcagcttcagcatcaacaagtgcttcagcttcagcaagtaccagtgcgtcggcttcagcatcaacgagtgcttcagtctcagcgtcaaccagtgcctctgaatccgcatcaacaagtgcctcggcttcagcaagcaccagtgcttcggcttcagcgtcaacgagtgcgtctgagtcagcatcaacgagtgcgtcagcctcagcaagcacatcagcttctgaatctgcatcaaccagtgcgtcagcttccgcatcaacaagcgcctcggcctcagcaagtacaagtgcttcagcctcagcatcaaccagtgcatcagcttcagcctcaacaagtgcttcagcctcagcgtcaaccagtgcctcggcttcagcaagtaccagtgcgtcagcttcagcaagcacaagtgcgtcagcttcagcatcaaccagtgcttcggcttcggcatcaacaagtgcctcagcatcagcatcaacgagtgcgtcagcctcagcaagtactagtgcatcagcatcagcatcaaccagtgcatcagcctcagcaagtatctcagcgtctgaatcggcatcaacgagtgcatcagcatcagcatcaacgagtgcatcggcttcagcgtcaaccagtgcatcagtctcagcaagcaccagtgcgtcggcttcagcatcaacgagtgcctcagcctcagcaagtatctcagcgtctgaatcggcatcaacgagtgcgtcagcctcagcaagtactagtgcatcggcttcagcaagcaccagtgcgtcggcttcagcatcaaccagtgcctcagcctcagcaagtatctcagcgtctgaatcggcatcaacgagtgcgtcagcctcagcaagtactagtgcatcagcatcagcatcaacgagtgcatcggcttcagcaagtaccagcgcctcagcttcagcaagcaccagtgcgtcagcctcagcaagtaccagcgcctcagcctcagcaagcaccagtgcctcagcttcagcaagtaccagtgcgtcagcctcagcgtcgacaagtgcgtcggcttcagcaagtacctcagcgtctgaatcagcatcaacgagtgcatcagcttcagcatcaacaagtgcttcagcttcagcaagtaccagtgcgtcggcttcagcatcaacgagtgcttcagtctcagcgtcaaccagtgcctctgaatcagcatcaacaagtgcctcggcttcagcaagcaccagtgcgtcggcttcagcaagtactagtgcatcggcttcagcatcgacaagtgcgtctgaatcggcatcaacgagtgcttcggcttcagcatcaacgagtgcgtcagcctcagcaagcacatcagcttctgaatctgcatcaaccagtgcgtccgcttcagcgtcaaccagtgcgtcggcttcagcgtcgacaagtgcttcggcttcagcatcaacgagtgcgtcggcctcagcaagcgcaagtacctcagcgtcagcttccgcctcaaccagtgcgtcggcttcagcaagcacaagtgcgtcagcctcagcaagtatctcagcgtctgaatcggcatcaacgagtgcgtctgagtcagcatcaacgagtacgtcagcctcagcaagcacatcagcttctgaatctgcatcaaccagtgcgtcagcctcagcatcgacaagcgcctcagcttcagcaagtaccagtgcttcagcctcagcgtcgacaagtgcgtcggcctcaaccagtgcatctgaatcggcatcaaccagtgcgtcagcctcagcaagtactagtgcatcagcttcagcatcaacgagtgcatcggcttcagcatcaaccagtgcctcggcttcagcgtcaaccagtgcgtcagcttcagcaagtaccagtgcttcagtctcagcatcaacaagtgcttcagcctcagcatcgacaagtgcctcggcttcagcaagcacatcagcatctgaatcagcgtcgacaagcgcctcagcttcagcaagtaccagtgcgtcagcctcagcgtcgacaagtgcgtcagcctcagcaagtactagtgcatcagcttcagcatcaacgagtgcatcggcttcggcgtcaaccagtgcatcagagtcagcaagtaccagtgcgtcagcttccgcatcaacaagtgcctcggcttcagcaagcaccagtgcgtcggcttcagcaagtactagcgcctcagcctcagcctcaaccagtgcgtcagcctcagcaagtatctcagcgtctgaatcggcatcaacgagtgcgtccgcttcagcaagtactagcgcctcagcctcagcgtcaacaagtgcatcggcttcagcgtcaacgagtgcgtctgaatcggcatcaacgagtgcgtccgcttcagcaagtactagcgcctcagcctcagcgtcaacaagtgcatcggcttcagcatcaacgagtgcgtccgcttcagcaagtactagcgcctcagcctcagcgtcaacaagtgcatcggcttcagcgtcaacgagtgcgtctgagtcagcatcaacgagtgcgtcagcctcagcaagcacatcagcttctgaatctgcatcaaccagtgcgtcagcctcagcatcgacaagcgcctcagcttcagcaagtaccagtgcgtcagcctcagcgtcgacaagtgcgtcggcttcagcaagtaccagtgcgtcagcctcagcaagtaccagtgcgtcagcctcagcgtcgacaagtgcgtcggcctcaaccagtgcatctgaatcggcatcaaccagtgcgtcagcctcagcaagtactagtgcatcagcttcagcatcaacgagtgcatcggcttcagcatcaaccagtgcatcagagtcagcaagtaccagtgcgtcagcttccgcatcaacaagtgcctcggcttcagcaagtactagcgcctcagcctcagcgtcaacaagtgcttcagcttccgcgtcaaccagcgcctcggcctcagcaagtatctcagcgtctgaatcggcatcaacaagtgcctcggcttcagcatcaacgagtgcatcagtctcagcaagcaccagtgcgtcggcctcagcaagcaccagcgcgtctgaatccgcatcaaccagtgcctcagcttcagcaagtacctcagcatctgaatcagcatcaacaagtgcatcggcttcagcaagcacaagtgcttcagcctcagcaagtatctcagcgtctgaatcggcatcaacgagtgcgtccgcttcagcaagtactagcgcctcagcatcagcgtcaacaagtgcttcggcttcagcgtcaacgagtgcgtctgagtcagcatcaacgagtacgtcagcctcagcaagcacatcagcttctgaatctgcatcaaccagtgcgtcagcctcagcatcgacaagcgcctcagcttcagcaagtaccagtgcgtcagcctcagcaagtaccagtgcttcagcctcagcgtcgacaagtgcgtcggcctcaaccagtgcatctgaatcggcatcaaccagtgcgtcagcctcagcaagtactagcgcctcagcctcagcatcaacgagtgcgtccgcttcagcaagtactagtgcatcagcatcagcatcaacgagtgcatcggcttcagcaagtaccagcgcctcagcttcagcaagcaccagtgcgtcagcctcagcaagtaccagcgcctcagcctcagcaagcaccagtgcctcagcttcagcaagtaccagtgcgtcagcctcagcgtcgacaagtgcgtcggcttcagcaagtacctcagcgtctgaatcagcatcaacgagtgcatcagcttcagcatcaacaagtgcttcagcttcagcaagtaccagtgcgtcggcttcagcatcaacgagtgcttcagtctcagcgtcaaccagtgcctctgaatcagcatcaacaagtgcctcggcttcagcaagcaccagtgcgtcggcttcagcaagtactagtgcatcggcttcagcatcgacaagtgcgtctgaatcggcatcaacgagtgcttcggcttcagcatcaacgagtgcgtcagcctcagcaagcacatcagcttctgaatctgcatcaaccagtgcgtccgcttcagcgtcaaccagtgcgtcggcttcagcgtcgacaagtgcttcggcttcagcatcaacgagtgcgtcggcctcagcaagcgcaagtacctcagcgtcagcttccgcctcaaccagtgcgtccgcttcagcaagcacaagtgcgtcagcctcagcaagtatctcagcgtctgaatcggcatcaacgagtgcgtcggcctcagcaagcgcaagtacctcagcgtcagcttccgcctcaaccagtgcgtcggcttcagcaagcacaagtgcgtcagcctcagcaagtatctcagcgtctgaatcggcatcaacgagtgcgtctgagtcagcatcaacgagtacgtcagcctcagcaagcacatcagcttctgaatcggcatcaaccagtgcgtcagcctcagcatcgacaagcgcctcagcttcagcaagtaccagtgcttcagcctcagcgtcgacaagtgcgtcggcctcaaccagtgcatctgaatcggcatcaaccagtgcgtcagcctcagcaagtactagtgcatcagcttcagcatcaacgagtgcatcggcttcagcatcaaccagtgcctcggcttcagcgtcaaccagtgcgtcagcttcagcaagtaccagtgcttcagtctcagcatcaacaagtgcttcagcctcagcatcgacaagtgcctcggcttcagcaagcacatcagcatctgaatcagcgtcgacaagtgcgtcggcctcaaccagtgcatctgaatcggcatcaaccagtgcgtcagcctcagcaagtactagtgcatcagcttcagcatcaacgagtgcatcggcttcggcgtcaaccagtgcatcagagtcagcaagtaccagtgcgtcagcttccgcatcaacaagtgcctcggcttcagcaagcacatcagcatctgaatcagcgtcaaccagtgcttcggcttcagcaagtaccagtgcttcagcttcagcatcaaccagcgcctcggcctcagcaagcacctcagcttctgaatcggcctcaaccagcgcctcggcctcagcaagcacctcagcttctgaatcggcctcaaccagcgcctcagcctcagcatcaacgagtgcttcggcttcagcaagcacaagcgcctcgggttcagcatcaacgagtacgtcagcttcagcgtcaaccagtgcttcagcctcagcatcaacaagtgcgtcagcctcagcaagtatctcagcgtctgaatcggcatcaacgagtgcgtctgagtcagcatcaacgagtacgtcagcctcagcaagcacctcagcttctgaatcggcctcaaccagtgcgtcagcctcagcatcgacaagcgcctcagcttcagcaagtaccagtgcttcagcctcagcgtcgacaagtgcgtcggcctcaaccagtgcatctgaatcggcatcaaccagtgcgtcagcctcagcaagtactagtgcatcggcttcagcatcaaccagtgcctcggcttcagcgtcaaccagtgcgtcagcttcagcaagtaccagtgcttcagtctcagcatcaacaagtgcttcagcctcagcatcgacaagtgcctcggcttcagcaagcacatcagcatctgaatcagcgtcgacaagcgcctcagcttcagcaagtaccagtgcgtcagcctcagcgtcgacaagtgcgtcagcctcagcaagtactagtgcatcagcttcagcatcaacgagtgcatcggcttcggcgtcaaccagtgcatcagagtcagcaagtaccagtgcgtcagcttccgcatcaacaagtgcctcggcttcagcaagcaccagtgcgtcggcttcagcaagtactagcgcctcagcctcagcctcaaccagtgcgtcagcctcagcaagtatctcagcgtctgaatcggcatcaacgagtgcgtccgcttcagcaagtactagcgcctcagcctcagcgtcaacaagtgcatcggcttcagcgtcaacgagtgcgtctgaatcggcatcaacgagtgcgtccgcttcagcaagtactagcgcctcagcctcagcgtcaacaagtgcatcggcttcagcatcaacgagtgcgtccgcttcagcaagtactagcgcctcagcctcagcgtcaacaagtgcatcggcttcagcgtcaacgagtgcgtctgagtcagcatcaacgagtgcgtcagcctcagcaagcacatcagcttctgaatctgcatcaaccagtgcgtcagcctcagcatcgacaagcgcctcagcttcagcaagtaccagtgcgtcagcctcagcgtcgacaagtgcgtcggcttcagcaagtaccagtgcgtcagcctcagcaagtaccagtgcgtcagcctcagcgtcgacaagtgcgtcggcctcaaccagtgcatctgaatcggcatcaaccagtgcgtcagcctcagcaagtactagtgcatcagcttcagcatcaacgagtgcatcggcttcagcatcaaccagtgcatcagagtcagcaagtaccagtgcgtcagcttccgcatcaacaagtgcctcggcttcagcaagtactagcgcctcagcctcagcgtcaacaagtgcttcagcttccgcgtcaaccagcgcctcggcctcagcaagtatctcagcgtctgaatcggcatcaacaagtgcctcggcttcagcatcaacgagtgcatcagtctcagcaagcaccagtgcgtcggcctcagcaagcaccagcgcgtctgaatccgcatcaaccagtgcctcagcttcagcaagtacctcagcatctgaatcagcatcaacaagtgcctcggcttcagcaagcacaagtgcttcagcctcagcaagtatctcagcgtctgaatcggcatcaacgagtgcgtccgcttcagcaagtactagcgcctcagcatcagcgtcaacaagtgcttcggcttcagcgtcaacgagtgcgtctgagtcagcatcaacgagtacgtcagcctcagcaagcacatcagcttctgaatctgcatcaaccagtgcgtcagcctcagcatcgacaagcgcctcagcttcagcaagtaccagtgcgtcagcctcagcaagtaccagtgcttcagcctcagcgtcgacaagtgcgtcggcctcaaccagtgcatctgaatcggcatcaaccagtgcgtcagcctcagcaagtactagcgcctcagcctcagcatcaacgagtgcgtccgcttcagcaagtactagtgcatcagcttcagcaagtactagcgcctcagcctcagcgtcgacaagcgcctcagcttcagcaagtaccagtgcgtcagcctcagcgtcgacaagtgcgtcggcttcagcaagtacctcagcgtctgaatcagcatcaacaagtgcgtcggcttcagcatcaacgagtgcatcagcttcagcatcaacaagtgcttcagcttcagcaagtaccagtgcgtcggcttcagcatcaacgagtgcttcagtctcagcgtcaaccagtgcctctgaatccgcatcaacaagtgcctcggcttcagcaagcaccagtgcttcggcttcagcgtcaacgagtgcgtctgagtcagcatcaacgagtgcgtcagcctcagcaagcacatcagcttctgaatctgcatcaaccagtgcgtcagcttccgcatcaacaagcgcctcggcctcagcaagtacaagtgcttcagcctcagcatcaaccagtgcatcagcttcagcctcaacaagtgcttcagcctcagcgtcaaccagtgcctcggcttcagcaagtaccagtgcgtcagcttcagcaagcacaagtgcgtcagcttcagcatcaaccagtgcttcggcttcggcatcaacaagtgcctcagcatcagcatcaacgagtgcgtcagcctcagcaagtactagtgcatcagcatcagcatcaaccagtgcatcagcctcagcaagtatctcagcgtctgaatcggcatcaacgagtgcatcagcatcagcatcaacgagtgcatcggcttcagcgtcaaccagtgcatcagtctcagcaagcaccagtgcgtcggcttcagcatcaacgagtgcctcagcctcagcaagtatctcagcgtctgaatcggcatcaacgagtgcgtcagcctcagcaagtactagtgcatcggcttcagcaagcaccagtgcgtcggcttcagcatcaaccagtgcctcagcctcagcaagtatctcagcgtctgaatcggcatcaacgagtgcgtcagcctcagcaagtactagtgcatcagcatcagcatcaacgagtgcatcggcttcagcaagtaccagcgcctcagcttcagcaagcaccagtgcgtcagcctcagcaagtaccagcgcctcagcctcagcaagcaccagtgcctcagcttcagcaagtaccagtgcgtcagcctcagcgtcgacaagtgcgtcggcttcagcaagtacctcagcgtctgaatcagcatcaacgagtgcatcagcttcagcatcaacaagtgcttcagcttcagcaagtatctcagcgtctgaatcggcatcaacgagtgcgtccgcttcagcaagtactagcgcctcagcatcagcgtcaacaagtgcttcggcttcagcgtcaacgagtgcgtctgagtcagcatcaacgagtacgtcagcctcagcaagcacatcagcttctgaatctgcatcaaccagtgcgtcagcctcagcatcgacaagcgcctcagcttcagcaagtaccagtgcgtcagcctcagcaagtaccagtgcttcagcctcagcgtcgacaagtgcgtcggcctcaaccagtgcatctgaatcggcatcaaccagtgcgtcagcctcagcaagtactagcgcctcagcctcagcatcaacgagtgcgtccgcttcagcaagtactagtgcatcagcttcagcaagtactagcgcctcagcctcagcgtcgacaagcgcctcagcttcagcaagtaccagtgcgtcagcctcagcgtcgacaagtgcgtcggcttcagcaagtacctcagcgtctgaatcagcatcaacaagtgcgtcggcttcagcatcaacgagtgcatcagcttcagcatcaacaagtgcttcagcttcagcaagtaccagtgcgtcggcttcagcatcaacgagtgcttcagtctcagcgtcaaccagtgcctctgaatccgcatcaacaagtgcctcggcttcagcaagcaccagtgcttcggcttcagcgtcaacgagtgcgtctgagtcagcatcaacgagtgcgtcagcctcagcaagcacatcagcttctgaatctgcatcaaccagtgcgtcagcttccgcatcaacaagcgcctcggcctcagcaagtacaagtgcttcagcctcagcatcaaccagtgcatcagcttcagcctcaacaagtgcttcagcctcagcgtcaaccagtgcctcggcttcagcaagtaccagtgcgtcagcttcagcaagcacaagtgcgtcagcttcagcatcaaccagtgcttcggcttcggcatcaacaagtgcctcagcatcagcatcaacgagtgcgtcagcctcagcaagtactagtgcatcagcatcagcatcaaccagtgcatcagcctcagcaagtatctcagcgtctgaatcggcatcaacgagtgcatcagcatcagcatcaacgagtgcatcggcttcagcgtcaaccagtgcatcagtctcagcaagcaccagtgcgtcggcttcagcatcaacgagtgcctcagcctcagcaagtatctcagcgtctgaatcggcatcaacgagtgcgtcagcctcagcaagtactagtgcatcggcttcagcaagcaccagtgcgtcggcttcagcatcaaccagtgcctcagcctcagcaagtatctcagcgtctgaatcggcatcaacgagtgcgtcagcctcagcaagtactagtgcatcagcctcagcatcaacgagtgcatcggcttcagcaagtaccagcgcctcagcttcagcaagcaccagtgcgtcagcctcagcaagtaccagcgcctcagcctcagcaagcaccagtgcctcagcttcagcaagtaccagtgcgtcagcctcagcatcaacaagtgcttcagcttcggcctcaacaagtgcgtcagcttcagcatcaacgagtgcgtcggcttcagcaagcaccagtgcctcggcctcagcaagcaccagtgcttcagcttcagcatcaacaagtgcgtcagcttcagcaagtacatcagtttcaaattcagcaaaccattcgaactcacaagttggaaatacttctggatcgacaggtaaatcccaaaaagaattgcctaatacaggtactgagtcgtcaattggatctgtgttacttggagttctagcagctgttacaggtattggattggttgcgaaacgccgtaaacgtgatgaagaagagtaa

SEQ ID NO: 37495 - DNA, 927 bp, Streptococcus pneumoniae
atgtctgaaaaattagtagaaatcaaagatttagaaatttccttcggtgaaggaagtaagaagtttgtcgcggttaaaaatgctaacttctttatcaacaagggagaaactttctcgcttgtaggtgagtccggtagtgggaaaacaactattggtcgtgctatcatcggtctaaatgatacaagtaatggagatatcatttttgatggtcaaaagattaatggtaagaaatcgcgtgaacaagctgcggaattgattcgtcgaatccagatgattttccaagaccctgccgcaagtttgaatgaacgtgcgactgttgattatattatttctgaaggtctttacaatcaccgtttatttaaggatgaagaagaacgtaaagagaaagttcaaaatattatccgtgaagtaggtcttcttgctgagcacttgactcgttaccctcatgaattctcaggcggtcaacgtcaacgtatcggtattgcccgtgccttggtcatgcaaccagactttgttattgcagatgagccaatttcagccttggacgtttctgtacgtgcccaagtcttgaacttgctcaaaaaattccaaaaagagctcggcctgacctatctcttcatcgcccatgacttgtcggttgttcgctttatttcagatcgtatcgcagttatttacaagggtgttattgtagaggttgcagaaacagaagaattgtttaacaatccaattcacccatatactcaagccttgctttcagcggtaccaatcccagatccaatcttggaacgtaagaaggtcttgaaggtttacgatccaagtcaacacgactatgagactgataagccatctatggtagaaatccgtccaggtcactatgtttgggcgaaccaagccgaattggcacgttatcaaaaaggactaaactag

SEQ ID NO: 37496 - DNA, 1551 bp, Streptococcus pneumoniae
gtgtcaaataaaccaatagcagatatgattgaaaccattgagcattttgctcagacacagcctagctatcctgtctataatgttttggggcaggaacacacttatggcgatttaaaggctgattcggatagtttggctgcagtcattgaccaactaggcttgcctgagaagtctcctgtggttgtttttggtggccaagaatatgaaatgttggcaacctttgtagcgctgactaagtcaggtcatgcctacattccaattgatagccattcggccttggagcgagtttcagctattttagaagtagcagagccaagcttgattattgccatttcagcctttcccttggagcaggtttctacaccaatgataaatctagctcaggttcaagaagcctttgcccaagggaataactatgaaatcacgcatccagtcaagggagatgataattactacattatctttacttctggtacgactggtaagcctaagggagtgcagatttcacatgataatctcctcagctttacaaactggatgattacggataaggaatttgcgacaccgagtcgtccgcaaatgctggcacagccaccttattcttttgacttgtctgtcatgtattgggcaccgaccttggcacttggtggtacgcttttcactcttccttcagtcatcactcaggactttaagcaactctttgcggctatcttttcattgccaatcgctatctggacatcaacaccatcctttgcagatatggccatgttgtctgaatacttcaacagtgagaaaatgcctggaatcacgcatttctactttgatggtgaagaattgacggtcaaaacagctcaaaaactgcgcgagcgtttcccaaatgcccgtatcatcaatgcttacggcccaacagaagcgacagtagctctgtcagcagttgccgtgacagacgagatgttagcgactctcaaacgcctaccaatcggctataccaaggctgattctccaacctttatcattgacgaggaaggaaataaactgccaaatggtgagcagggagaaatcattgtttctgggccagctgtttcaaaaggttatatgaacaatcctgaaaaaacagcagaagccttctttgagtttgaagatctgccagcctatcacacaggcgatgtgggaaccatgacagatgagggcttgcttctctacggcggacgcatggacttccagattaagtttaacggttaccgcattgagttagaagatgtctctcaaaacctcaacaagtctcgctttatcgaatctgctgtcgcagtaccgcgctataacaaggaccacaaggtacaaaatctattggcttatgtcatcttaaaagacggtgttcgtgagcagtttgagcgagatatcgatattaccaaggccatcaaggaagacctgacagacatcatgatgtcctatatgatgccatctaaattcctttaccgagacagtttgccactaactccaaatggaaagattgacatcaaaggattgattaacgaggtgaataagagatga

SEQ ID NO: 37497 - DNA, 1362 bp, Streptococcus pneumoniae
ttgaaagaaaaacaattttggaatcgtatattagaatttgcacaagaaagactgactcgatccatgtatgatttctatgctattcaagctgaacttatcaaggtagaggaaaatgttgccactatatttctacctcgctctgaaatggaaatggtctgggaaaaacaactaaaagatattattgtagtagctggttttgaaatttatgacgctgaaataactccccactatattttcaccaaacctcaagatacgactagctcacaagttgaagaagctacaaatttaactctttatgactatagtccaaagttagtatctattccttattcagatacgggattaaaagaaaagtatacctttgataactttattcaaggggatggaaatgtttgggctgtatcagccgctttagctgtctctgaagatttggctctgacctataaccctctttttatctatggaggaccaggccttggtaagactcacttattaaacgctattggaaatgaaattctaaaaaatattcctaatgcgcgtgttaaatatatccctgccgaaagctttattaatgactttcttgatcacctaagacttggggaaatggaaaagtttaaaaagacctatcgtagtcttgatcttttgttaatcgatgatatccagtcactcagcggaaaaaaagtcgcaactcaggaagaatttttcaatacctttaacgcccttcatgacaagcaaaaacagattgtcctaacgagtgatcgtagtccaaaacatctagaagggctcgaggagaggcttgtcacgcgttttagttggggattgacacaaactatcacaccccctgactttgaaacacgtattgccattttacaaagtaaaacggaacatttaggctacaatttccaaagtgatactctagaatacctagctgggcaatttgattcaaatgttcgagatcttgagggagccatcaacgacatcactttaattgccagagtaaaaaaaatcaaggatatcactattgatattgctgcagaagccattagagcccgcaaacaagatgttagccaaatgctcgtcatcccaattgataaaatccaaactgaagttggtaacttttatggtgttagtatcaaagaaatgaagggaagtagacgccttcaaaatattgttttggcccgtcaagtagccatgtatttatctagagaactaacagataatagtcttccaaaaattgggaaggaatttgggggaaaagatcataccacagtcattcatgcccatgccaaaataaaatctttgattgatcaagacgataatttacgtttagaaattgaatcaatcaaaaagaaaatcaaataa

SEQ ID NO: 37498 - DNA, 1137 bp, Streptococcus pneumoniae
atgattcatttttcaattaataaaaatttatttctacaagcattaaatattactaagagagctattagttctaaaaatgccattcctattttatcaactgtcaaaattgacgtgaccaacgaaggtgttactttaattggttcaaatggtcaaatttcaattgaaaattttatttctcaaaaaaatgaagatgctggtttgttaattacttctttaggttcgatccttcttgaagcttctttctttatcaatgtagtatctagtttacctgatgtaactcttgattttaaagaaattgaacaaaatcaaattgttttaaccagtggcaaatcagaaattaccctaaaaggaaaagatagcgaacaatatccacgaatccaagaaatttcagcaagcactcctttaatacttgaaacaaaattactcaagaaaattattaatgaaacagcctttgctgcaagtacacaagagagtcgtccgattttaacaggtgtccacttcgtattgagtcaacacaaagagttaaaaacagttgcaacagactctcatcgcctaagccagaaaaaattaactcttgaaaaaaatagtgatgattttgatgtcgtaattcctagccgttctctacgcgaattttcagcggtatttacagatgatatcgaaactgtagagattttctttgccaataaccaaatcctctttagaagcgaaaatattagcttctatactcgtctcctagaaggaaactatcctgatacagatcgcttgattccaacagactttaacactactattacttttaatgtggtaaacttacgccagtcaatggagcgtgcccgtcttttatcaagtgcgactcaaaatggtactgtgaaacttgaaattaaggatggggttgttagcgcccatgttcactctccagaagttggtaaagtaaacgaagaaatcgatactgatcaggttactggtgaagatttgaccattagtttcaacccaacttacttgattgattctcttaaagctttaaatagcgaaaaggtgaccattagctttatctcagctgttcgtccatttactcttgtgccagcagatactgacgaagacttcatgcagctcattacaccagttcgtacaaattaa

SEQ ID NO: 37499 - DNA, 195 bp, Streptococcus pneumoniae
atgtatcaagttggaaattttgttgagatgaaaaaaccacacgcttgtacaatcaagtcgactggtaaaaaggctaatcgttgggaaattacacgtgtaggagcagatatcaaaataaaatgcagtaattgtgagcatgttgtcatgatggggcgatatgattttgagcgaaaaatgaataaaattattgactga

SEQ ID NO: 37500 - DNA, 1116 bp, Streptococcus pneumoniae
atggctttgacagcaggtatcgttggtttgccaaacgttggtaaatcaacactatttaatgcaattacaaaagcaggagcagaggcagcaaactacccatttgcgactattgatccaaatgttggaatggtggaagttccagatgaacgcctacaaaaactaactgaaatgataactcctaaaaagacagttcccacaacatttgaatttacagatattgcagggattgtaaaaggagcttcaaaaggagaagggctagggaataaattcttggccaatattcgtgaagtagatgcgattgttcacgtagttcgtgcttttgatgatgaaaatgtaatgcgcgagcaaggacgtgaagacgcctttgtagatccacttgcagatattgatacaattaatctggaattaattcttgctgacttagaatcagtgaacaaacgatatgcgcgtgtagaaaagatggcacgtacgcaaaaagataaagaatcagtagcagaattcaatgttcttcaaaagattaaaccagtcctagaagacgggaaatcagctcgtaccattgaatttacagatgaggaacaaaaggttgtcaaaggtcttttccttttgacgactaaaccagttctttatgtagctaatgtggacgaggatgtggtttcagaacctgactctatcgactatgtcaaacaaattcgtgaatttgcagcgacagaaaatgctgaagtagtcgttatttctgcgcgtgctgaggaagaaatttctgaattggatgatgaagataaaaaagagtttcttgaagccattggtttgacagaatcaggtgtagataagttgacgcgtgcagcttaccacttgcttggattgggaacttacttcacagctggtgaaaaagaagttcgcgcttggactttcaaacgtggtatgaaggctcctcaagcagctggtattatccactcagactttgaaaaaggctttattcgtgcagtaaccatgtcatatgaagatctagtgaaatacggatctgaaaaggccgtaaaagaagctggacgcttgcgtgaagaaggaaaagaatatatcgttcaagatggcgatatcatggaattccgctttaatgtctaa

SEQ ID NO: 37501 - DNA, 3510 bp, Streptococcus pneumoniae
atggtgaccttattagatttattctcagaaaatgatcagattaaaaaatggcatcaaaatttaacagataagaaaagacaactaatacttggtttatcaacatctactaaggctcttgcaattgcaagcagtttagaaaaagaagataggattgtgttattgacgtcaacttatggagaagcagaaggacttgttagtgatcttatctctatcttgggtgaggaactcgtctatccatttttggtagatgatgctcctatggtggagtttttgatgtcttcacaggaaaaaattatttcacgggttgaagccttgcgttttttgactgattcatctaagaaagggattttagtttgtaatatcgcagcaagtcgattgattttaccgtctcccaatgcattcaaagatagtattgtaaaaatctcagttggtgaagaatatgatcaacacgcgtttatccatcagttaaaggaaaatggctatcgaaaagttactcaagtacaaactcagggcgaatttagtcttcgaggagatattttagatatttttgaaatatcccagttagaaccttgtcgaattgagttttttggtgatgaaattgatggtatcaggtcatttgaagtagaaacacaattatcgaaagaaaataagacagaactcactatctttccagctagtgatatgcttttgagagaaaaggattatcaacgaggacagtcagctttagaaaaacaaatttcaaaaactttatcacctattttgaaatcatacctagaagaaattctttcaagttttcaccaaaaacaaagtcatgcagactctcggaagtttttatctttgtgctatgataagacatggactgtctttgattatattgaaaaagatactccaatattctttgatgattatcaaaaattgatgaatcagtatgaagtctttgaaagagaattagcgcagtactttacagaagaattacagaatagtaaagcattttctgatatgcagtatttttctgatattgaacaaatctataaaaaacaaagtccagtgacctttttctctaatcttcaaaagggtttaggaaatctcaaatttgacaaaatttatcaattcaatcaatatcctatgcaggaatttttcaatcagttttcttttctaaaagaagaaattgaacgatataaaaaaatggattacaccattattctgcagtctagcaattcaatgggaagtaaaacattggaggatatgttagaggaatatcagattaaattggattctagagataagacaagtatctgtaaagaatctgtaaatttaatagagggtaatctcagacatggttttcattttgtagatgaaaagattttattgataactgaacatgagatttttcaaaagaaattaaagcgtcgttttcgaagacaacatgtttcaaatgcagagagattaaaagattacaatgaacttgaaaaaggggactatgttgtccatcatatccatgggattggtcaatatctaggaattgaaaccattgaaatcaaggaaattcatcgtgattatgtcagtgtccagtaccaaaatggtgatcaaatttctattcccgtggaacagattcatctactgtccaaatatatttcaagtgatggtaaagctccaaaactcaataaattaaatgacggtcattttaaaaaggccaagcaaaaggttaagaaccaggtagaggatatagctgatgatttaatcaaactctactctgaacgtagtcagttgaagggttttgctttctcagctgatgatgatgatcaagatgcctttgatgatgctttcccttatgttgaaacggatgatcaacttcgtagtattgaggaaatcaagagggatatgcaggcttctcagccaatggatcgacttttagttggggatgttggttttggaaagactgaagttgctatgcgtgcagcctttaaagcagtcaatgatcacaaacaggttgtcattctagttccgacgacggttttagcgcaacagcactatacgaattttaaggaacgattccaaaattttgcagttaatgttgatgtgttgagtcgctttagaagtaaaaaagagcagactgcaacacttgaaaaattgaaaaacggtcaagtcgatattttgattggaacacatcgtgttttgtcaaaagatgttgtgtttgctgatttgggcttgatgattattgatgaggaacagcgatttggtgtcaagcataaggaaactttgaaagaactgaagaaacaagtggatgtcctaaccttgaccgctacgccaatccctcgtaccctccatatgtctatgctgggaatcagagatttgtctgttattgaaactccgccgactaatcgctaccctgttcagacctatgttttggaaaagaatgatagtgtcattcgtgatgctgtcttgcgtgaaatggagcgtggaggtcaaggttactatctttacaacaaagttgacacaattgttcagaaggtttcagaattacaggagttgattccagaggcttcgattggatatgttcatggtcgaatgagtgaagtccagttggaaaatactctattagactttattgagggacaatacgatatcttggtgactactactattattgagacaggggtggacattccaaatgctaatactttatttattgaaaatgcggaccatatgggcttgtcaaccttatatcagttaagaggaagagtcggtcgtagtaatcgtattgcttatgcttatctcatgtatcgtccagaaaaatcaatcagtgaagtctctgaaaagagattagaagcgattaaaggatttacagaattgggctctggctttaagattgcaatgcgagatctttcgattcgtggagcaggaaatcttttaggaaaatcccagtctggtttcattgattctgttggttttgaattgtattcgcagttattagaggaagctattgctaaacgaaacggtaatgctaacgctaacacaagaaccaaagggaatgctgagttgattttgcaaattgatgcctatcttcctgatacttatatttctgatcaacgacataagattgaaatttacaagaaaattcgtcaaattgacaaccgtgtcaattatgaagagttacaagaggagttgatagaccgttttggagaatacccagatgtagtagcctatcttttagagattggtttggtcaaatcatacttggacaaggtctttgttcaacgtgtggaaagaaaagataataaaattacaattcaatttgaaaaagtcactcaacgactgtttttagctcaagattattttaaagctttatccgtaacgaacttaaaagcaggcatcgctgagaataagggattaatggagcttgtatttgatgtccaaaataagaaagattatgaaattttagaaggtctgctgatttttggagaaagtttattagagataaaagagtctaaggaaaaaaattccatttga

SEQ ID NO: 37502 - DNA, 267 bp, Streptococcus pneumoniae
atgagattagataaatatttaaaagtatcgcgaattatcaagcgtcgtacagtcgcaaaggaagtagcagataaaggtagaatcaaggttaatggaatcttggccaaaagttcaacggacttgaaagttaatgaccaagttgaaattcgctttggcaataagttgctgcttgtaaaagtactagagatgaaagatagtacaaaaaaagaagatgcagcaggaatgtatgaaattatcagtgaaacacgggtagaagaaaatgtctaa

SEQ ID NO: 37503 - DNA, 1278 bp, Streptococcus pneumoniae
atgagggaaccagattttttaaatcattttctcaagaagggatatttcaaaaagcatgctaaggcggttctagctctttctggtggattagattccatgtttctatttaaggtattgtctacttatcaaaaagagttagagattgaattgattctagctcatgtgaatcataagcagagaattgaatcagattgggaagaaaaggaattaaggaagttggctgctgaagcagagcttcctatttatatcagcaatttttcaggagaattttcagaagcgcgtgcacgaaattttcgttatgatttttttcaagaggtcatgaaaaagacaggtgcgacagctttagtcactgcccaccatgctgatgatcaggtggaaacgatttttatgcgcttgattcgaggaactcgcttgcgctatctatcaggaattaaggagaagcaagtagtcggagagatagaaatcattcgtcccttcttgcattttcagaaaaaagactttccatcaatttttcactttgaagatacatcaaatcaggagaatcattattttcgaaatcgtattcgaaattcttacttaccagaattggaaaaagaaaatcctcgatttagggatgcaatcttaggcattggcaatgaaattttagattatgatttggcaatagctgaattatctaacaatattaatgtggaagatttacagcagttattttcttactctgagtctacacaaagagttttacttcaaacttatctgaatcgttttccagatttgaatcttacaaaagctcagtttgctgaagttcagcagattttaaaatttaaaagccagtatcgtcatccgattaaaaatggctatgaattgataaaagagtaccaacagtttcagatttgtaaaatcagtccgcaggctgatgaaaaggaagatgaacttgtgttacactatcaaaatcaggtagcttatcaaggatatttattttcttttggacttccattagaaggtgaattaattcaacaaatacctgtttcacgtgaaacatccatacacattcgtcatcgaaaaacaggagatgttttgattaaaaatgggcatagaaaaaaactcagacgtttatttattgatttgaaaatccctatggaaaagagaaactctgctcttattattgagcaatttggtgaaattgtctcaattttgggaattgcgaccaataatttgagtaaaaaaacgaaaaatgatataatgaacactgtactttatatagaaaaaatagataggtaa

SEQ ID NO: 37504 - DNA, 1959 bp, Streptococcus pneumoniae
atgaaaaaacaaaataatggtttaattaaaaatccttttctatggttattatttatctttttccttgtgacaggattccagtatttctattctgggaataactcaggaggaagtcagcaaatcaactatactgagttggtacaagaaattaccgatggtaatgtaaaagaattaacttaccaaccaaatggtagtgttatcgaagtttctggtgtctataaaaatcctaaaacaagtaaagaaggaacaggtattcagtttttcacgccatctgttactaaggtagagaaatttaccagcactattcttcctgcagatactaccgtatcagaattgcaaaaacttgctactgaccataaagcagaagtaactgttaagcatgaaagttcaagtggtatatggattaatctactcgtatccattgtgccatttggaattctattcttcttcctattctctatgatgggaaatatgggaggaggcaatggccgtaatccaatgagttttggacgtagtaaggctaaagcagcaaataaagaagatattaaagtaagattttcagatgttgctggagctgaggaagaaaaacaagaactagttgaagttgttgagttcttaaaagatccaaaacgattcacaaaacttggagcccgtattccagcaggtgttcttttggagggacctccggggacaggtaagactttgcttgctaaggcagtcgctggagaagcaggtgttccattctttagtatctcaggttctgactttgtagaaatgtttgtcggagttggagctagtcgtgttcgctctctttttgaggatgccaaaaaagcagcaccagctatcatctttatcgatgaaattgatgctgttggacgtcaacgtggagtcggtctcggcggaggtaatgacgaacgtgaacaaaccttgaaccaacttttgattgagatggatggttttgagggaaatgaagggattatcgtcatcgctgcgacaaaccgttcagatgtacttgatcctgcccttttgcgtccaggacgttttgatagaaaagtattggttggccgtcctgatgttaaaggtcgtgaagcaatcttgaaagttcacgctaagaacaagcctttagcagaagatgttgatttgaaattagtggctcaacaaactccaggctttgttggtgctgatttagagaatgtcttgaatgaagcagctttagttgctgctcgtcgcaataaatcgataattgatgcttcagatattgatgaagcagaagatagagttattgctggaccttctaagaaagataagacagtttcacaaaaagaacgagaattggttgcttaccatgaggcaggacataccattgttggtctagtcttgtcgaatgctcgcgttgtccataaggttacaattgtaccacgcggccgtgcaggcggatacatgattgcacttcctaaagaggatcaaatgcttctatctaaagaagatatgaaagagcaattggctggcttaatgggtggacgtgtagctgaagaaattatctttaatgtccaaactacaggagcttcaaacgactttgaacaagcgacacaaatggcacgtgcaatggttacagagtacggtatgagtgaaaaacttggcccagtacaatatgaaggaaaccatgctatgcttggtgcacagagtcctcaaaaatcaatttcagaacaaacagcttatgaaattgatgaagaggttcgttcattattaaatgaggcacgaaataaagctgctgaaattattcagtcaaatcgtgaaactcacaagttaattgcagaagcattattgaaatacgaaacattggatagtacacaaattaaagctctttacgaaacaggaaagatgcctgaagcagtagaagaggaatctcatgcactatcctatgatgaagtaaagtcaaaaatgaatgacgaaaaataa

SEQ ID NO: 37505 - DNA, 1287 bp, Streptococcus pneumoniae
atgacttcagttgttgttgtaggtacccaatggggtgatgaaggtaaagggaagattacagacttcctttcagcgaatgcagaagtgattgcacgttaccaaggtggtgataatgctggtcacacgattgtgattgacggtaagaaatttaagttgcacttgattccatctgggattttcttccctgaaaaaatatctgtcattgggaatggtatggttgtaaatcctaaatctcttgtaaaagagttgagctatcttcatgaggaaggtgtaacaactgataacttgcgtatttctgatcgtgcgcatgttattttgccttatcatatcgagttggatcgcttgcaagaagaagctaagggcgacaataagattggtacgacaattaagggaattggtccagcttatatggacaaggctgctcgtgttggaattcgtattgcagatcttttagataaagatattttccgtgagcgtttagaacgtaaccttgctgaaaagaatcgtctttttgaaaaattgtatgacagtaaagcgattgttttcgatgatatttttgaagaatattacgaatatggtcaacaaatcaagaaatacgtgatagatacatctgttatcttgaatgatgcgcttgataatggcaaacgtgtgctttttgaaggtgcacaaggtgttatgctagatatcgaccaaggtacttatccatttgttacgtcatcaaaccctgtagctggtggtgtgacaattggttctggtgtcggtccaagcaagattgacaaggttgtaggtgtatgtaaagcttatacgagtcgtgtaggagatggtcctttcccaactgagttgtttgatgaagtgggagaacgtatccgtgaagtgggtcatgagtatggtacaacaactggtcgtccacgtcgtgtaggttggtttgactcagttgtgatgcgtcatagccgtcgtgtttctggtattactaacctttctttgaactctattgatgttttgagcggtttggatactgtgaaaatctgtgtggcctatgatcttgacggtcaacgtattgactactatccagctagtcttgagcaattgaaacgttgcaagcctatctatgaagagttgccaggttggtcagaagatattaccggagttcgcaatttggaagatcttcctgagaatgcgcgtaactatgttcgtcgtgtgagtgaattggttggcgttcgtatttctactttctcagtaggtcctggtcgtgaacaaacaaatattttagaaagtgtttggtcctaa

SEQ ID NO: 37506 - DNA, 1263 bp, Streptococcus pneumoniae
gtggaagaggttgaggttgccgaagttaagaatgcgcgtgtgtccttgacaggtgagaaaaccaagcccatgaaactagctgaggtgacttccatcaatgtcaatcgaaccaagacggagatggaggaattcaaccgtgtgcttggaggcggagtggtaccaggaagtctcgtccttatcggtggggatcctgggattgggaaatcaactcttctcctacaagtctcaacccagttgtcccaagtggggacagttctctatgtcagtggggaggagtctgcccagcagattaaactacgtgcagagcgcttaggtgatattgatagtgagttttatctctatgcagagaccaatatgcagagtgttcgtgcagaagtggagcgtatccagccagactttctcattattgattccatccagaccatcatgtctcctgagatttcaggggtgcaggggtctgtttctcaggtgcgtgaagtgaccgctgaactcatgcagttggccaagaccaataacattgccatctttatcgtaggtcatgtgaccaaagaaggaaccttggctgggcctcgtatgttggagcatatggtggatacggtgctttactttgaaggggagcgtcaccacacctttcgtattttgagagcggtcaaaaatcgttttggttccactaatgagattgggatttttgagatgcagtcgggcggcttggttgaggtactcaatccgagtcaagttttcctagaagagcgtttggatggggcgactggttcctccatcgttgtaaccatggaagggacgcgtccgattttggcggaggttcaggctttggtaacaccgaccatgtttggaaatgccaagcgtactacgacaggacttgattttaaccgtgctagcttgattatggctgttttggaaaaacgggcagggcttctcttgcaaaatcaggatgcctatctcaaatctgctggtggtgttaaattggatgaacctgcgattgacttggctgttgcagttgctattgcttcgagctacaaagacaagccaactaatcctcaggaatgttttgtcggagaactgggcttgacaggagagattcggcgcgtgaatcgtattgagcaacgcatcaacgaagctgctaaactgggctttactaagatttatgtacctaagaattccttgacaggaatcactctgcctaaggaaattcaggtcattggcgtgacaacgattcaggaagttttgaaaaaggtctttgcataa

SEQ ID NO: 37507 - DNA, 1020 bp, Streptococcus pneumoniae
atggaaaatcttgtgaaaagcacaagcgatacatatataccggaggaaatcatgtctttttctgatttaaagctgtttgccctttcttctaataaagaattggcagaacgtgtggcgcaggagattgggatagagttggggaaatcaagtgttcgccaattttcagatggagagattcaggtcaacattgaagaatcaatccgtgggaaacacgtctttatcttacaatcaactagttcgcctgtaaatgacaatctgcttgaaattttgattatggtagatgctttgaagcgtgcgagtgcagagtctgtcaatgttgtcatgccttactatgggtatgcacgtcaggatagaaaggcgagagcgcgtgagccaatcacttcaaaacttgtcgcaaatatgcttgaagtagctggagtggatcgtttattgaccatcgacttgcatgctgcgcaaattcaaggattctttgatattcctgtggatcatttgatgggtgctcctctaattgcagattattttgagcggcgtggtatggttggttctgactatgtggttgtcagcccggaccatggaggggtgactcgtgctcgtaagttggcagaatttttgaaaacatctatcgctattattgataaacgtcgtagcgttgataagatgaatactagtgaagttatgaacatcatcggtaaggttgaaggcaagacttgtatcttgattgatgatatgattgataccgctggaacgatttgtcatgcggcagatgctcttgcggaagctggtgctgttgaagtctatgcaagctgtacgcacccagttctttctggtcctgctacggacaatatccaaaaatcagctattaagaaattggttgttttggataccatctatctgccagaagagcgtttgattgataagattgagcagatttcaatcgctcatctcctaggggatgctatcgtacgtattcatgaaaaacgaccactttctccacttttcgatattgagaaaaaaatttaa

SEQ ID NO: 37508 - DNA, 2634 bp, Streptococcus pneumoniae
atggataagaaaaaattattattgattgatgggtcttctgtagcttttcgggcgttttttgcgctgtatcagcagttggaccgttttaagaatgcggctggtttgcataccaatgcgatttatggttttcagttgatgttgagtcatttgttggagcgggttgagccgagtcatattttggtggcttttgatgcgggaaagacgaccttccggacagagatgtatgcggactataagggtggtcgggccaagactcctgatgagtttcgtgagcaatttcctttcattcgtgagttgctggatcatatggggattcgtcactatgagctggctcagtatgaggcggatgacatcattgggacgctggataagctagcagagcaggatggttttgatattaccattgtcagtggggacaaggatttgattcagctgacggatgagcatacggtggttgaaatttccaagaaaggtgtggctgagtttgaggcctttacgccagattacctcatggaagaaatgggcctcacaccagctcagtttatcgatctcaaggcgctcatgggtgataagtcggataatatccctggggtgaccaaagtcggtgaaaagacgggtattaagctcttgctggagcatggttcgcttgaggggatttatgaaaatattgatggaatgaagacttctaagatgaaggaaaatctcatcaatgacaaggaacaggcctttttgtctaaaacactagcgaccattgataccaaggcaccgattgcgattggtttagaggacttggtctatagtggtccagatgttgaaaatcttgggaaattctacgatgagatgggcttcaaacagctcaagcaggctttaaatatgtcgtcagctgatgtggctgagggtttggattttactattgttgaccaaatcagtcaagatatgctgagtgaagagtctatcttccactttgagctttttggtgagaattaccatacagataatttggttggatttgcctggtcttgtggggatcagctctatgccacagacaagcttgagctgttgcaagacccgattttcaaggatttcttagaaaaaacatctctgagagtttatgactttaagaaggttaaagttcttttgcaacgttttggtgtagatttgcaggcgcctgcttttgacatccgtttggctaaatacctcctttcgactgtggaggacaatgaaattgcgaccatcgctagtctttatggtcagacttacttggttgatgatgaaactttctacggtaagggtgttaaaaaggccattcctgaacgtgagaaattcttggaacacttagcttgtaaacttgctgttttggtagaaacagagcctattttacttgaaaaactcagcgaaaatgggcaattagagcttctttatgatatggagcaacctctggcttttgtccttgccaagatggaaattgctgggattgtggtcaagaaagagaccttgcttgagatgcaggctgaaaatgagcttgtcattgaaaaactgactcaagagatttacgagctggctggtgaggagtttaatgtcaactcgcctaagcagttgggcgtgcttctctttgagaaattgggacttcctctagaatacactaagaaaaccaagacaggttattcgacagcagtggatgttttggagcgtctcgctcctattgctccgattgttaagaaaatcctggattaccgtcaaattgctaagattcaatctacttatgtaattggcttgcaggactggattttggctgatggaaagattcatactcgctatgtgcaggatttgacccagaccgggcgtttgtctagtgtggatccaaacttgcaaaatattcctgcccgattggaacaggggcgcttgattcggaaggcttttgtgccagagtgggaggatagtgtgctactcagctctgactattcacagattgaattgcgcgttttggcgcatatttctaaggatgagcacttgattaaggccttccaagagggggcagatatccatacttcgacagccatgcgggtctttggcattgagcgtcctgataatgtgactgcaaatgaccgtcgcaatgccaaggcagttaactttggagtggtttatgggatttcagactttggcttgtctaataatttgggaattagtcgtaaggaagctaaagcctacattgatacctactttgaacgttttccaggtattaaaaactacatggatgaagtggtgcgggaggcgcgtgataagggctatgtagagaccctctttaagcgtcgccgtgagttgccagatatcaattcgcgcaacttcaatattcgtggttttgcggagcgaactgctatcaactcacctatccagggttcggcagcagatattctcaagattgccatgattcagctagataaagccttggttgcaggtggttatcagactaagatgctgttacaagtgcacgatgaaatcgtccttgaagtgcctaaatctgaattggtagagatgaaaaaattggtgaaacaaaccatggaagaagccattcaactcagtgttcctcttatcgcagatgagaatgaaggggcaacctggtacgaggctaaataa

SEQ ID NO: 37509 - DNA, 1170 bp, Streptococcus pneumoniae
atggacttaactaagcgctttaataaacagttagataaaattcaagtttcgttgattcgtcagtttgaccaggttatttcggagattcctggggtcttgcgtttgaccttgggggaacctgattttacaacgccagaccatgtcaaggaggcggccaagcgagcgattgatcagaaccaatcctactatacagggatgagtggtctgctgactctacgtcaggcagccagtgactttgttaaggaaaagtaccaactggactatgctcctgaaaatgaaatcttggttacaattggggcgacagaggctttatctgcgactttgacggctattttggaagagggagacaaggtacttttgccagctcctgcttatccaggctatgaaccgattgttaacttagttggggcagaaattgttgagattgatacgactgaaaatggttttgtcttgactcctgagatgttggagaaggccattttggagcagggtgataagctcaaggcggttattctcaactatccagccaatccgacaggaattacctacagtcgagagcagttagaggccttggcagctgttttacgcaagtacgaaatttttgttgtctgtgatgaggtttactcagaattgacctacacaggcgaagcccatgtgtctctaggaacgatgttgagagaccaggctattattatcaatggtttgtctaaatcgcatgccatgacaggttggcgtttggggctgattttcgctcctgcgaccttcacagcccagttaatcaagagtcaccagtacttggtcactgccgcaaataccatggcgcaacatgctgcggtagaagccttgacggctggtaaaaacgatgcggagcccatgaagaaggaatatatccaacgtcgggactatatcatcgaaaaaatgactgctcttggttttgagattatcaaaccagacggtgccttctatatttttgctaaaattccagcgggctacaatcaagactcctttgcttttctgaaggattttgctcagaagaaggccgttgcctttatccctggtgcagcctttggacgttacggggaaggctacgtccgcctatcttatgcagccagcatggagactatcaaagaagccatgaaacgacttgaggagtacatgagagaagcatga

SEQ ID NO: 37510 - DNA, 234 bp, Streptococcus pneumoniae
atgacagaaaaagaaatttttgaccgtattgtgaccattatccaagagcgacagggagaggactttgtcgtgacagaatccttgagtctgaaagacgatttggatgcggattctgttgacttgatggagtttatcttgactctggaagatgaatttagtatcgaaatcagcgatgaagaaattgaccaactccaaaacgtaggagatgtggttaaaatcattcaaggaaaatag

SEQ ID NO: 37511 - DNA, 3729 bp, Streptococcus pneumoniae
ttgatggataaacgtatttttgttgaaaaaaaggctgattttcaggtcaagtcagagagtttggttagagagctccagcacaacttgggactgtcaagcttgaaaagtattcgtattgtgcaagtatatgatgtatttgacttggctgaggacttgtttgcacctgcagagaagcacattttctctgagcagggaaccgaccatgttttagatgaagtatctgtgcaggcggatcttgctaactatgctttctttgccattgaaagtctgccagggcagtttgaccagcgtgcagcttcgtcacaggaagccttgcttttgttgggaagttcgagtgacgtgacagttaacacagcccaactttacttggtgaataaagatattgatgcgactgagttggaagctgtcaaaaactacctgctcaatccagttgattctcgtttcaaggatatcacgacagggattgccaagcaggagttttcagagtcagacaagaccattccaaaattgactttctttgaaagctatacagcagaagactttgctcgctacaaggccgagcaagggatggccatggaagtggatgatttgctctttatccaagactactttaagtcaatcgggcgcgtgccaactgagactgaactcaaggttttggacacttactggtctgaccactgccgtcatacgacttttgagacagagttgaaacacatcgacttttcagcttctaaatttcaaaagcaattgcagtcaacctatgacaagtatattgccatgcgcgaggagttaggtcggtctgaaaaaccacaaaccttgatggatatggcgactattttcggtcgttatgagcgtgctaacggacgattggatgatatggaagtctctgacgaaatcaatgcctgctcagttgaaattgaagtggatgttgatggtgtcaaggaaccttggctcctcatgtttaaaaatgaaacccacaaccatccaacagaaattgagccatttggtggagcggctacctgtatcggtggagctattcgtgatccgttgtcaggccgttcctatgtttaccaagccatgcgtatttcaggtgctggtgatattacagcaccgatttcggaaactcgtgctgggaaattgccacaacaagtcatttctaaaacagcagctcatggttattcttcatatggtaaccagattgggcttgccacaacctacgttcgtgaatacttccacccaggctttgtagctaaacgtatggaacttggtgccgttgttggtgcggctcccaagggcaatgttgtccgtgaaaaacctgaagcaggtgatgtgatcatccttctcggaggtaaaacaggtcgtgatggtgtcggtggtgcgacgggctcttctaaggttcaaacagttgagtctgtagagactgctggtgctgaggttcaaaaaggaaatgccatcgaagaacgcaagattcagcgcctcttccgtaatggcaatgtcactcgtctgatcaagaagtccaatgactttggggcaggcggtgtctgtgtggctatcggtgaattggcagacggtcttgaaatcgacctcaacaaggtgcctcttaaataccagggcttgaatggtacagaaattgccatctctgaatcacaagaacggatggcggttgtggttcgtcctgaagatgtggataccttcgttgccgaatgtaacaaagaaaatattgatgctgttgtggtggcgacagtaactgaaaaaccaaatcttgtcatgcactggaatggtgagacaatcgttgacttggagcgtcgtttccttgacatcaatggtgtgcgcgtggttgtcgatgccaaagttgtggacaaggatgtcaaactcccagaagagcgtcaaacatctgctgaaacactggaatcagatacccttacggttctatctgacctcaaccatgcaagtcaaaaaggattacagactatctttgactgctctgttggacgctcaacggttaatcacccacttggtggtcgttaccaactcacaccaactgaggcatctgtgcagaaattgccagttcaacacggtgtgactcatactgcgtcggtcattgctcaaggtttcaacccatatgtagctgaatggtctccataccacggtgctgcttatgcggttatcgaagcaactgctcgtttggtggctgctggtgccaactggtccaaggctcgtttctcttaccaagaatatttcgagcgtatggacaagcaagcagagcgttttggtcagccagtagccgctcttctaggctctattgaagctcagattcaacttggcttgccatctatcggtggtaaggactccatgtctggtacctttgaagaattgaccgttccgccaaccttggttgcctttggggtgacgacggcagatagccgtaaggtgctctctccagaatttaaagctgttggggaaaatatctactacatcccaggtcaagccctctctgcagagattgattttgacttgattaagaaaaattttgctcagtttgaagcaagccaagctgaccataaagtgacatctgcatcagctgtcaaatacggtggtgtagttgaaagtttggctcttgctacctttggaaactatattggtgcagaggtgaccttgcctgaacttaaaacagctttgacagctcaattaggcggctttgtcttcacatctcctgaagaaattgctggagtagagaagattggacaaacgaaagcagactttacactgactgtcaacggtgtgaagctagatggacacaagcttgacagtgcatttcaagggacattggaagaagtttacccaacagaatttacccaagcgaaagaactagaagaagtaccagctgtggcatcagatgttgtgattaaagccaaagaaaaggttgaaaaacctgtggtttacatcccagtctttccaggaaccaactcagaatatgattcagctaaggccttcgaaaaagaaggtgcagaggtcaatttggtgccattcgtgaccttgaatgaagaagctattgtcaagtcagttgaaactatggttgacaatatcgacaagactaatattctcttctttgctggtggattctcggctgcggatgaaccagatggttcagctaagtttatcgtcaatatcctgcttaatgaaaaagtgcgtgtggctattgatagctttatcgcccgtggtggtttgattatcggtatttgtaatggattccaagccttagtcaaatcgggtctcctaccctacggaaactttgaagatgctaacaatactagcccaaccctcttctacaatgatgccaaccaacacgtggccaagatggtggaaactcgcattgccaataccaactcaccatggttggctggtgtgcaagtgggcgatatccacgctattcctgtttcgcacggtgaagggaagtttgtcgtgacggctgaggaatttgcagagctccgtgacaatggacaaattttcagccaatacgttgactttaacggtaaaccaagtatggattctaagtacaatccgaatggttctgtccatgccatcgaaggaattaccagcaagaatggtcaaatcatcggtaagatgggccattcagaacgttatgaggacggtcttttccaaaatatcccaggcaataaagaccagcacctgttcgcgtcagcggttaaacatttcactggaaaataa

SEQ ID NO: 37512 - DNA, 1299 bp, Streptococcus pneumoniae
atgatcaaccgttactctcgccctgagatggcgaatatttggagtgaagaaaataaataccgtgcttggcttgaggtggaaatcctctctgacgaggcatgggctgagttgggggaaatccctaaggaagatgtggctttgattcgcaagaaggcggactttgacatcgaccgtattttggaaattgagcaggagacgcgccacgatgtggtggctttcacgcgtgcggtttctgagactcttggtgaagagcgcaagtgggttcactatgggttaacttctaccgacgtggtggatactgcttatggttacctctacaagcaggccaacgacatcatccgtcgtgaccttgaaaacttcactaatatcatcgctgacaaggccaaggagcacaagttcaccatcatgatggggcgtactcatggtgtgcacgctgagccgacaacttttggtcttaaattggcaacttggtatagcgaaatgaaacgcaatatcgagcgtttcgagcatgcggctgctggtgtagaagctggtaagatttctggtgcggttgggaactttgccaatatcccaccatttgtagaggagtatgtctgcaacaagcttggtatccgtgctcaagaaatctctacacaagtccttcctcgtgaccttcacgctgagtactttgcagttcttgccagcattgcgacttcaatcgaacgtatggcgactgagattcgtggtctacaaaaatctgagcaacgcgaagtagaagagttctttgctaaagggcaaaaagggtcttcagcaatgcctcacaaacgcaacccaatcggttctgaaaatatgactggtctggcgcgtgtcattcgtggtcacatgattacggcttatgaaaacgtcgctctctggcacgaacgcgatatttcccactcatcagctgagcgtatcatcacaccagatacgaccattttgattgactacatgctcaaccgttttggaaatatcgtcaagaacttgacagtcttcccagaaaatatgatccgaaacatgaactcgacttttggtcttatctttagccaacgggctatgttgacattgattgaaaaaggcatgacccgtgagcaagcctatgacttggtgcaaccaaaaacagcctactcttgggacaaccaagtagactttaaaccacttcttgaggcagattcagaagtaacatcacgtctcactcaagaagaaatcgatgaaatcttcaacccagtttattacaccaaacgagtggatgatatctttgaacgtcttggactaggtgattaa

SEQ ID NO: 37513 - DNA, 855 bp, Streptococcus pneumoniae
atgacctatgaatataagagtcacatttatttggcagagacagctttaaatgtaaaggatttggccagtcaaacagccttttatcagcaagttattggtttagaaatcttatctcaaactgagacagagtccattctaggccttggtggaaaagtcttggtacagctgattcaagcacaagagagcggagaagtgagggaacattatggtctttaccatttggccattctcttgcccacacgcaaggctttggctgatgtcttgaaacacctgacagatttgcaaattcctcttgtcggcggtgcagaccatggttacagtgaagctatttacttggaagatttggagggaaatggcattgaactctatcgagataagccagtttccacatgggatattcgagaagatggacgcattatcggagtgacggaggctcttgcggcgcaggacatttatgagttgggggaaagagtagagccctttatcctggcagaaggtacaagaatggggcatattcatctttccgtcaaggatagtcgaaagtccagccagttttatcaaaaggtgttagggctagaggataaattcagtgtgcctagcgctagttggattgcggctggagattaccatcatcatttagcagttaacgaatggagaggaaaaggtctggcttcgcgtaagcaaggcttaccaggtttagcctactatgtcatcgaagtcgcacataaaaaagaactgttaacgattgcccaacgagcacaagaagttgacgcaccaatcaaatggatgacatcgagcaaattggaaatcacagactcagatggcatcgtgacccgtattcgtttagcaaggtaa

SEQ ID NO: 37514 - DNA, 612 bp, Streptococcus pneumoniae
atgtcacgttatacaggaccatcttggaaacaagctcgtcgccttggcctttcacttacaggtacaggtaaagaattggcacgtcgtaactacgtaccaggacaacacggaccaaacaaccgttctaaattgtcagaatacggtttgcaattggctgaaaaacaaaaacttcgtttcacttacggtgtaggtgaaaaacaattccgtaacttgttcgtacaagctacaaaaatcaaaggcggaatcctaggtttcaactttatgcttcttttggaacgtcgtttggataacgttgtttaccgtcttggtctcgcgactactcgtcgtcaagctcgtcaattcgtaaaccacggtcacatccttgttgacgggaaacgcgttgatatcccatcataccgcgtaactccaggtcaagtgatctcagttcgtgaaaaatcattgaaagttccagcaatccttgaagcagtagaagctactcttggacgtccagcattcgtatcattcgacgctgaaaagttggaaggttcattgactcgcttgccagaacgcgacgaaatcaacccagaaatcaacgaagcacttgtcgttgaattctacaacaaaatgttgtaa

SEQ ID NO: 37515 - DNA, 987 bp, Streptococcus pneumoniae
atggcaaaagatattcgtgtcttactttactacctttatactccaattgaaaatgcagagcaatttgctgcagaccacttggctttctgtaaatcaatcggccttaaaggccgtatcctagtcgctgacgagggaattaacggaacagtttcaggtgactatgaaacaactcaaaaatacatggactacgttcacagccttccaggaatggaagaactctggttcaagattgacgaagaaaatgaacaagccttcaagaagatgtttgttcgctacaagaaagaaattgtccaccttggtttggaagacaacgactttgacaatgacatcaacccacttgaaacaacaggtgcttacttgtctccaaaagagttcaaagaagcgcttcttgataaagataccgttgtccttgacacacgtaacgattatgagtacgacctaggacatttccgtggggctattcgcccagatattcgcaacttccgtgagttaccacaatgggtccgtgataacaaggaaaaattcatggacaagcgtgtcgtggtttactgtacaggtggcgttcgctgtgagaaattctcaggctggatggtccgtgaaggctacaaagatgtcggccaattgcacggaggaatcgcaacttacggtaaagacccagaagttcaaggtgagctttgggatgggaaaatgtacgtctttgacgagcgtattgccgttgatgtcaaccatgtcaacccaaccatcgtagggaaagactggtttgatggaacaccatgtgaacgttatgtcaactgtggaaatcccttctgtaaccgtcgtatcttgacatcagaagaaaatgaagacaagtaccttcgtggatgctcacacgagtgccgtgttcacccacgtaaccgctatgtttcaaaaaatgaattgacacaagctgaagtgattgagcgcctagccgctatcggtgaaagcttggatcaggcagctactgtataa

SEQ ID NO: 37516 - DNA, 1851 bp, Streptococcus pneumoniae
atgaataaaaaactaacagattatgtgattgatctggtggaaattttaaataaacaacaaaagcaggttttctggggaatatttgatattttcagtatggtggtttccatcattgtatcttatatcttattctacggcttgattaatccagcacctgttgactacattatctatacgagtttggccttcctgttctatcaattgatgattggtttttgggggttgaacgctagtattagtcgttacagcaagattacggatttcatgaaaatcttttttggtgtgactgccagcagtgtcttgtcatatagtatctgttatgccttcttgccactcttctccatccgtttcatcattctctttatcttgttgagtaccttcttgattttattgccacggattacttggcagttaatctactccagacgcaaaaaaggtagtggtgatggagaacaccgtcggaccttcttgattggtgccggtgatggtggggctctttttatggatagttaccaacatccaaccagtgaattagaactggtcggtattttggataaggattctaagaaaaagggtcaaaaacttggtggtattcctgttttgggctcttatgacaatctgcctgaattagccaaacgccatcaaatcgagcgtgtcatcgttgcgattccgtcgctggatccgtcagaatatgagcgtatcttgcagatgtgtaataagctgggtgtcaaatgttacaagatgcctaaggttgaaactgttgttcagggccttcaccaagcaggtactggcttccaaaaaattgatattacggaccttttgggtcgtcaggaaatccgtcttgacgaatcgcgtctgggtgcagaactgacaggtaagaccatcttagtcacaggagctggaggttcaatcggttctgaaatctgtcgtcaagttagtcgcttcaatcctgaacgcattgtcttgctcggtcatggggaaaactcaatctaccttgtttatcatgaattgattcgtaagttccaagggattgattatgtacctgtgattgcggacattcaagactatgatcgtttgttgcaagtctttgagcagtacaaacctgctattgtttatcatgcggcagcccacaagcatgttcctatgatggagcgcaatccaaaagaagccttcaaaaacaatatccgtggaacttacaatgttgctaaggctgttgatgaagctaaagtgtctaagatggttatgatttcgacagataaggcagttaatccaccaaatgttatgggagcaaccaagcgcgtggcggagttgattgtcactggctttaaccaacgtagccaatcaacctactgtgcagttcgttttgggaatgttcttggtagccgtggtagtgtcattccagtctttgaacgtcagattgctgaaggtgggcctgtaacggtgacagacttccgcatgacccgttactttatgaccattccagaagctagccgtctggttatccatgctggtgcttatgccaaagatggggaagtctttatccttgatatgggcaaaccagtcaagatttatgacttggccaagaagatggtgcttctaagtggccacactgaaagtgaaattccaatcgttgaagttggaatccgcccaggtgaaaaactctacgaagaactcttggtatcaaccgaactcgttgacaatcaagttatggataagattttcgttggtaaggttaatgtcatgcctttagaatccatcaatcaaaagattagagagttccgcactctcagtggagatgagttgaagcaagctattatcgcctttgctaatcaaacaacccacattgaataa

SEQ ID NO: 37517 - DNA, 1392 bp, Streptococcus pneumoniae
atggctaagaatacaaaattatggggtggtcgctttgaaggtactgtcgaagactgggtagagcgctttggtgcgagtatatcttttgaccagaaattagctaaatttgatgtgattggttctttagcccacgttcagatgttgggtcagacgggcattttgagtttggaggagtcagaaaagattcaagtaggcttgaaagagcttttagaagagctagaggcaggtcaacttgactttgatatcgcaaacgaagatattcatatgaatatggaagtgttgctgacagaaaaaattggtccccttgcagggaagttacatacggctcgttctcgaaatgaccaagttgcgacagatatgcacttgtatctcaaggaacaactaggctatgtcctagataaactggctcatcttaagggtgttttattagacttggcggaaaatcatgtggcgacgatcatgccgggctatacccatctgcaacatgcccagcctattagttttgcctaccacctgatggcttactacaatatgtttcaaagagacagtgaacgttttgaatttaaccagaagcatacagacctatgccctttaggtgcggcagctttggcaggaacgactttccccattgatcgccaattgtctagcgatttgctggagtttaagcaaccttatacaaattctttggatgctgttagtgaccgcgattttatcttagaatttctatcaaatgccagcatactcatgatgcatatgagtcgtttttgcgaagaaatgattaattggtgtagttttgagtaccaattcattaccttgtcagatacgtttacaataggttcctctattatgccccaaaagaaaaatccagatatggctgagttgattcgaggaaagactggcagagtttatgggcatttgtttggactgttgacagtcatgaagtccttgcctttagcttataataaggatttgcaagaagataaggaaggaatgtttgatacggtcgaaacgattttaaattccctcgatgtgttggcaggtatgttatctagtttgcaggtaaacaaggaaaaaatgcaagaatcaacagagaaggacttttcaaatgcaactgagttggcagattatttggcagggaaaggcttgccatttagagaagctcatgaggttgtgggaagattagtgctagactctatcaagtctgctaaaaatcttcaagattggactttggaggaattacaaacctatcattctctcattaccgaggatatctatgtctacttgcaacctaaaactgctgttcaaagacgaaattccttgggaggcacagggtttgaccaagtcgaataccagattgcagtcgctaagaaagcgaatgaagctaaaaagtga

SEQ ID NO: 37518 - DNA, 1860 bp, Streptococcus pneumoniae
atgaataagaaaaaaatgattttaacaagtctagccagcgtcgctatcttaggggctggttttgttgcgtctcagcctactgttgtaagagcagaagaatctcccgtagccagtcagtctaaagctgagaaagactatgatgcagcgaagaaagatgctaagaatgcgaaaaaagcagtagaagatgctcaaaaggctttagatgatgcaaaagctgctcagaaaaaatatgacgaggatcagaagaaaactgaggagaaagccgcgctagaaaaagcagcgtctgaagagatggataaggcagtggcagcagttcaacaagcgtatctagcctatcaacaagctacagacaaagccgcaaaagacgcagcagataagatgatagatgaagctaagaaacgcgaagaagaggcaaaaactaaatttaatactgttcgagcaatggtagttcctgagccagagcagttggctgagactaagaaaaaatcagaagaagctaaacaaaaagcaccagaacttactaaaaaactagaagaagctaaagcaaaattagaagaggctgagaaaaaagctactgaagccaaacaaaaagtggatgctgaagaagtcgctcctcaagctaaaatcgctgaattggaaaatcaagttcatagactagaacaagagctcaaagagattgatgagtctgaatcagaagattatgctaaagaaggtttccgtgctcctcttcaatctaaattggatgccaaaaaagctaaactatcaaaacttgaagagttaagtgataagattgatgagttagacgctgaaattgcaaaacttgaagatcaacttaaagctgctgaagaaaacaataatgtagaagactactttaaagaaggtttagagaaaactattgctgctaaaaaagctgaattagaaaaaactgaagctgaccttaagaaagcagttaatgagccagaaaaaccagctccagctccagaaactccagccccagaagcaccagctgaacaaccaaaaccagcgccggctcctcaaccagctcccgcaccaaaaccagagaagccagctgaacaaccaaaaccagaaaaaacagatgatcaacaagctgaagaagactatgctcgtagatcagaagaagaatataatcgcttgactcaacagcaaccgccaaaagctgaaaaaccagctcctgcaccaaaaacaggctggaaacaagaaaacggtatgtggtacttctacaatactgatggttcaatggcgacaggatggctccaaaacaacggttcatggtactacctcaacagcaatggtgctatggctacaggttggctccaatacaatggttcatggtattacctcaacgctaacggtgctatggcaacaggttgggctaaagtcaacggttcatggtactacctcaacgctaatggtgctatggctacaggttggctccaatacaacggttcatggtattacctcaacgctaacggcgctatggcaacaggttgggctaaagtcaacggttcatggtactacctcaacgctaatggtgctatggctacaggttggctccaatacaacggttcatggtactacctcaacgctaacggtgctatggctacaggttgggctaaagtcaacggttcatggtactacctcaacgctaatggtgctatggcaacaggttgggtgaaagatggagatacctggtactatcttgaagcatcaggtgctatgaaagcaagccaatggttcaaagtatcagataaatggtactatgtcaatggtttaggtgcccttgcagtcaacacaactgtagatggctataaagtcaatgccaatggtgaatgggtttaa

SEQ ID NO: 37519 - DNA, 1176 bp, Streptococcus pneumoniae
gtgaagcacacacgaccttcaatcgtgaataaacgaatagatgggagacttaccatgagtgataactctaaaacacgtgttgtcgtggggatgagtggtggtgttgattcgtcggtgacggctcttttgctcaaggagcagggctacgatgtgatcggtatcttcatgaagaactgggatgacacagatgaaaacggcgtctgtacggcgaccgaagattacaaggatgtggttgcggtggcagatcagattggcattccctactactctgtcaattttgaaaaagagtactgggaccgcgtttttgagtatttcctagctgaataccgtgcagggcgcacgccaaatccggacgttatgtgcaacaaggaaatcaagttcaaggcctttttggactatgccatgaccttgggggcagactatgtagcgactgggcactatgctcgagtggcgcgtgatgaggatggcactgttcacatgcttcgtggcgtggacaatggcaaggatcagacctatttcctcagccaactttcgcaagaacaacttcaaaaaaccatgttcccactaggacatttgaaaaagcctgaagttcgaaaactagcagaagaagcaggtctttcgactgctaagaagaaagactcgacagggatttgctttatcggagaaaagaactttaaaaactttctcagcaactacctgccagctcagcctggtcgtatgatgactgtggatggtcgtgatatgggcgagcatgctggtcttatgtactatacaatcggtcagcgtggcggactcggtatcggtgggcaacacggtggtgacaatgccccttggttcgttgtcggaaaagatctaagcaagaatattctctatgtaggccaaggtttctaccatgattcgctcatgtcaaccagcctagaggctagccaagtccactttactcgtgaaatgccagaagagtttacgctagaatgtacggctaaattccgttaccgtcagcctgactctaaggtgaccgtccatgtcaaaggagacaaggcagaagttatctttgcggaaccacaacgcgcgattacaccaggacaggcagttgtcttttacgatggcgaagagtgtctaggtggcggtttgattgacaatgcttaccgcgatggacaagtttgtcagtacatttag

SEQ ID NO: 37520 - DNA, 1914 bp, Streptococcus pneumoniae
atgatttatcattttactgaagaatacgatattattgtaattggtgcgggacacgctggggttgaggcttccttggccgctagccgtatgggctgtaaggtcctgcttgcgaccatcaatattgaaatgctggctttcatgccttgtaatccctctatcggtggttctgccaaggggattgtcgtacgtgaagtcgatgccctcggtggcgagatggccaagactattgacaagacttacatccagatgaagatgctcaacacagggaaggggccagctgtccgtgctcttcgtgcgcaggctgacaaggaactttactctaaggagatgcgcaagacagttgaaaatcaagaaaatctgacccttcgtcaaaccatgattgatgagattttggtggaagatggcaaggctgtcggtgtgcgtacagccacccatcaagaatatgctgctaaggctgttattgtgacgacagggactgctctccgtggggaaattatcatcggagacctcaagtactcatcaggtcctaaccacagcttggcttctattaacctagctgacaatctcaaggaactgggtctcgaaatcggtcgtttcaagacaggaacccctccacgtgtcaaggcttcttctatcaattacgatgtgacagaaattcagccaggagacgaagtgcctaatcatttctcatacacttcacgtgatgaggattatgtcaaggaccaagtaccatgctggttgacctataccaatggtaccagtcatgagattatccaaaacaacctccaccgtgcgcctatgtttacaggtgtggtcaagggagtgggacctcgttactgtccatcgattgaggacaagattgtgcgctttgcggacaaggaacgtcaccaactcttccttgagccagaaggacgcaatacagaggaagtctatgttcaaggactttcaaccagtctgcctgaggatgtccaacgtgacttggttcattccatcaaaggtctggaaaatgcagagatgatgcgaacaggttatgctattgagtatgatatggtcttgcctcatcagttgcgtgcgactttggaaaccaagaaaatctcaggtctcttcactgctggtcagacaaatggaacgtcaggttacgaagaggcagcaggccaagggattatcgcgggtatcaatgcggctctgaaaatccaaggcaagcctgaattgattctaaaacgaagtgacggttatatcggggtgatgatcgacgacttggtgaccaagggaaccattgaaccttaccgtctcttgaccagtcgtgctgaatatcgtctcattcttcgccatgacaatgctgatatgcgcttgactgagatgggccgtgagattggccttgtggacgatgaacgctgggctcgttttgaaatcaagaaaaatcaatttgataatgagatgaagcgtctagacagtatcaaacttaagccagtcaaggaaaccaatgctaaggttgaggaaatgggcttcaagccgttgacagatgcggtgacagccaaggaattccttcgccgtccagaagtttcttaccaagatgtggtggccttcatcggaccagctgcagaggaattagatgacaagattatcgaattgattgaaacagaaatcaagtacgaaggctatatttccaaagccatggatcaggttgccaagatgaaacgtatggaagaaaaacgcattccagccaatatcgactgggatgacatcgattctattgcgacggaagctcgtcagaagttcaaactcatcaatccagaaaccatcggccaagccagtcgtatttcgggagtaaacccagcagatatttctattttgatggtgtatctggaaggtaaaaatcgtagtatttctaaaactcttcaaaaatcaaaatga

SEQ ID NO: 37521 - DNA, 1833 bp, Streptococcus pneumoniae
atgccagctcagaacttgagggccgtatcactgctcgccaacttgtcgaagaaaatcgcccagagtacaatatcgagtatatcgaactcttgtctgacaaattgctcgattacgaaaaagaaactggcgccttcgaaattacggagttctaatatggcctacactcttaaacctgaagaagtcggcgtttttgccatcggtggtctaggagaaatcgggaaaaacacttacggaattgaataccaagacgagattatcatcgtcgatgctgggattaaattcccagaagatgacttgcttggtatcgactatgtcattcctgactactcttacatcgtagacaatatcgaccgcgtcaaggctgttttaatcacacacggacacgaggaccacattggtgggattccgttcctactcaagcaagcaaatgtccctatttatgctggaccgcttgccttggctttgatccgtgggaaactcgaagaacacggcctcttgcgcaacgccaaactttacgaaatcaaccacaacaccgagttgacctttaaaaatctcaaggcaactttctttagaacgactcactctattccagagcctttggggattgtcattcatactcctcaagggaaaatcgtctgtacgggtgactttaagttcgactttactccagttggagaacctgcggacttgcatcgtatggctgcgcttggtgaagaaggcgtgctctgtctcctgtctgactcgacaaatgcggaagtaccaacctttaccaactctgaaaaagtcgttggtcagtccattatgaagattatccaaggtattgaaggacgtatcatctttgcatcctttgcctcaaatatcttccgtctccagcaggcaacagaagctgctgttaagactggacgcaagattgcggtctttggtcgttctatggaaaaggccattgtcaacggaatcgatcttggctacatcaaagctcctaagggaacctttatcgagccaaatgaaatcaaagattatcctgcaggagaagttcttatcctctgtacaggtagtcagggtgagcctatggcagccctctctcgtatcgccaacggaacccaccgtcaagtacaattacaaccaggtgataccgttatcttctcttctagtcccatccctggaaacactactagcgtcaacaagctgattaacatcatttctgaagctggtgtcgaagttatccacggtaaagtgaacaatatccatacatctggacacggtggccagcaagagcaaaaactcatgctccgcttgattaagccaaaatacttcatgcctgtccacggtgaataccgcatgcaaaaagtccacgctggactagcagtggatactggtgttgagaaggacaatatctttatcatgagcaatggcgatgtgcttgcccttactgctgactcagctcgtatcgcaggtcatttcaacgcccaagatatctatgtcgatggaaatcgtatcggtgaaattggcgcagctgtcctcaaagatcgtcgcgatctatctgaagacggtgtcgttctagcagtcgcaactgttgacttcaaatcgcagatgattctgtctggcccagatatcctcagccgaggctttgtctacatgagagagtctggagacttgattcgccaaagccagcgtatcctcttcaatgccattcgtatcgcactgaaaaataaggatgctagcgtgcaatctgtcaatggtgccattgtcaacgctattcgccccttcctctatgaaaataccgaacgtgaaccgatcatcatcccgatgatcctcacaccagatgaagaataa

SEQ ID NO: 37522 - DNA, 1011 bp, Streptococcus pneumoniae
atgaaggatagatatattttagcatttgagacatcctgtgatgagaccagtgtcgccgtcttgaaaaacgacgatgagctcttgtccaatgtcattgctagtcaaattgagagtcacaaacgttttggtggcgtagtgcccgaagtagccagtcgtcaccatgtcgaggtcattacagcctgtatcgaggaggcattggcagaagcagggattaccgaagaggacgtgacagctgttgcggttacctacggaccaggcttggtcggagccttgctagttggtttgtcagctgccaaggcctttgcttgggctcacggacttccactgattcctgttaatcacatggctgggcacctcatggcagctcagagtgtggagcctttggagtttcccttgctagcccttttagtcagtggtgggcacacagagttggtctatgtttctgaggctggcgattacaagattgttggggagacacgagacgatgcagttggggaggcttatgacaaggtcggtcgtgtcatgggcttgacctatcctgcaggtcgtgagattgacgagctggctcatcaggggcaggatatttatgatttcccccgtgccatgattaaggaagataatctggagttctccttctcaggtttgaaatctgcctttatcaatcttcatcacaatgccgagcaaaagggagaaagcctgtctacagaagatttgtgtgcttccttccaagcagcagttatggacattctcatggcaaaaaccaagaaggctttggagaaatatcctgttaaaaccctagttgtggcaggtggtgtggcagccaataaaggtctcagagaacgcctagcaactgaaatcacagatgtcaatgttatcattccacctctgcgtctctgcggagacaatgcaggtatgattgcttatgccagtgtcagcgagtggaacaaagaaaactttgcaaacttggacctcaatgccaaaccaagtcttgcctttgataccatggaataa

SEQ ID NO: 37523 - DNA, 954 bp, Streptococcus pneumoniae
atggataggaatatagatcaagaattagtaagtattataataccaacacataataggtatgaatctctgattagagctgtgaaaagttgtttacatcaaagttataaaaatatcgaagttataattattgatgataattatagtaatgtaaatttaagaaataaaattatccatcaatttggctataccaatcatagaattaagttaattttaagtaatgaagatttaggtgcaactaatgccagaaacataggtatcaaaaattctagaggtaagtatatatcatttttagacgatgatgatgaatatatgccagatcgaattttaaagttgatggcttgttttaaaaagagtagaatgaagaatttagctttagtttatagttatggcataataatttatccaaatggtacacgagaagaggagaagaccgattttgttggaaatcccttgtttgttcaaatggttcacaatatagcaggtacgtcattttggttgtgtaaaaaagaggtgctagaattaattaatggttttgagaaaatagattcacatcaggacggtgttgttttattaaaactacttgctcaaggataccaaattgatatagtgcgagaattcttggtgaattactacgctcacagtaaagaaaacggtatcactggagtgacacaaaaaacaattaatgcagatgaagaatattataattactgtaggaaatattttaatttattgagtttcaacgagagaatattggttacaaagaaatattattctttaaacataaagcggttactattaataggagacaaatgcaaggctttaaaagtaatcaagaaggcaagagaagaaaaaatttttaacgaatttctttttttgaaatatatgttattatataattttagttttttctattgtatatatgacaactatgttcaattaaaatttagaaagtga

SEQ ID NO: 37524 - DNA, 855 bp, Streptococcus pneumoniae
atgaaaatcaaaaaatggcttggtctagcagcccttgctacagtcgcaggtttggctcttgcagcttgcggaaactcagaaaagaaagcagacaatgcaacaactatcaaaatcgcaactgttaaccgtagcggttctgaagaaaaacgttgggacaaaatccaagaattggttaaaaaagacggaattaccttggaatttacagagttcacagactattcacaaccaaacaaagcaactgctgatggcgaagtagatttgaacgctttccaacactataacttcttgaataactggaacaaagaaaacggaaaagaccttgtagcgattggagatacttacatctctccaatccgcctttactcaggtttgaatggaagtgccaacaagtacactaaagtagaagacatcccagcaaacggagaaatcgctgtaccgaatgacgctacaaacgaaagccgtgcgctttacttgcttcaatcagctggcttgattaaattggatgtttctggaactgctcttgcaacagttgccaacatcaaagaaaatccaaagaacttgaaaatcactgaattggacgctagccaaacagctcgttcattgtcatcagttgacgctgccgttgtaaacaataccttcgttacagaagcaaaattggactacaagaaagcacttttcaaagaacaagctgatgaaaactcaaaacaatggtacaacatcattgttgcgaaaaaagattgggaaacatcacctaaggctgatgctatcaagaaagtaatcgcagcttaccacacagatgacgtgaaaaaagttatcgaagaatcatcagatggtttggatcaaccagtttggtaa

SEQ ID NO: 37525 - DNA, 693 bp, Streptococcus pneumoniae
atggaatcattgattcaaacctatttaccaaatgtctataaaatgggttgggctggtcaggcaggctggggaacggctatctacttaactctttatatgacagttctttccttcattatcggaggcttcttggggctagtggcaggtctctttctcgtcttgacagcgccaggtggtgtcttggagaataaagtcgtattctggattttagacaaaattacctcaatttttcgtgcggttccctttatcatcctcttggcaatcttgtcaccactttctcacttgattgttaaaacaagtatcgggccaaatgcagcccttgtcccactttcttttgcagtctttgccttctttgcccgtcaggtgcaggttgtcttggctgaattggatggcggtgtcattgaggcggctcaagcgagcggagcgactttctgggacatcgtgggtgtttacctatcagaaggtcttccagatttgatccgtgtgacgactgtgaccttgatttcccttgttggggaaacagctatggccggtgcggttggagctggtggtatcggtaacgtagccatcgcttatggatttaaccgctacaatcacgatgtgaccatcttggcaaccatcgttatcattttgattatctttgcaatccaattcttaggagatttcttgactaagaaattgagccataaataa

SEQ ID NO: 37526 - DNA, 603 bp, Streptococcus pneumoniae
gtggcgacaacagaaagccttggcagaagaagaggaaacagaagagcttacctaagtattgacaaaaaagaactatcaagatacaatcttggtagttgttttttgattatagataaaatcatggaggtacatatgaagacaatttctttagtttatattagtttgagtggcaacactgaaagttttgtgacgcgcttgaaagactatctcttgtcccagtacaaaaggattgaggttcaaaagattcatatcaaggatttggtcaaggaaggcaaaaatttctatgaaatggaccatccctatgtcgcttttttgccgacctatctcgaaggtgggaatggcgtggataacggagatgttgagattttgacgacaccggtgggagattttattgcctatggtaacaatgctagtaagtgttttggtgtggttgggtcaggaaatcgtaactttaataaccaatactgcctaacagccaagcaatacagtcaacgctttggcttccctgtattggctgactttgaaatgcgaggcatgctggaagatatcaaacatgtcgcagctattatcgcagatttgtatgagttggaaaaggagaattaa

SEQ ID NO: 37527 - DNA, 1263 bp, Streptococcus pneumoniae
atgtcgcaagctatttccttaaatcaatcaacctgggcaagcaagctaaaagcaatgggacctggaatcctaatggcaactgccgctgttggaggttcccacattgtatcctcaactcaagctggcggttcttacggttggtctctacttctcttggtcatcttagccaatgtctttaaatatccatttttccgttttggtgctgaatacacagctgatactggaaagactttggttgaaggttatgccgaaaaaggaaaaccctatctctggattttctttatcctcaatgtcttttcggctatggtcaacacggctggtgttgccattctgtgctcagctatcatcgccagtgccttcccaatgattggacttagcattactcagtggtccctcattctcgttgcaatcatttgggctatgctactctttggaggctacaaacttttagacggcatggtcaaatggattatgtctgccttaaccattgcgactgttctggcagttatcatagcagcggtcaagcatccagaatacagttctgattttgtcgagaagacaccttggcaaatggcagctctgcccttcatcgtctccctcctaggatggatgccggctcctattgaaatttcagccatcaattcactttggtcagctgaaaagagaaagaccgtcaactttaacacagaagacgctctgtttgactttaacactggttatattggaacagctatcctagccgtcttctttgtggcactgggagcactgattcagtatcctacagggcaggcggttgaagctgcttcagccaaatacatctctcaattcgtgggcatgtatgcctctgttcttggcgaatggtcccgttacttgattacctttattgccttcctctgtatctttggaacagttataactgttatcgatggctattctcgcgttaatcaggaatctctccgactgctaatcagtcaaaaagaggacaatcgtaaatctttgaacatctggatgaccatcactgctatcatcggtatcgtcattatcaagttcttcgctggtcaggtttcaaccatgctccgctttgccatgattggatctttcctgacaacacctttctttgctcttttgaattacgccttggtaacgcgtgaaaacaaaaatcttccttcttggctcaaacaccttgccattgcgggattgattttcctctttggcttcgccatcttctttatctacgcactcgcaatcggaaaagcagggtaa

SEQ ID NO: 37528 - DNA, 1950 bp, Streptococcus pneumoniae
atgtctcatattattgaattgccagagatgctggcaaaccaaatcgcagctggagaggtcattgaacgtcctgccagtgtggtcaaagagttggtagaaaatgccattgacgcgggctctagtcagattattattgagattgaggaagctggtctcaagaaggttcaaatcacggataacggtcatggaattgcccacgatgaggtggagttggccctgcgtcgccatgcgaccagtaagataaaaaatcaagcagatctctttcggattcggacgcttggttttcgtggtgaagccttgccttctattgcgtctgttagtgtcttgactctgttaacggcggtggatggtgctagtcatggaaccaagttagtcgcgcgtgggggtgaagttgaggaagtcatcccagcgactagtcctgtgggaaccaaggtttgtgtggaggatctctttttcaacacgcctgcccgtctcaagtatatgaagagccagcaagcggagttgtctcatatcattgatattgtcaaccgtctgggcttggcccatcctgagatttcttttagcttgattagtgatggcaaggaaatgacgcggacagcagggactggtcaattgcgccaagcaatcgcagggatttacggtttggtcagtgccaagaagatgattgaaattgagaactctgacctagatttcgaaatttcaggttttgtgtccttgcctgagttgactcgggctaaccgcaattatatcagtctcttcatcaatggccgttatatcaagaacttcctgctcaatcgtgctattttggatggttttggaagcaagcttatggttggacgttttccactggctgtcattcacatccatatcgacccttatctagcggatgtcaatgtgcatccaactaagcaagaggtgcggatttccaaggaaaaagaactgatgactctggtttcagaagctattgcaaatagtctcaaggaacaaaccttgattccagatgccttggaaaatcttgccaaatcgaccgtgcgcaatcgtgagaaggtggagcaaactattctcccactcaaagaaaatacgctctactatgagaaaactgagccgtcaagacctagtcaaactgaagtagctgattatcaggtagaattgactgatgaagggcaggatttgaccctgtttgccaaggaaaccttggaccgattgaccaagccagcaaaactgcattttgcagagagaaagcctgctaactacgaccagctagaccatccagagttagatcttgctagcatcgataaggcttatgacaaactggagcgagaagaagcatccagcttcccagaattggagtttttcggacaaatgcacgggacttatctctttgcccaagggcgagatggactttacatcatagatcagcacgctgctcaggaacgggtcaagtacgaggagtaccgtgaaagcattggcaatgttgaccagagccagcagcaactcctagtgccctatatctttgaatttcctgcggatgatgccctgcgtctcaaggaaagaatgcctctcttagaggaagtgggcgtctttctagcagagtacggagaaaatcaatttattctacgtgaacatcctatttggatggcagaagaagagattgaatcaggcatctatgagatgtgcgacatgctccttttgaccaaggaagtttctatcaagaaataccgagcagagctggctatcatgatgtcttgcaagcgatctatcaaggccaatcatcgtattgatgatcattcagctagacaactcctctatcagctttctcaatgtgacaatccctataactgtcctcacggacgtcctgttttggtgcattttaccaagtcggatatggaaaagatgttccgacgtattcaggaaaatcacaccagtctccgtgagttggggaaatattaa

SEQ ID NO: 37529 - DNA, 468 bp, Streptococcus pneumoniae
atgaacacttatgaaggtaatttagtagcaaacaatattaaaataggtattgttgtagcgagatttaatgaatttataacttcaaaattattatctggagcactagataatctcaaaagagagaatgtaaacgagaaagatatcgaggtagcctgggttccaggagcttttgaaataccactgattgcatcaaaaatggcaaaaagtaaaaaatatgatgcaattatctgcttgggagctgtcattagagggaatacaagtcattatgattatgtatgtagcgaggtatctaagggaatcgcccaaatcagtttaaatagcgaaattcctgttatgtttggtgtgctaacgacagatacaattgaacaagccatagaacgagctggtactaaagcaggaaataagggttctgagtgtgcacaaggagctattgaaatggtcaacctaattcgtacattagacgcatag

SEQ ID NO: 37530 - DNA, 1206 bp, Streptococcus pneumoniae
atggaatatcgaaaaatacaagaagcattagaagcattgcagaagggacgacttgttcttgttatagacgacaaggatagagaaaatgaaggagacttaatttgttctgcacaagcagctacaacagaaaatgttaattttatggctacttatgccaaaggattaatttgtatgcctatgagcgaaagtttagctaatcaattaatgctttcacctatggttgaaaacaatacagataatcataagactgcttttacagtttcaattgattataaagaaacgaccacaggtatttctgccgaggaaagaggactgaccgcacgtatgtgtgtagctgaagatataacaccctctgattttcgcaggccaggacacatgtttcctttaattgcaaaaaaaggtggtgtcctagaaagaaatggacacacagaagcaactgttgatttattaaaattagctggactaaaagagtgtggcctatgttgtgaaataatgaatcatgatggcaaaatgatgagaacagatgatttaattcagttctcgaagaaacacaacattccattaattaccatcaaagaattacaagaatatagaaaagtatatgatcagctggtagaacgagtttcaactgtcaatatgcctactagatacggtaatttcaaagcaattagctatatagataaactaaatggggaacatcatcttgctcttattatgggaaatatagaggatgaagccaatgtattatgtcgggtccactccgaatgtttaacaggagatgttttaggctctttacgttgcgattgtggacagcaattcgataaagctatgaaaatgattgttgagaatggttcgggtgtcttactttacttgcgacaggagggacgaggaattggacttatcaataaattaaaagcctatcatttacaagatcaaggcatggatacgcttgatgccaatcttgcattaggctttgaaggtgatttaagaaaatatcatattggagcacaaatgcttaaagatctgggacttcagtcacttcatttactgacaaataatcctgacaaggttgaacagttagaaaaatatggaattaccatttccagtagaatatcaatcgaaatagaagccaatccttacgatagtttttatttagaaacaaagaaaaatcgaatgggtcacattttaaatatggaggaaaaataa

SEQ ID NO: 37531 - DNA, 636 bp, Streptococcus pneumoniae
atgttcacaggaataattgaagaaatcggaaaagttgaaagaatacagaaagactctcgtaattgtaaactatcaattaaagcctcaaaaatattaacggatatccatttaggcgatagtatagcagtaaatggtatctgtcttacagttactcatttcaatcatcaatcctttacagttgatgtaatgaatgaaacatggagtcgaacagctcttactctattaaaacatggaagtgaggtgaatctagaaagagccttatctgtcaacggtcgacttgggggtcacgtcgttacaggacacattgatggtacaggaaaaatctcgtcaataaaaaaagatgataatgctgtatggcatcaaatcaacacacaaaaagaaattttagatttaatagttgaaaaaggatctattacaattgacggcattagtctgactgtcgctaaagtctccaaagtaaacttttcagtatctgttatccctcataccttggaacaaaccattcttaagagtaaacaagtcgggagtacagtaaatcttgaaaatgatatcttaggtaaatatgtgcaaaaactgatggataactctccaaaatcagaaatatctaaggaactattatatcaaaatggattttag

SEQ ID NO: 37532 - DNA, 1101 bp, Streptococcus pneumoniae
atgagcgattcaaaatatatgaaattagcaataaaactggcacaaaaaggggctggttacgtcaaccccaatcctatggtcggcgcagttattgtaaaagataatcacatcatcggacaaggttatcatgagttttttggtggcccacatgctgagagaaatgctcttaaaaactgtagagaatcccctgtcggagcgacgctttatgtaacacttgaaccctgttgtcacttcgggaaaacacctccctgtatagatgctataatcgatagtggtattacaagagtagtcattggaagcctagactgtaatcctattgtatctggaaaaggagtaaagatacttgaggaaaataatcttcaagttactgttggaattttagaaaatgagtgtcttaacttaataaaaagttttagaaagtatattacccagcatgtaccctatgtttttatgaaatatgcaatgtcaatggatggaaaaatagccactaaaacaaatcaatccaaatggattactgaagaagaagcaagaaagcatgtgcatcagttacgacactatgttagtgcaattatggtgggagtcaatactgttattcaagacgatcctttgctgacatgtagattggaggaagggaaaaatcctatccgtatcatatgcgatacacatttacgaactcctcttacctctaaaatcgtaaaaacagcaaatgatattaaaacttacattgccacttcctctgaagacaaaaataaaatgaagctatatcaaaatcatggctgtgaaatactttccataaagaaaaaaggcaatcatatagacttatcgagtttaatgcaacatctaggaaacatgcagattgatagcctagttctagaagggggcagtctaatgaattggagtgctttggaacaacaaattgttgatgagctgaaaatatatattgcaccaaaaatttttggaggcagtgccaagtttcctgtcggaggtgaaggcatttctttgccaaatgacgctattagattgaaaccttatgctttttctcaaataggaaatgactatctcatagaaagtgaagtgatttatccatgttcacaggaataa

SEQ ID NO: 37533 - DNA, 2832 bp, Streptococcus pneumoniae
atgcaagataaaattgtcattcatggggcgcgtgcccataatttaaaaaatattgatgtggagattccgcgagacaagttggttgtcgtgactggcttgtcaggttcagggaagtccagtctggcttttgatactctctatgcggagggacaacgtcgctatgtagagagtttgtccgcctacgctcgtcagttcttgggaaatatggaaaaaccagatgtagatgccattgatggtctcagcccagctatttccatcgaccagaaaacgactagtaaaaatcctcgctcgacggtgggaacaacgactgaaatcaatgactatctgcgtctcctctacgcacgtgtggggacgccttactgtatcaacggacatggagctatcaatgcttcttctgtggagcaaatcgttgataaggttttggagttacctgaacgccagcgcttgcagatcttggctcctgtcatccgcaagaaaaaaggccaacataagagtgttatcgagaaggttcagaaagacgggtatgttcgtgtccgtgtggatggggaagtctatgatgtgaccgaagtgccagagttgtctaagagcaagcaacacaatatcgatgtcgtggttgaccgtattgttatcaaggagggcattcgtagtcgtctctttgattccattgaggctgcccttcgtattgcagaaggttatgtcattatcgacaccatggacgactctgagttgttgttctctgagcattatgcctgtccagtttgtggttttactgtcccagagttagagcctcgtctcttttctttcaatgctccttttggctcttgtagtgagtgtgacggcttgggcatcaagctggaggtggatactgatttggtagtgccagatgctagcaaaaccttacgtgagggagcgctagcaccttggaatcctatctcatccaactactatccaaacatgttagagcaggccatgaaagtctttggagtggctatggataagccttttgaggacctgtcagaagaagataagaacttgattctctatgggtcagatggtaaggaattccatttccactatgagaatgaatttggtggcgtgcgcgatatcgacattccgtttgagggagttatcaataatatcaaacgtcgttaccatgaaaccaatagcgattacactcgcactcagatgcgtctctacatgaatgagctgacctgcggaacctgtcaaggctatcgtctcaatgaccaggccttgtctgtccgtgtgggcggccagcaagggccacatattggagaaatctcagacctgtctatcgctgaccacttggacttggtgagccagttaactttgtctgaaaatgaagccatcattgctcgtcccattctcaaggaaatcaaggatcgtttgaccttccttaataatgtgggtcttaactatctaaccctgtcacgttcagcaggaaccctttcaggtggggaaagtcagcgcattcgtttggcaacccagattggttccaacctatcaggcgtcctctatatcctagacgagccgtcaatcggtcttcaccagagggacaatgaccgcctgattgccagtctgaaaaagatgcgtgacttgggcaatactcttatcgtggtggaacacgacgaagataccatgcgtgaagctgattatctgattgacgttggtcctggtgccggtgtttttggtggtgagattgttgcagcaggtacacctaagcaagtggctcgcaacagcaagtctatcacaggtcagtacttgtcaggcaaacgtgtcatcccagtaccagaagagcgccgtgtcggaaatggtcgttttattgaagtgataggagcgcgtgagaacaacttgcaaaatgtcacggctcgctttccactaggaaaatttatcgcagtgacaggtgtgtcgggttcagggaaatcgactctaatcaacagcattctcaaaaaagccattgcccagaagctcaaccgtaattcagacaaacctggtaagtttaagactattacagggattgagcatgtcgaccgtttgattgatattgaccagagccctatcggacggacgccgaggtctaacccagctacctatacaggagtttttgacgatatacgtgacctttttgctcagacaaatgaagccaagattcgaggctacaagaaggggcgcttcagtttcaacgtcaagggaggtcgctgtgaagcttgctcaggtgacgggattatcaagattgagatgcacttcttgccagatgtttatgtggcttgtgaagtttgccacggaacccgctataacagtgaaaccctagaagttcactacaaggaaaagaatatttcgcaggtcttggatatgacggtcaacgatgcggtagaatttttccaacacattccgaaaattcaacgcaaactccagaccatcaaggatgtagggctaggctatgtgaccttgggacagccagctaccaccctttctgggggagaagcccaacgtatgaagttagctagcgaactccacaaacgctcgacaggaaaatctttctacattctggatgagccgacgacagggcttcatacagaggacattgctcgcctgctcaaggttttagctcgctttgtagacgatggcaatacagtcctcgtcatcgagcacaatctggatgttatcaagacggcagaccatatcattgacttgggacctgagggcggtgtcggtggtggaaccatcatcgtaacaggaactccagaagaagtagctgccaacgaagccagctatacaggacactatttgaaaggaaagttacatcatgaataa

SEQ ID NO: 37534 - DNA, 267 bp, Streptococcus pneumoniae
atgggatttactgaagaaacagtacgttttaaattggacgattccaataaaaaagaaattagcgaaactttgacagatgtttatgcttcgttgaacgataagggttacaacccaattaaccaaatcgtaggttacgtattgagtggagaccctgcctacgttcctcgttataataatgcacgaaatcaaatccgtaagtatgagcgtgatgaaatcgttgaggaattggttcgctactatctcaaaggacaaggagtcgatctataa

SEQ ID NO: 37535 - DNA, 420 bp, Streptococcus pneumoniae
atgagaattatgggattggacgtcggttcaaaaacggtaggggtggcgattagcgatccgcttggttttacagctcaagggcttgaaatcatccagataaatgaagaacaaggccaatttggttttgaccgcgttaaggaattggttgatacttacaaggtggaacgatttgtagtgggcttgcctaaaaacatgaacaatacaagtggaccgcgcgtagaagctagtcaagcctacggagcaaagctagaagagttttttggtttaccagtagactatcaggatgaacgcttgacaacagtggctgctgagcgcatgttgattgaacaagcagatatcagtcgcaataagcgcaagaaagtcattgataagttagcagctcagctgattttacaaaattatttagatagaaaattttaa

SEQ ID NO: 37536 - DNA, 306 bp, Streptococcus pneumoniae
atgtcacacgatcataaccacgaccacgaagaacgtgaactaatcacactagtagatgagcaaggaaatgaaaccttgtttgaaatccttttgacaattgatggaaaagaagaatttggtaaaaactatgttcttctagtaccagttaacgcagaagaagacgaagacggacaagttgaaatccaagcttactcattcattgaaaatgaagatggaacagaaggcgaattgcaaccaatcccagaagactcagaagacgaatggaacatgattgaagaagtcttcaacagctttatggaggagtga

SEQ ID NO: 37537 - DNA, 591 bp, Streptococcus pneumoniae
atgaataatccaaaaccacaagaatggaaaagcgaggaacttagtcaaggtcgtatcattgactacaaggcctttaactttgtggacggcgaaggcgtgcgcaactctctctatgtatcaggctgtatgtttcactgcgagggatgttataatgttgcgacttggtcttttaatgctggcattccctatacagcagaattagaagagcagattatggcagaccttgcccaaccctatgttcaaggcttgactttgctgggaggggagccttttctcaatactggcattctcttgcctctagttaaacgcatccgaaaggaattgccagacaaggacatttggtcctggacgggctacacttgggaagaaatgatgttggaaactccagataaactggaactcttatcattgattgacattcttgtcgatggaagatatgatcgaactaagagaaatctcatgctccagtttcgaggttcgtccaaccaacgaattatcgatgtgcaaaaatcgctcaaaagtgggcaagtagtgatttgggacaagctcaatgacggaaaagaaagctatgaacaggtgaagagagaatga

SEQ ID NO: 37538 - DNA, 309 bp, Streptococcus pneumoniae
atggcaaacaaaaaaatccgtatccgtttgaaagcttacgaacaccgtacgcttgacacagcggctgcaaaaatcgtagaatcagctactcgtacaggtgcacaagttgcgggtccaatcccacttccaactgaacgtagcctctacacaatcattcgtgcgactcacaaatacaaagactctcgcgaacaatttgaaatgcgtacacacaaacgtttgatcgatatcgttaacccaactcaaaaaacagttgatgccttgatgaaattggatcttccaagtggtgtaaacgtagaaatcaaactttaa

SEQ ID NO: 37539 - DNA, 627 bp, Streptococcus pneumoniae
atgacaaaaggaatcttagggaaaaaagtgggaatgactcaaatcttcactgaagctggcgaattgatccctgtaacagttattgaagcaactccaaacgttgttcttcaagttaaaactgttgaaacagacggatacaacgctatccaagttggtttcgatgacaaacgcgaagtattgagcaacaaacctgctaaaggacatgtagcgaaagctaacacggctcctaagcgcttcattcgtgaattcaaaaacgttgaaggcttggaagttggtgctgaaattacagttgaaacattcgcagctggagacgttgttgacgtaacgggtacttctaaaggtaaaggtttccaaggtgttatcaaacgccacggacaatcacgtggaccaatggctcacggttctcgttaccaccgtcgtccaggttctatggggcctgttgcacctaaccgcgtattcaaaggtaaaaaccttgcaggacgtatgggtggcgaccgcgtaacaattcaaaaccttgaagttgtacaagttgttccagaaaagaacgttatccttatcaaaggtaacgtaccaggtgctaagaaatctcttatcactatcaaatcagcagttaaagctggtaaataa

SEQ ID NO: 37540 - DNA, 624 bp, Streptococcus pneumoniae
atggcaaacgtaacattatttgaccaaactggtaaagaagctggccaagttgttcttagcgatgcagtatttggtatcgaaccaaatgaatcagttgtgtttgatgtaatcatcagccaacgcgcaagccttcgtcaaggaacacacgctgttaaaaaccgctctgcagtatcaggtggtggacgcaaaccatggcgtcaaaaaggaactggacgtgctcgtcaaggttctatccgctcaccacaatggcgtggtggtggtgttgtcttcggaccaactccacgttcatacggctacaaacttccacaaaaagttcgtcgcctagctcttaaatcagtttactctgaaaaagttgctgaaaacaaattcgtagctgtagacgctctttcatttacagctccaaaaactgctgaatttgcaaaagttcttgcagcattgagcatcgattctaaagttcttgttatccttgaagaaggaaatgaattcgcagctctttcagctcgtaaccttccaaacgtgaaagttgcaactgctacaactgcaagtgttcttgacatcgcaaatagcgacaaacttcttgtcacacaagcagctatctctaaaatcgaggaggttcttgcataa

SEQ ID NO: 37541 - DNA, 297 bp, Streptococcus pneumoniae
atgaatttgtatgatgttatcaaaaaacctgtcatcactgaaagctcaatggctcaacttgaagcaggaaaatatgtatttgaagttgacactcgtgcacacaaacttttgatcaagcaagctgttgaagctgctttcgaaggtgttaaagttgccaatgttaacacaatcaacgtaaaaccaaaagctaaacgtgttggacgttacactggttttactaacaaaactaaaaaagctatcatcacacttacagctgattctaaagcaatcgagttgtttgctgctgaagctgaataa

SEQ ID NO: 37542 - DNA, 834 bp, Streptococcus pneumoniae
gtgggaattcgtgtttataaaccaacaacaaacggtcgccgtaatatgacttctttggatttcgctgaaatcacaacaagcactcctgaaaaatcattgcttgttgcattgaagagcaaggctggtcgtaacaacaacggtcgtatcacagttcgtcaccaaggtggtggacacaaacgtttttaccgtttggttgacttcaaacgtaataaagacaacgttgaagcagttgttaaaacaatcgagtacgatccaaaccgttctgcaaacatcgctcttgtacactacactgacggtgtgaaagcatacatcatcgctccaaaaggtcttgaagtaggtcaacgtatcgtttcaggtccagaagcagatatcaaagtcggaaacgctcttccacttgctaacatcccagttggtactttgattcacaacatcgagttgaaaccaggtcgtggtggtgaattggtacgtgctgctggtgcatctgctcaagtattgggttctgaaggtaaatatgttcttgttcgtcttcaatcaggtgaagttcgtatgattcttggaacttgccgtgctacagttggtgttgtcggaaacgaacaacatggacttgtaaaccttggtaaagcaggacgtagccgttggaaaggtatccgcccaacagttcgtggttctgtaatgaaccctaacgatcacccacacggtggtggtgaaggtaaagcaccagttggtcgtaaagcaccatctactccatggggcaaacctgctcttggtcttaaaactcgtaacaagaaagcgaaatctgacaaacttatcgttcgtcgtcgcaacgagaaataa

SEQ ID NO: 37543 - DNA, 282 bp, Streptococcus pneumoniae
atgggacgcagtcttaaaaaaggacctttcgtcgatgagcatttgatgaaaaaagttgaagctcaagctaacgacgaaaagaaaaaagttattaaaacttggtcacgtcgttcaacgatcttcccaagtttcattggttacactattgcagtttatgacggacgtaaacacgtacctgtttacatccaagaagacatggtaggccacaaacttggtgaatttgcaccaactcgtacttacaaaggtcacgctgcagacgacaagaaaacacgtagaaaataa

SEQ ID NO: 37544 - DNA, 345 bp, Streptococcus pneumoniae
atggcagaaattacttcagctaaagcaatggctcgtacagtacgtgtttcacctcgtaaatcacgtcttgttcttgataacatccgtggtaaaagcgtagccgatgcaatcgcaatcttgacattcactccaaacaaagctgctgaaatcatcttgaaagttttgaactcagctgtagctaacgctgaaaacaactttggtttggataaagctaatttggtagtatctgaagcattcgcaaacgaaggaccaactatgaaacgtttccgtccacgtgcgaaaggttcagcttcaccaatcaacaaacgtacagctcacatcactgtagctgttgcagaaaaataa

SEQ ID NO: 37545 - DNA, 654 bp, Streptococcus pneumoniae
gtgggtcaaaaagtacatccaattggtatgcgtgtcggcatcatccgtgattgggatgccaaatggtatgctgaaaaagaatacgcggattaccttcatgaagatcttgcaatccgtaaattcgttcaaaaagaacttgctgacgcagcagtttcaactattgaaatcgaacgcgcagtaaacaaagttaacgtttcacttcacactgctaaaccaggtatggttatcggtaaaggtggtgctaacgttgatgcactccgtgcaaaacttaacaaattgactggaaaacaagtacacatcaacatcatcgaaatcaaacaacctgatttggatgctcaccttgtaggtgaaggaattgctcgtcaattggagcaacgtgttgctttccgtcgtgcacaaaaacaagcaatccaacgtgcaatgcgtgctggagctaaaggaatcaaaactcaagtatcaggtcgtttgaacggtgcagatatcgcccgtgctgaaggatactctgaaggaactgttccgcttcacacacttcgtgcagatatcgattacgcttgggaagaagcagatactacatacggtaaacttggtgttaaagtatggatctaccgtggtgaagttcttccagctcgtaaaaacactaaaggaggtaaataa

SEQ ID NO: 37546 - DNA, 414 bp, Streptococcus pneumoniae
atgttagtacctaaacgtgttaaacaccgtcgtgagttccgtggaaaaatgcgcggtgaagcaaaaggtggaaaagaagtagcattcggtgaatacggtcttcaagctacaactagccactggatcactaaccgccaaatcgaagctgctcgtatcgccatgactcgttacatgaaacgtggtggtaaagtttggattaaaatcttcccacacaaatcatacactgctaaagctatcggtgtgcgtatgggatctggtaaaggggcacctgaaggttgggtagcaccagttaaacgtggtaaagtgatgttcgaaatcgctggtgtatctgaagagattgcacgtgaagcgcttcgacttgctagccacaaattgccagttaaatgtaaattcgtaaaacgtgaagcagaataa

SEQ ID NO: 37547 - DNA, 207 bp, Streptococcus pneumoniae
atgaaacttaatgaagtaaaagaatttgttaaagaacttcgtggtctttctcaagaagaactcgcgaagcgcgaaaacgaattgaaaaaagaattgtttgaacttcgtttccaagctgctactggtcaattggaacaaacagctcgcttgaaagaagttaaaaaacaaatcgctcgtatcaaaacagttcaatctgaagcgaaataa

SEQ ID NO: 37548 - DNA, 261 bp, Streptococcus pneumoniae
atggaacgcaataatcgtaaagttcttgttggacgtgttgtatctgacaaaatggacaagacaatcacagttgtagttgaaacaaaacgtaaccacccagtctatggtaaacgtattaactactctaaaaaatacaaagctcatgatgaaaacaatgttgccaaagaaggcgatatcgtacgtatcatggaaactcgcccgctttcagctacaaaacgtttccgtcttgtagaagttgttgaagaagcggtcatcatctaa

SEQ ID NO: 37549 - DNA, 369 bp, Streptococcus pneumoniae
atgattcaaacagaaactcgtttgaaagtcgcagacaacagcggtgctcgcgaaatcttgactatcaaagttcttggtggttcaggacgtaaatttgcaaacatcggtgatgttatcgtggcatctgtaaaacaagctactcctggtggtgcggttaaaaaaggtgacgttgttaaagcagttatcgttcgtactaaatcaggtgctcgtcgtgctgatggttcatacatcaaatttgacgaaaacgcagcagttatcatccgtgaagacaaaactcctcgcggaacacgtatctttggcccagttgcacgtgaattgcgtgaaggtggcttcatgaagatcgtgtcacttgctccagaagtactttaa

SEQ ID NO: 37550 - DNA, 306 bp, Streptococcus pneumoniae
atgtttgtaaaaaaaggcgacaaagttcgcgtaatcgctggtaaagataagggaacagaagctgttgtccttactgcccttccaaaagtaaacaaagttatcgttgaaggtgttaacattgttaagaaacaccaacgtccaactaacgagcttcctcaaggtggtatcatcgagaaagaagcagctatccacgtatcaaacgttcaagttttggacaaaaatggtgtagctggtcgtgttggttacaaatttgtagacggtaaaaaagttcgctacaacaaaaaatcaggcgaagtgcttgattaa

SEQ ID NO: 37551 - DNA, 543 bp, Streptococcus pneumoniae
atggcaaatcgtttaaaagaaaaatatcttaatgaagtagttcctgctttgacagaacaattcaactactcatcagtgatggctgtgcctaaagtagataagattgttttgaacatgggtgttggtgaagctgtatcaaacgctaaaagccttgaaaaagctgctgaagaattggcacttatctcaggtcaaaaaccacttatcactaaagctaaaaaatcaatcgccggcttccgtcttcgtgaaggtgttgcgatcggtgcaaaagttacccttcgtggtgaacgtatgtacgaattcttggataaattggtatcagtttcacttccacgtgtacgtgacttccacggtgttccaacaaaatcatttgatggacgcgggaactacacacttggtgtgaaagaacaattaatcttcccagaaatcaacttcgatgacgttgacaaaactcgtggtcttgacatcgttatcgtaacaactgctaacactgacgaagagtcacgtgcattgcttacaggccttggaatgccttttgcaaaataa

SEQ ID NO: 37552 - DNA, 270 bp, Streptococcus pneumoniae
atggctaaaaaatcaatggtagctagagaggctaaacgccaaaaaattgttgaccgttatgctgaaaaacgtgctgcattaaaggcggcaggggactacgaaggtttatctaaattacctcgcaacgcctcaccgactcgtttacataatcgttgtagagttacggggcgcccacattcagtttaccgcaaatttggtctgagtcgtatcgcttttcgcgaacttgcgcataaaggtcaaattcctggtgtaacaaaagcatcttggtaa

SEQ ID NO: 37553 - DNA, 399 bp, Streptococcus pneumoniae
atggttatgactgacccaatcgcagacttcctaactcgtattcgtaatgctaaccaagctaaacacgaagtacttgaagtacctgcatcaaacatcaaaaaagggattgctgaaatccttaaacgcgaaggttttgtaaaaaacgttgaaatcattgaagatgacaaacaaggcgtcatccgtgtatttcttaaatacggaccaaatggtgagaaagttatcactaacttgaaacgtgtttctaaaccaggacttcgtgtctacaaaaaacgtgaagaccttccaaaagttcttaacggacttggaattgccatcctttcaacttctgaaggtttgcttactgataaagaagcacgccaaaagaatgttggtggtgaggttatcgcttacgtttggtaa

SEQ ID NO: 37554 - DNA, 537 bp, Streptococcus pneumoniae
atgtcacgtattggtaataaagttatcgtgttgcctgctggtgttgaactcgctaacaatgacaacgttgtaactgtaaaaggacctaaaggagaacttactcgtgagttctcaaaagatattgaaatccgtgtggaaggtactgaagtaactcttcaccgtccaaacgattcaaaagaaatgaaaactatccacggaactactcgtgcccttttgaacaacatggttgttggtgtatcagaaggattcaagaaagaacttgaaatgcgtggggttggttaccgtgcacagcttcaaggatctaaacttgttttggctgttggtaaatctcatccagacgaagttgaagctccagaaggaattacttttgaacttccaaacccaacaacaatcgttgttagcggaatttcaaaagaagtagttggtcaaacagctgcttacgtacgtagccttcgttcaccagaaccatataaaggtaaaggtatccgttacgttggtgaattcgttcgtcgtaaagaaggtaaaacaggtaaataa

SEQ ID NO: 37555 - DNA, 357 bp, Streptococcus pneumoniae
gtgatttcaaaaccagataaaaacaaactccgccaaaaacgccaccgtcgcgttcgcggaaaactctctggaactgctgatcgcccacgtttgaacgtattccgttctaatacaggcatctacgctcaagtgattgatgacgtagcgggtgtaacgctcgcaagtgcttcaactcttgataaagaagtttcaaaaggaactaaaactgaacaagccgttgctgtcggtaaactcgttgcagaacgtgcaaacgctaaaggtatttcagaagtggtgttcgaccgcggtggatatctatatcacggacgtgtgaaagctttggctgatgcagctcgtgaaaacggattgaaattctaa

SEQ ID NO: 37556 - DNA, 495 bp, Streptococcus pneumoniae
atggcatttaaagacaatgcagttgaattagaagaacgcgtagttgctgtcaaccgtgttacaaaagttgttaaaggtggacgtcgtcttcgtttcgcagctcttgttgttgttggtgaccacaatggtcgcgtaggatttggtactggtaaagctcaagaagttccagaagcaatccgtaaagcagtagatgatgctaagaaaaacttgatcgaagttcctatggttggaacaacaatcccacacgaagttctttcagaattcggtggagctaaagtattgttgaaacctgctgtagaaggttctggagttgccgctggtggtgcagttcgtgccgttgtggaattggcaggtgtggcagatattacatctaaatcacttggttctaacactccaatcaacattgttcgtgcaactgttgaaggtttgaaacaattgaaacgcgctgaagaaattgctgcccttcgtggtatttcagtttctgatttggcataa

SEQ ID NO: 37557 - DNA, 183 bp, Streptococcus pneumoniae
atggctcaaattaaaattactttgactaagtctccaatcggacgcattccatcacaacgtaaaactgttgtagcacttggacttggcaaattgaacagctctgttattaaagaagataacgctgctatccgtggtatgattacagcagtatctcacttagtaacagttgaagaagtaaactaa

SEQ ID NO: 37558 - DNA, 441 bp, Streptococcus pneumoniae
atgaaacttcatgaattgaaacctgcagaaggttctcgtaaagtacgtaaccgcgttggtcgtggtacttcatcaggtaacggtaaaacatctggtcgtggtcaaaaaggtcaaaaagctcgtagcggtggcggagttcgccttggttttgaaggtggacaaactccattgttccgtcgtcttccaaaacgtggattcactaacatcaacgctaaagaatacgcaattgtgaaccttgaccaattgaacgtctttgaagatggtgctgaagtaactccagttgttcttatcgaagcaggaattgttaaagctgaaaagtcaggtattaaaattcttggtaacggtgagttgactaagaaattgactgtgaaagcagctaaattctctaaatcagctgaagaagctatcactgctaaaggtggttcagtagaagtcatctaa

SEQ ID NO: 37559 - DNA, 1311 bp, Streptococcus pneumoniae
atgttttttaaattattaagagaagctcttaaagtcaagcaggttcgatcaaaaattttatttacaatttttatcgttttggtctttcgtatcggaactagcattacagttcctggtgtgaatgccaatagcttgaatgctttaagtggattatccttcttaaacatgttgagcttggtgtcggggaatgccctaaaaaacttttcgatttttgccctaggagttagtccctatatcaccgcttctattgttgtccaactcttgcaaatggatattttacccaagtttgtagagtggggtaaacaaggggaagtaggtcgaagaaaattgaatcaagctactcgttatattgctctagttctcgcttttgtgcaatctatcgggattacagctggttttaataccttggctggagctcaattgattaaaactgctttaactccacaagtttttctgacgattggtatcatcttaacagctggtagtatgattgtcacttggttgggtgagcaaattacagataagggatacggaaacggtgtttccatgattatctttgccgggattgtttcctcaattccagagatgattcagggcatctatgtggactactttgtgaacgtcccaagtagccgtatcacttcatctatcattttcgtaatcattttgattattactgtattgttgattatttactttacaacttatgttcaacaagcagaatacaaaattccaatccaatatactaaggttgcacaaggtgctccatctagctcttaccttccgttaaaggtaaatcctgctggagttatccctgttatctttgccagttcgattactgcagcgcctgcggctattcttcagtttttgagtgccacaggtcatgattgggcttgggtaagggtagcacaagagatgttggcaactacttctccaactggtattgccatgtatgctttgttgattattctctttacattcttctatacgtttgtacagattaatcctgaaaaagcagcagagagcctacaaaagagtggtgcctatatccatggagttcgtcctggtaaaggtacagaagaatatatgtctaaacttcttcgtcgtcttgcaactgttggttccctcttccttggtgtgatttccattttaccgattgcagctaaagatgtatttggtctttctgatgttgttgcctttggtggaacaagtctcttgatcattatctctacaggtatcgaaggaatcaagcaattggaaggttacctattgaaacgtaagtatgttggtttcatggacagaacagaataa

SEQ ID NO: 37560 - DNA, 639 bp, Streptococcus pneumoniae
atgaatcttttgattatgggcttacctggtgcaggtaagggaactcaagcagcaaaaatcgtagaacaattccatgttgcacatatctcaacaggtgatatgttccgcgctgcaatggcaaatcaaactgaaatgggtgttcttgctaagtcatatattgacaagggtgaattggttcctgacgaagttacaaatggaatcgtaaaagaacgcctttcacaagatgatattaaagaaacaggattcttattggatggttacccacgtacaattgaacaagctcatgccttggacaaaacattggctgaacttggcattgaactagaaggtattatcaatattgaagtgaaccctgacagcctcttggaacgtttgagtggccgtatcatccaccgcgtaactggagaaactttccacaaggtctttaacccaccagttgactataaagaagaagattactaccaacgtgaagatgataagcctgagacagtaaaacgtcgtttggatgttaatattgctcaaggagaaccaatcattgctcactaccgtgccaaaggtttggttcatgacatcgaaggtaatcaagatatcaatgatgtcttctcagatattgaaaaagtattgacaaatttgaaataa

SEQ ID NO: 37561 - DNA, 273 bp, Streptococcus pneumoniae
ttgttgtctctgtgtctagaggcatcgaatcgaaatttatggaggtgcttttgcgtggcaaaagacgatgtgattgaagttgaaggcaaagtagttgatacaatgccgaatgcaatgtttacggttgaacttgaaaatggacatcagattttagcaacagtttctggtaaaattcgtaaaaactatattcgtattttagcgggagatcgtgttactgtcgaaatgagtccatatgacttgacacgtggacgtatcacttaccgctttaaataa

SEQ ID NO: 37562 - DNA, 117 bp, Streptococcus pneumoniae
atgaaagtaagaccatcggtcaaaccaatttgcgaatactgtaaagttattcgtcgtaatggtcgtgttatggtaatttgcccagcaaatccaaaacacaaacaacgtcaaggataa

SEQ ID NO: 37563 - DNA, 366 bp, Streptococcus pneumoniae
atggctcgtattgctggagttgatattccaaatgacaaacgcgtagtaatctcattgacttatgtttatggtatcggacttgcaacatctaagaaaattttggctgctgctggaatctcagaagatgttcgtgtacgtgatcttacatcagatcaagaagatgctatccgtcgtgaagtggatgcaatcaaagttgaaggtgaccttcgtcgtgaagtaaacttgaacatcaaacgtttgatggaaatcggttcataccgtggtatccgtcaccgtcgtggacttcctgtccgtggacaaaatactaaaaacaacgctcgcactcgtaaaggtaaagctgttgcgattgctggtaagaaaaaataa

SEQ ID NO: 37564 - DNA, 384 bp, Streptococcus pneumoniae
ttggctaaaccaacacgtaaacgtcgtgtgaaaaagaatatcgaatctggtattgctcatattcacgctacatttaataacactattgttatgattactgatgtgcatggtaatgcaattgcttggtcatcagctggtgctcttggtttcaaaggttctcgtaaatctacaccattcgctgctcaaatggcttctgaagctgctgctaaatctgcacaagaacacggtcttaaatcagttgaagttactgtaaaaggtccaggttctggtcgtgagtcagctattcgtgcgcttgctgccgctggtcttgaagtaacagcaattcgtgatgtgactccagtgccacacaatggtgctcgtcctccaaaacgtcgccgtgtataa

SEQ ID NO: 37565 - DNA, 936 bp, Streptococcus pneumoniae
atgatcgagtttgaaaaaccaaatataacaaaaattgatgaaaataaagattatggcaagtttgtaatcgaaccacttgaacgtggctacggtacaactcttggtaactctcttcgtcgtgtacttctagcttctctaccaggagcagctgtgacatctatcaacattgatggtgtgttacatgagtttgacacagttccaggtgttcgtgaagacgtgatgcaaatcattctgaacattaaaggaattgcagtgaaatcgtacgttgaagacgaaaaaatcatcgaactggatgttgaaggtcctgctgaagtaacagctggtgacattttgacagatagcgatattgaaattgtaaatccagatcattatctctttacaatcggtgaaggttcttctctaaaagcgactatgactgttaacagtggtcgtggatatgtacctgctgacgaaaataaaaaggataatgcaccagttggaacacttgctgtagattctatttatacaccagttacaaaagtcaactatcaagtggaacctgctcgtgtaggtagcaatgatggtttcgacaaattaacccttgaaatcttgacaaatggaacaattattccagaagatgctttagggctttcagcacgtattttgacagaacatcttgatttgtttacaaatcttactgagattgctaagtcaactgaagtgatgaaagaagctgatactgaatctgacgaccgtattttagatcgtacgattgaggaactggacttgtctgtgcgttcatacaactgtttaaaacgtgccggtatcaatactgtgcatgatttgacagaaaaatctgaagcagagatgatgaaagtacgaaatcttggacgcaagagtttggaagaagtgaaactcaaactcattgatttgggtcttggattaaaagataaataa

SEQ ID NO: 37566 - DNA, 387 bp, Streptococcus pneumoniae
atggcttaccgtaaactaggacgcactagctcacaacgtaaagcaatgcttcgcgatttgacaactgaccttttgattaacgaatcaatcgtgacaactgaagctcgtgctaaagaaatccgtaaaactgttgaaaaaatgattactctaggtaaacgtggtgatttgcatgcacgtcgtcaagcagctgctttcgtacgtaatgaaatcgcatctgaaaactatgatgaagcaactgataagtacacttctactacagcacttcaaaaattgttctcagaaatcgcacctcgttatgctgaacgtaacggtggatacactcgtatccttaaaactgaaccacgtcgtggtgatgcagcgccaatggcgatcatcgaattagtataa

SEQ ID NO: 37567 - DNA, 750 bp, Streptococcus pneumoniae
atgggtggcttttattttatcattcatgatataatagaagcaaacggaggacggaaaatggtaaaagtacgattgtatttggtacgtcatggcaagaccatgtttaacacgattggtcgcgcgcaaggttggagcgatactcccttaactgctgaaggtgaacgagggattcaagagttaggaatcggtttgcgagaatctgatctacagtttgagcgcgcttattcgagtgattctggtcgtaccattcagaccatgggaattatccttgaagaacttggcttgcaggggaaaatcccttatcgcatggacaagcgtatcagagaatggtgtttcggtagttttgatggagcctatgatggcgatcttttcatgggcattattcctcgtatctttaatgtggaccacgttcaccaattgtcttatgctgaactggctgagggcttggtagaggtcgatacagctggttgggctgaaggctgggaaaaactcagtggccgaatcaaggaaggctttgaaatgattgcaaaagaaatggaagatcaaggtggaggtaacgcccttgttgtcagccatggaatgactattggaaccattgtttatctgattaatggcatgcatccgcatggtctagataatggtagcgtgacgattcttgaatatgaggacggtcagtttagggttgaagttgtcggtgaccgtagttaccgagagctaggacgtgagaagatggaagaaggctctatttaa

SEQ ID NO: 37568 - DNA, 981 bp, Streptococcus pneumoniae
atgaatcaagataggaataaactgctctctaaaattgcttatctgtattatattgaaaacttaaatcagtcacaaatagcagcaaaattaggaatttatagaacctctattagtagaatgttaacagaagcaaggaatgcaggaattgttaaaattgaaatagagaattttgataccaatatgtttaagttggaaaattatgtaaaagaaaaatatggtctggaaagtttagaaattattccaaatgaatttgatgataatccaacaattttatctgaaagaatttctcaagttgcagcaggtgtccttaggaatctaattgatgataatatgaaaattggcttttcttgggggaaaagtttaagtaatttagtagatttaattcacagtaaaagtgtccgaaatgttcacttctatcctctagcaggtggtcctagtcacatacacgctaaataccatgtgaatacactgatttatgaaatgtctagaaaatttcatggagagtgtacatttatgaatgcaacgattgtgcaagaaaataaattgttagcagatggtattttgcaatcaagatattttgaaaatttgaaaaatagttggaaagatttagatatagctgtagtcggaattggtgattttagcaataaaggaaagcatcaatggttagacatgcttacagaggatgactttaaagaattgaccaaagttaaaactgtaggagaaatttgttgtcgattttttgattcaaaaggtaaagaagtctatgaaaacttacaggaaagaacgatagcaatctctttggaagatttaaaaaatattcctcaaagtttagctgttgcttacggtgatacgaaagtatcttcgattctttctgtcttgcgtgctaatttagtaaatcatttgattacagacaaaaatacaattttaaaagttttggaagaagatggggatttgacttttagagagattctaggtgagtga

SEQ ID NO: 37569 - DNA, 2448 bp, Streptococcus pneumoniae
gtgcttacgatggtaaatacagaagtagcaagaacaacaatcaagacagaatattttggcagccttactgaaaggatgaacaaatatcgagaagatgttttaaataaaaaaccttatattgatgctgagagagcagttctagcaacacgcgcctatgaacgatacaaggaacaacctaatgtcctaaaacgtgcatatatgctgaaagaaattttggaaaatatgtctatctatattgaagaagaatctatgattgcgggaaatcaagcttcttccaataaagatgctcctatttttccggaatatacgctagaatttgttctcaatgagttggatctttttgaaaagcgtgatggagatgttttctatattacagaagaaacaaaagaacaacttagaagtattgctccgttttgggaaaataataatttacgtgctagagctggtgccttattacctgaagaagtgtctgtttatatggaaacaggattcttcggtatggaaggtaagatgaattctggagatgctcacttagcagttaactatcagaaacttttgcaatttggtttaagaggttttgaagagcgggctcgtaaagcaaaagtagctctagatttaacagatccagcaagtattgataaatatcatttttacgactctatatttatcgtaatcgatgctattaaagtatatgcaaagcgctttgttgctcttgctaaaagtttagccgaaaatgcaaatcctaaacgtaagaaagaattacttgagattgcagatatttgctctagagtcccatatgaaccggcaactacttttgcagaagctattcaatcagtttggtttattcaatgtattttacaaattgaatctaatggccactctctttcatatggccgttttgatcaatatatgtatccatatatgaaggctgatttagaaagtggtaaagaaacagaagatagcattgttgaacgtctgacaaatctttggattaagacaattacaatcaataaggttcgcagtcaatcacatacattttcttcagcaggaagtcctttatatcaaaatgttacaattggtggacagactcgagataagaaggatgctgttaacccattatcttatttggtattaaaatcagttgcacaaacccatctaccgcaacctaatctaactgtacgttaccatgcaggtttagatgctcgtttcatgaatgagtgtattgaagtgatgaaacttggttttggtatgcctgcatttaataatgatgagattattattccttcttttattgcaaaaggagtattggaagatgatgcttatgattacagtgccattggatgtgttgaaacggcagttccagggaaatggggctatcgttgcacaggtatgagttatatgaacttccctaaggttctacttatcacgatgaatgatggaattgatccggcttcgggtaaacggtttgcaccaagctttggtcattttaaggatatgaagaacttttctgaattagaaaatgcttgggataaaacactaagatatttgacacgaatgagtgttattgttgaaaattctattgatttatcattggaacgagaagttcctgatattctatgttcagcattgactgatgattgtattggtcgtggaaaacaccttaaagaaggtggagcagtatatgattatatatcaggattgcaagttggaattgcaaatttgtcggattcattagctgcaattaaaaaattggtgtttgaggaagaacgtataagcccaagtcagctttggcatgcactggaaacagattatgccggagaagaaggtaaggtcattcaagaaatgttgattcatgatgcacctaagtatggtaatgatgatgattatgctgacaaattggttactgctgcttatgacatttatgttgatgaaattgctaaatatcctaatacacgttatggaagagggcctattggaggaattcgttattcaggaacatcttctatatcagccaacgtagggcagggacgtggaacattagcaactccagatggacgcaacgcgggtacaccgttagcagagggttgttcaccatcacataatatggatcaacacggccctacatctgttttaaaatctgtttcaaaattaccaacagatgaaatcgtaggtggggttctcttaaatcagaaagtaaatcctcaaacgttagccaaagaagaagataaattaaaactaattgctttgttacgaacattctttaatcgtttacatgggtaccatattcaatacaatgttgtttccagagagacgttgattgacgctcagaaacatcctgaaaaacacagagacttaattgttcgtgttgcaggatactctgcattcttcaatgttctttctaaggcaacccaagatgacattataggacgtactgagcatactttgtaa

SEQ ID NO: 37570 - DNA, 669 bp, Streptococcus pneumoniae
atggaatttatgcttgacacattaaatttagatgagattaaaaagtggtctgaaattttgccgctagctggggtaacttcaaatcccactattgcaaaaagagagggttctattaatttttttgaacgaatcaaagatgtaagagaattgattggctctacaccctctattcatgttcaggtgatttctcaagattttgaaggcatcttaaaggatgctcatgaaattcgaagacaagcaggagatgatatatttatcaaagtacctgttactccagctggattacgtgcaataaaggtgctaaaaaaagagggctaccatatcactgcaacagctatttatacagttattcagggattattagctatcgaagcaggagcggattacctagctccatattataatagaatggaaaatctgaacattgattcaaattctgtcattcgtcaattagttcttgctattgatagacagaactctcctagtaagattttggctgcatcctttaaaaatgtagcacaagtaaataatgctttagctgcaggtgcgcatgctgttacagcaggagcagatgtttttgaatcagctttcgccatgccatctatccaaaaggcggttgatgatttttctgacgattggtttgttactcaaaatagtcgttccatttag

SEQ ID NO: 37571 - DNA, 2502 bp, Streptococcus pneumoniae
atgagtttttataatcataaagaaattgagcctaagtggcagggctactgggcagaacatcatacatttaagacaggaacagatgcatcaaaacctaagttttatgcgcttgatatgttcccttatccgtctggagttggtctgcacgtaggacacccagaaggttatactgcaaccgatatcctcagtcgttacaaacgtgcgcaaggctacaatgtccttcacccaatgggttgggatgcttttggtttgcctgcagagcaatacgctatggatactggtaatgacccagcagaatttacagcggaaaacattgccaacttcaaacgtcaaatcaatgcgcttggattttcttatgactgggatcgtgaagtcaacacaacagatccaaactactacaagtggactcaatggattttcaccaagctttacgaaaaaggcttggcctatgaagctgaagtgccagtaaactgggttgaggaattgggaactgccattgccaatgaagaagtgcttcctgacggaacttctgagcgtggaggctatccagttgtccgcaaaccaatgcgccaatggatgctcaaaatcacggcttacgcagagcgcttgctcaatgacttagatgaactagattggtcagagtctatcaaggatatgcaacgcaactggattggtaaatcaactggtgccaatgtaactttcaaagtaaaaggaacagacaaggaatttacagtctttactactcgtccggacacacttttcggtgcgactttcactgtcttggctcctgaacatgaattagtagacgctatcacaagttcagagcaagcagaagctgtagcagactataaacaccaagccagccttaagtctgacttggttcgtacagaccttgctaaggaaaaaactggtgtttggacaggtgcctatgccatcaaccctgtcaatggtaaggaaatgccaatctggattgcggactatgttcttgctagttatggaacaggtgcggttatggctgtgcctgcccacgaccaacgtgactgggaatttgccaaacaatttgaccttccaatcgtcgaagtacttgaaggtggaaatgtcgaagaagctgcctacacagaggatggcctgcatgtcaattcagacttcctagatggattgaacaaagaagacgctattgccaagattgtggcttgcttggaagaaaaaggctgtggtcaggagaaggttacctaccgcctccgcgactggctctttagccgtcaacgttactggggtgagccaattccaatcattcattgggaagatggaacttcaacagctgttcctgaaactgaattgccgcttgtcttgcctgtaaccaaggatatccgtccttcaggtactggtgaaagtccactagctaacttgacagattggcttgaagtgactcgtgaagatggtgtcaaaggtcgtcgtgaaactaacaccatgccacaatgggctggttcaagctggtactacctccgctatattgacccgcacaatactgagaaattggctgatgaggacctcctcaaacaatggttgccagtagatatctacgtgggtggtgcggaacatgctgtacttcacttgctttatgctcgtttctggcataaattcctctatgacctcggtgttgttccgactaaggaaccattccaaaaactctttaaccaagggatgattttgggaacaagctaccgtgaccaccgtggtgctcttgtggcaaccgacaaggttgaaaaacgtgatggttccttctttcatatagaaacaggggaagagttggagcaagcgccagccaagatgtctaaatcgctcaagaacgttgttaacccagatgatgtggtggaacaatacggtgccgatacccttcgtgtttatgaaatgtttatgggaccactcgatgcttcgattgcttggtcagaagaaggtttggaaggaagccgtaagttccttgaccgagtttaccgtttgattacaagtaaagaaatccttgcggaaaacaatggtgctcttgacaaggcttacaacgaaacagtcaaagctgtcacagaacaaattgagtctctcaaattcaacacagctattgcccaacttatggtctttgtcaatgctgctaacaaggaagataagctttatgttgactatgccaaaggctttattcaattgattgcaccatttgcacctcacttggcagaagaactctggcaaacagtcgcagaaacaggtgagtcaatctcttatgtagcttggccaacttgggacgaaagtaaactggttgaagacgaaatcgaaatcgttgtccaaatcaaaggtaaagtccgtgccaaactcatggtcgctaaagacctatcacgtgaagaattgcaagaaattgctctagcggatgaaaaagtcaaagcagaaattgacggtaaggaaatcgtgaaagtgattagtgtaccaaataaattggttaatattgttgtaaaataa

SEQ ID NO: 37572 - DNA, 417 bp, Streptococcus pneumoniae
atgattactattaaaaagcaagaaattgtcaagctagaggatgttttacatctctatcaggctgtcggttggacaaattatacccatcaaccagagatgctggagcaggccttatctcattcattagtaatttatctggcacttgatggtgatgctgtggtgggcttgattcgtttggttggagatggattctcatcagtattggttcaggatttaatcgttttaccaatctatcagcgtcaaggaattggtagtgccttgatgaaagaggctttagaggattacaaagatgcctatcaagtccagctggtgacagaagagacagaaagaaccttgggcttctatcgttctatgggctttgaaatcttatccacctataattgtatagggatgacttggatgaatcgtaaaaaataa

SEQ ID NO: 37573 - DNA, 777 bp, Streptococcus pneumoniae
ttgaataggaataagatcatgtttggattttttaagaaagataaggctgtggaagtagaggttccgacacaggttcctgctcatatcggcatcatcatggatggcaatggccgttgggctaaaaaacgtatgcaaccgcgagtttttggacacaaggcgggcatggaagcattgcaaaccgtgaccaaggcagccaacaaactgggcgtcaaggttattacggtctatgctttttctacggaaaactggacccgtccagatcaggaagtcaagtttatcatgaacttgccagtagagttttatgataattatgtcccggaactacatgcgaataatgttaagattcaaatgattggggagacagaccgcctgcctaagcaaacctttgaagctttaaccaaggctgaggaattgactaagaacaacacaggattgattcttaattttgctcttaactatggtggacgtgctgagattacacaggcgcttaagttgatttcccaggatgttttagatgccaaaatcaacccaggtgacatcacagaggaattgattggtaactatctctttactcagcatttgcctaaggacttacgagacccagacttgattatccgtactagtggagaattacgtttgagcaatttccttccatggcagggagcctatagtgagctttattttacggacaccttatggcctgattttgacgaagcggccttgcaggaagctattcttgcctataatcgtcgtcatcgccgatttggaggagtttag

SEQ ID NO: 37574 - DNA, 804 bp, Streptococcus pneumoniae
atgacccaggatttacagaaaagaaccttgtttgcagggattgccctggctattttcctaccaattttaatgattgggggcctcttgcttcagatagcaatcggaatcgtagccatgctagccatgcatgaacttttgaagataagaggtctagcgaccatgacgatggagggcctcttgactctctttgcaacctttgcattaaccattcccttggagaattacctgacttttttgccagttgatgggaatgtggttgcctatagtgttttgatttcaatcatgttaggaacgaccgtttttagcaagtcttatacgattgaggatgcggttttccctcttgctatgagcttctacgtgggctttggatttaatgctttactagatgctcgtgttgcaggtttggacaaggctctcttagccttgtgtatcgtctgggcgacagacagtggtgcctatcttgttgggatgaactatgggaaacgaaagttagcaccaagggtatcgcctaataaaacccttgagggtgccttgggtggtattttaggagcaattttagtaaccattatctttatgatagttgacagtacagttgctcttccatatggaatttacaagatgtcagtctttgctattttctttagcattgctggacaatttggtgatttactagaaagttcgatcaaacgtcattttggtgttaaggattctgggaaatttatccctggacatggtggtgttttggatcgtttcgatagtatgttgcttgtatttccaatcatgcacttatttggactcttttaa

SEQ ID NO: 37575 - DNA, 1854 bp, Streptococcus pneumoniae
atgaaacaaagtaaaatgcctatcccaacgcttcgcgaaatgccaagcgatgctcaagttatcagccatgctcttatgttgcgtgctggttatgttcgccaagtttcagcaggtgtttattcttatctaccacttgccaaccgtgtgattgaaaaagctaaaaacatcatgcgccaagaattcgaaaagattggtgctgttgagatgttggctccagcccttcttagtgcagaattgtggcgtgaatcaggtcgttacgaaacctatggtgaagacctttacaaactaaaaaaccgtgaaaaatcagactttatcttaggtccaactcacgaagaaacctttacagctattgtccgtgattctgttaaatcttacaagcaattgccactcaacctttatcaaattcagcccaagtatcgtgatgaaaaacgcccgcgtaatggacttcttcgtacacgtgagtttatcatgaaggatgcttatagtttccacgctaactatgatagtttggatagtgtttatgatgagtacaaagcagcctatgagcgtattttcactcgtagtggtttagacttcaaggctattattggtgacggtggagccatgggtggtaaggatagccaagaatttatggccattacatctgctcgtacagaccttgaccgctgggttgtcttggacaagtcagttgtctcatttgacgaaattcctgtagaagtgcaagaagaaatcaaggcagaattgctcaaatggatagtctctggtgaagataccattgcttactcaagtgagtctagctatgcagctaacttagaaatggcaacaaacgagtacaaaccaagcaaccgtgttgtcgctgaagaagaagttactcgtgttgcaacgccagatgttaaatcaattgatgaagttgcagccttcctcaatgttccagaagaacaaacgattaaaaccctcttctacattgcagatggtgagcttgttgcagcccttctagttggaaatgaccaactcaacgaagtcaagttgaaaaatcacttgggagcagatttctttgacgttgctagcgaagaagaagtggcgaatgttgttcaagcaggatttggttcacttggaccagttggtttgccagagaatattaaaattattgcagatcgtaaggtacaagatgttcgcaatgcagttgtcggtgctaacgaagatggctaccacttgactggtgtgaacccaggccgtgattttactgcagaatatgtggatatccgtgaagttcgtgagggtgaaatttccccagatggacaaggtgtccttaactttgcgcgtggtattgagatcggtcatattttcaaactcggaactcgctattcagcaagcatgggagcagatgtcttggatgaaaatggtcgtgctgtgccaatcatcatgggatgttacggtatcggtgtcagccgtcttctttcagcagtgatggagcaacacgctcgcctctttgttaacaaaacgccaaaaggtgaataccgttacgcttggggaatcaatttccctaaagaattggcaccatttgatgtgcatttgattactgtcaatgtcaaggatgaagaagcgcaagccttgacagaaaaacttgaagcaagcttgatgggagctggttatgaagtcttgacagatgaccgtaacgaacgtgtcggtgttaaatttagcgatagtgacttgattggtcttccaatccgtatcactgttggtaaaaaagcggccgatggcattgtagaagttaagatcaaggcaactggtgacaccattgaggttcatgcagataacgtgcttgaaacgcttgaaatcctaagcaagaaataa

SEQ ID NO: 37576 - DNA, 1380 bp, Streptococcus pneumoniae
atgctaagatttccaaaggattttgtctggggatcctctacttctggaccgcagacagaaggacgtgtagctggtgacggtaagggagacaatctctgggattactggttccaagtggagccaaatcgttactataatgggattggttcagataagacatcgactttttatgaaaattgggagcgggatattgagcttttgttagagactggtcacacagtctttcggacttctattcagtggtcacggatttttccacaaggctgtggaaaagtcaaccctcaaggtgtggatttttatcgtaaggtctttgaggctattaaggctaaaggaattcgtctgttagtcaatctctatcattttgatttaccttttgcccttcaagaggatggtgatggttgggaaaataaggcgacagtctcagcctatgaagactatgctcgtttttgttttgagacttatggagatttagtggatcaatggattacctttaacgagcccatcgttcctgtagaatttggttatttttatgatgcccattatccacataaggtggatgcagaggcagctgttaaggtagcctatcatacacaattggccagcagccgggctgttaaggcttgccatgaacttttgcctgattccaagattgggattgtcctcaacttgacaccggcttatccacgtagccagcatcctgctgatgtcaaggcagctcgtattgcggccctttttcaggcccaatctttcttagatccatctgtcttggggacttatccacaggagttggtagaaatcttgcatgaacacggtcttttacctgatgctacagaggaagagttggaactcattcgtgataatacggtggacttccttggtgtgaactactatcaacctttgcgtgttatggctcctcgatttgctaagcatccagagagtccactcttaccagaacatttttacgagccttatgtgatgcctggacgtaaaatcaattctcatcgtggttgggagatttatgagcaagggatttatgacatcgcccaaaatatcaaggaaaattatggcaatattgagtggatgttgactgagaatggtatgggtgttgaaggggaagaaaaattccgtcaagatggaatgattcaagatgattaccgtattgactttgtaaaaggtcatcttcgtgaacttcaccgtgccattgaagatggtgccaactgtaagggctacttgatttggacctttattgactgctggtcatggctcaacagctataaaaatcgctatggtttggtcgaattagacttggaaacgcaagaacgtcgtctgaagaaatcaggccactggttcaaagaattaagcgataataatggattttaa

SEQ ID NO: 37577 - DNA, 1809 bp, Streptococcus pneumoniae
atgtgtggaattgttggtgttgttggaaacacaaatgcaactgatattttgattcaagggcttgaaaagcttgaataccgtggctatgattctgcgggaatttttgtcctagatggtgctgataaccatttggtgaaggctgttggtcgtatcgcagaattgtctgccaagacagctggtgttgagggaacaactggtatcggacatactcgttgggcaactcatgggaaaccaacggaagacaatgctcacccacaccgctctgagacagaacgttttgtcttggttcacaatggggtgattgaaaactaccttgaaattaaagaagaataccttgctgggcaccacttcaaagggcaaacagatacggaaatcgccgtacatttgattggaaaatttgcggaagaagacggtctctcagttcttgaagcctttaaaaaagctcttcatattatccgtggttcatatgcctttgccttgattgactctgaaaatccagatgtcatctatgtagcgaaaaacaaatctccacttttgattggtcttggggaaggctacaatatggtctgctcagatgctatggctatgattcgtgaaaccaaccaatacatggaaattcatgaccaagagttggtaatcgtcaaggctgatagcgtggaagttcaagactatgatggtaacagtcgtgaacgtgctagctatactgcggaacttgacttgtcagatatcggtaagggaacttatccttactacatgcttaaggaaattgatgagcaaccaactgttatgcgtaaactcattcaagcctacacggatgatgctggtcaagtagtgattgatcctgctatcattaaggctgttcaagacgcagaccgcatctacatccttgcagctggaacatcttaccatgcaggatttgcttctaagaaaatgttggaagaattgacagatacaccagttgaacttggcatctcatctgagtggggctacggtatgccacttctcagcaagaaaccactcttcatctttatcagccaatctggtgaaacagcggatagtcgtcaagttttggtcaaggctaatgaaatgggaattccaagcttaacagtgacaaacgttccaggttcaaccctctcacgtgaagccaactataccatgctccttcacgcaggtcctgaaattgccgtggcatcaactaaagcctatacagcgcaaatcgcagcccttgccttccttgcaaaagcagtcggagaagcaaatggtaatgctaaagcgcaagcctttgacctggttcatgaattgtcaatcgtagctcagtctatcgaatcaactctttcagagaaagaaaccattgaagccaaggttcgtgaacttcttgaaacaactcgtaacgccttttacatcggacgtggtcaagattactacgtagccatggaagcaagtctcaaactcaaagagatttcttatatccagtgtgaaggttttgcggcaggagaactcaagcacggaaccattgccttgattgaagaaggaacacctgtcttggctctcttgtcagatccagtccttgccaaccacactcgtggaaatatccaagaggtggcagcccgtggtgctaaggtcctcactatcgcagaagaaaatgttgctaaagataccgacgatatcgtccttacgactgtacacccttacctctcaccaatttcaatggtcgtaccgacgcaattggttgcttactttgcaaccctccaccgtggcctcgatgtggataaaccacgtaaccttgctaaatcagtaacggtagaataa

SEQ ID NO: 37578 - DNA, 414 bp, Streptococcus pneumoniae
atgcctacaattaaccaattggttcgcaaaccgcgtaaatcaaaagtagaaaaatctaaatcaccagctttgaacgttggttacaatagtcataaaaaagttcaaacaaacgtttcttcaccgcaaaaacgtggtgttgcaactcgtgttggaacaatgacacctaaaaaacctaactcagcccttcgtaaattcgctcgtgtacgtttgagcaaccttatcgaagttactgcctacatcccaggtatcggacacaacttgcaagagcacagcgtggtgcttcttcgcggtggacgtgtaaaagaccttccaggggtacgttaccatatcgtccgtggtgcacttgatactgcaggtgttaacgatcgtaaacaaggccgttctaaatacggtactaaacgtccaaaagcataa

SEQ ID NO: 37579 - DNA, 471 bp, Streptococcus pneumoniae
atgagtcgtaaaaatagagctccaaaacgtgacgtattgccagatccgctatacaattcacaactagttactcgtcttatcaaccgcgttatgcttgatggtaaacgtggtactgctgcttcaattgtttacggtgcttttgagcaaatcaaagaagctactggcaacgatgcacttgaagtatttgaaacagctatggaaaacatcatgcctgtacttgaagtacgtgcacgtcgtgttggtggttctaactaccaagtcccagttgaagttcgtccagaacgtcgtacaacacttggacttcgttggttggtaacaatcgctcgtcttcgtggtgaacacacaatgcaagaccgtcttgcaaaagaaatcttggatgctgctaacaacactggtgcagctgttaagaaacgtgaagatactcaccgtatggctgaagctaaccgtgcattcgcacacttccgttggtaa

SEQ ID NO: 37580 - DNA, 2082 bp, Streptococcus pneumoniae
atggcacgcgaattttcacttgaaaaaactcgtaatatcggtatcatggctcacgtcgatgccggtaaaacaacaactactgagcgtattctttactacactggtaaaatccacaaaatcggtgaaactcacgaaggtgcgtcacaaatggactggatggagcaagagcaagaacgtggtatcacgatcacatctgctgcgacaacagctcaatggaacaaccaccgcgtaaacatcatcgacacaccaggacacgtggacttcacaatcgaagtacaacgttctcttcgtgtattggatggtgcggttaccgttcttgactcacaatcaggtgttgagcctcaaactgaaacagtttggcgtcaagcaactgagtacggagttccacgtatcgtatttgccaacaaaatggacaaaatcggtgctgacttcctttactctgtaagcacacttcacgatcgtcttcaagcaaatgcacacccaatccaattgccaatcggttctgaagatgacttccgtggtatcattgacttgatcaagatgaaagctgaaatctatactaacgaccttggtacggatatccttgaagaagacatcccagctgaataccttgaccaagctcaagaataccgtgaaaaattgattgaagcagttgctgaaactgacgaagaattgatgatgaaatacctcgaaggtgaagaaatcactaacgaagaattgaaagctggtatccgtaaagcgactatcaacgttgaattcttcccagtattgtgtggttcagccttcaaaaacaaaggtgttcaattgatgcttgatgcggttatcgactaccttccaagtccacttgacatcccagcaatcaaaggtattaacccagatacagacgctgaagaaattcgtccagcatctgacgaagagccatttgcagctcttgccttcaagatcatgactgacccattcgtaggtcgtttgacattcttccgtgtttactcaggtgttcttcaatcaggttcatacgtattgaatacttctaaaggtaaacgtgaacgtatcggacgtatccttcaaatgcacgctaacagccgtcaagaaatcgacactgtttactcaggtgatatcgctgctgccgttggtttgaaagatactacaactggtgactcattgacagatgaaaaagctaaaatcatccttgagtcaatcaacgttccagaaccagttatccaattgatggttgagccaaaatctaaagctgaccaagacaagatgggtatcgcccttcaaaaattggctgaagaagatccaacattccgcgttgaaacaaacgttgaaactggtgaaacagttatctcaggtatgggtgaacttcaccttgacgtccttgttgatcgtatgcgtcgtgagttcaaagttgaagcgaacgtaggtgctcctcaagtatcttaccgtgaaacattccgcgcttctactcaagcacgcggattcttcaaacgtcagtctggtggtaaaggtcaattcggtgatgtatggattgaatttactccaaacgaagaaggtaaaggattcgaattcgaaaacgcaatcgtcggtggtgtggttcctcgtgaatttatcccagcggttgaaaaaggtttggtagaatctatggctaacggtgttcttgcaggttacccaatggttgacgttaaagctaagctttatgatggttcatatcacgatgtcgactcatctgaaactgccttcaagattgcggcttcactttcccttaaagaagctgctaaatcagcacaaccagctatccttgaaccaatgatgcttgtaacaatcactgttccagaagaaaaccttggtgatgttatgggtcacgtaactgctcgtcgtggacgtgtagatggtatggaagcacacggtaacagccaaatcgttcgtgcttacgttccacttgctgaaatgttcggttacgcaacagttcttcgttctgcatctcaaggacgtggtacattcatgatggtatttgaccactacgaagatgtacctaagtcagtacaagaagaaattattaagaaaaataaaggtgaagactaa

SEQ ID NO: 37581 - DNA, 4392 bp, Streptococcus pneumoniae
atgtcaaatagttttgaaattttgatgaatcaattggggatgcctgctgaaatgagacaggctcctgctttagcacaggccaatattgagcgagttgtggttcataaaattagtaaggtatgggagtttcatttcgtattttctaatattttaccgattgaaatctttttagaattaaagaaaggtttgagcgaagaattttctaagacaggcaataaagctgtttttgaaattaaggctcggtctcaagaattttcaaatcagctcttgcagtcctactatagggaggctttctctgaaggtccatgtgctagtcaaggttttaagtccctttatcaaaatttgcaagttcgtgctgagggtaatcagctatttattgaaggatctgaagcgattgataaggaacattttaagaagaatcatcttcctaatttagccaaacaacttgaaaagtttggttttccaacttttaactgtcaagtcgagaagaatgatgtcctgacccaagagcaggaagaggcctttcatgctgaaaatgagcagattgttcaagctgccaatgaggaagcgctccgtgctatggaacaactggagcagatggcacctcctccagcggaagagaaaccagtctttgattttcaagcgaaaaaagctgcagctaaacccaagctggataaggcggagattactcctatgatcgaagtgacgacagaggaaaatcgtctggtatttgaaggggttgtttttgatgtggagcaaaaagtgactagaacaggtcgtgttttaatcaactttaaaatgacggactatacttcaagtttttctatgcaaaagtgggttaaaaacgaggaagaggcccagaagtttgacctcatcaagaagaattcttggctccgagttcgagggaatgtggagatgaataacttcacacgcgatttgactatgaacgtacaggatctgcaggaagttgttcactatgagcggaaggatttgatgccagaaggtgagcgtcgggttgagtttcatgctcatactaacatgtcgactatggatgctttgccagaggtcgaagagattgttgcaacagctgctaagtggggacacaaggcggttgctatcacagaccatgggaatgtccagtcctttccacatggctataaggcggctaagaaagcgggaatccagctgatctatgggatagaagccaatatcgtggaggaccgtgtccctatcgtctataacgaagtggagatggacttatcagaagcaacctacgtggtctttgacgtggaaacgacgggactttcagctatctataatgacttgattcaggttgcggcctctaagatgtacaaggggaatgttattgctgaatttgatgaatttatcaatcctgggcatcccttgtcagcttttactacagagttaactggaattacagatgatcatgtcaaaaatgccaaaccactagaacaagttttgcaagaattccaagaattttgcaaggatacggtcctagttgcccacaatgctacctttgacgttggctttatgaatgctaattatgagcgtcatgatcttccaaagattagtcagccagttattgatacgctggagtttgctagaaacctctatcctgagtataaacgccatggtttggggcctttgaccaagcgttttggtgtggccttggaacatcaccacatggccaactacgatgcggaagcgactggtcgtctgcttttcatctttatcaaagaggtagcagaaaaacatggtgtgaccgatttagctagactcaacattgatctaatcagtccagattcttacaaaaaagctcggatcaagcatgcgaccatctatgtcaagaatcaggtaggtctaaaaaatatctttaagctggtttccttgtctaataccaagtattttgaaggagtgtcacggattccgagaacggttctagatgcccatcgagagggcttgattttaggttcagcctgttcagagggtgaagtttttgacgtggtcgtttctcaaggtgtggatgcggcggttgaggtggccaagtattatgactttatcgaggtcatgccaccggctatctatgcgcccttgattgctaaagagcaggtcaaggatatggaggaactccagaccattatcaagagtttgatagaggttggagaccgccttggcaagcctgttttggctacgggaaatgttcactatatcgaaccggaagaagagatttatcgtgaaattatcgtccgtagtttgggacagggtgcgatgattaaccgaactatcggtcatggtgaacatgcccaaccagcaccacttccaaaggctcattttcgaacgactaatgagatgttggatgaatttgcctttttgggagaggaactggctcgtaaactggttattgaaaacaccaatgccttggcagaaatatttgaacccgttgaagtcgttaagggtgacttgtatacgcctttcatcgacaaggctgaagaaacagttgctgagttgacctataagaaagcttttgagatttatggaaatccgctgccagatattgttgatttgcggattgaaaaagaattaacatccatactggggaatggatttgctgtgatttatctggcatcgcagatgctggtgcaacgttctaatgaacggggttatttggttggttctcgtgggtctgtcggatctagtttcgttgcgaccatgattgggattacggaggtcaatcctctctctcctcactatgtctgtggtcagtgtcagtacagtgagtttatcacagatggttcgtacggttcaggatttgatatgccccataaggactgtccaaactgtggtcacaaactcagtaaaaacggacaggatattccgtttgagaccttccttggttttgatggggataaggttcctgatattgacttgaacttctcgggagaagatcagcctagcgcccacttggatgtgcgtgatatctttggtgaagaatatgccttccgtgcgggaacagttggtacggtagctgccaagactgcctatggatttgtcaagggttacgagcgagattatggcaagttttatcgtgatgcagaagtagaacgcctcgctcaaggagcggcgggtgtcaagcggacaacaggccaacacccggggggaatcgttgttattccgaactacatggatgtctacgattttacgcctgtccagtatccagcagatgatgtcacggctgaatggcagaccactcactttaacttccacgatatcgatgagaacgtcctcaaactcgatgtactgggacatgatgatccgaccatgattcgaaaacttcaggatttgtctggtattgaccctaataaaattcctatggatgacgaaggcgtgatggcactcttttctgggactgatgtgctaggggtaacacctgaacaaattggaacgcctacgggtatgttagggattccagagtttggaacaaatttcgtacgtggaatggtagacgaaacccatccgacaacctttgcggaattgcttcagctgtctggtctgtcccacggtactgacgtttggttggggaatgctcaggatctgattaagcaaggaatagcggacctatcgactgttatcggttgtcgggacgacatcatggtttacctcatgcatgcgggtctggaacctaagatggcctttaccattatggaacgggtacgtaagggtttgtggctaaagatttcagaagaggagagaaatggctatatcgaagccatgaaggctaataaggtgccagagtggtatatcgaatcctgtgggaaaattaagtacatgttccctaaggcccatgcggcagcctacgttatgatggccttgcgtgtagcttacttcaaggttcaccatcctatttattactactgtgcttacttctccattcgtgctaaggcttttgatatcaagaccatgggtgcgggcttggaggccatcaagcgcagaatggaagaaatctctgaaaaacggaagaacaatgaagcctctaatgtggaaatcgatctctatacaactcttgagattgtcaatgagatgtgggaacgaggtttcaagtttggcaaattagatctctaccgtagtcaggcgacagagttcctcatcgacggggatacccttatcccaccatttgtagcaatggatggtctgggagagaacgttgccaagcaactggtgcgggcgcgtgaagagggagaattcctctctaaaacagaactacgcaagcgtggtggactctcatcaaccttggttgaaaagatggatgagatgggtattcttggaaatatgccagaggataaccagttgagtttgtttgatgagttgttttaa

SEQ ID NO: 37582 - DNA, 231 bp, Streptococcus pneumoniae
atgttaggaagtatgttcgttggtctcctagtgggatttttagcaggtgctatgaccaatcgtggagagcgaatgggatgttttggaaaaatgtttctcggttggatcggagcctttctaggtcacttgctctttggaacttgggggccagttttatcaggaacagctattatcccagctgttttaggtgccatgattgtcttagctattttttggagacgaggaagttaa

SEQ ID NO: 37583 - DNA, 723 bp, Streptococcus pneumoniae
atgagattagataaatttttagttgcctgtgcggtgggaagtcggactgaggtcaaaaacttgctcaaggctgggcgcgtgactgtaaatggtaaaaaagaaaaatcagctaaatttcagattgatgaaaaaatagatgagattcgctttgatgggcaagtgttggagtatgaagagtttgtctactacatgatgaacaagcccaaaggagttatctcagcgactgaggatcccaagcacagaaccgttctggacttgttggatgacttggcgcggagtaaggaagttttcccagtaggacgcttggatattaacacgcatggtcttttgctcttgaccaatgatggtcagctggctcatgttcttctttcgcccaagcgtcatgtggacaagacttatctggcacaagtcaagggaatcatgacccaagaagatgtggagacatttgctgagggtattcctctcaaagactttacctgtcagcccgctagactggagattctttccacagatgcagaaaagaatcagagccaaatccgtgtgaccattgcagaagggaagtttcatcagatcaagcgtatggtgggctactgtggcaaggaagtggtggacttgcaacgattgactatgggaactttagtattagatgagaacctggaacgaggggaatggcgtcgcttgaccaaggaagaattagaaattctccgcgctaatattatttaa

SEQ ID NO: 37584 - DNA, 999 bp, Streptococcus pneumoniae
atgacaataatgagtatcggaatcattattgcgagccacggcgaatttgctgcgggtattcatcagtcaggatctatgatctttggtgaacaagaaaaggttcaagttgtgacctttatgccaaatgaaggtcctgatgatctatacgctaagtttaataacgctgttgctgcatttgacgcagaagatgaggttctagttttggctgacctttggagtggttctccatttaaccaagctagtcgcgtgatgggagaaaatcctgagcgtaagtttgccatcatcacaggacttaacttaccgatgttgattcaagcctacacagagcgcctcatggacgctgctgcaggtgtagaaaaagtcgctgctaatatcattaaagaagccaaagatggcatcaaagctcttccagaagagctaaatccagttgaagaagttgcaagcgctgcagctgctccagttgcccaaactgctatcccagaaggaactgttatcggagacggtaaattgaaaatcaatcttgcccgtcttgacacacgtctacttcacggtcaggttgcaactgcttggactccagattcaaaagcaaatcgtatcatcgttgcttcagataacgtggctaaagacgaccttcgtaaagaattgattaaacaagcagctccaggtaatgtcaaggctaacgtggttccaattcaaaaactgattgagatttcaaaagacccacgttttggagaaacacatgcccttatcttgtttgaaacacctcaagatgcccttcgtgccatcgaaggcggcgtgccaatcaagactcttaacgttggttctatggctcactcaacaggtaaaacattggtcaataccgttttgtctatggacaaagaagatgttgctacatttgaaaaaatgcgtgacttgggtgttgaatttgatgtccgtaaagtaccaaatgattctaaaaaagatttgtttgacttgattaacaaagccaatgtcaaataa

SEQ ID NO: 37585 - DNA, 1020 bp, Streptococcus pneumoniae
atgaaagctgttgttgtaaatccagaaagcactggtgttgctattgaagaaaaagtactccgtccacttgaaactggggaagcacttgtagaagttgaatactgtggcgtttgccacaccgacctccacgttgctcatggtgactttggtcaagtcccaggacgtgttcttgggcacgaaggtatcggtatcgttaaagagattgctccagatgtgaaaagccttaaagtcggtgaccgcgtcagcgttgcttggttctttgaaggatgtggcacttgcgaatactgtacaactggtcgcgaaaccctttgccgtacagtgaaaaatgctggctactcagtagacggtggtatggctgaacaatgtatcgtaactgctgactatgctgtcaaagttcctgacggacttgatccagcccaagcttcttctatcacatgtgctggagtaacaacctataaagctatcaaagaagcaaaagttgaaccaggccaatgggttgttctttacggtgctggtggacttggtaacctcgctgttcaatacgctaaaaaagtattcaatgctcatgttatcgcagtcgatatcaacaatgacaaacttgcccttgcaaaagaagtaggcgctgacattgtgattaacggcctcgaagttgaagatgtagctggactcattaaagaaaaaactgatggaggagctcattcagctgtcgtaactgccgtgtctaaagttgccttcaaccaggctgttgactccattcgtgctggtggtcgcgtcgtcgctgttggtcttccttctgaaatgatggaactcagcatcgttaaaacagtcctcgatggaatccaagtcatcggttctcttgtcggaactcgtaaagacttagaagaagccttccaatttggtgcagaaggtctggtagtcccagttgttcaaaaacgtccagtagaagatgctgttgccattttcgacgaaatggaaaaaggccaaatccaaggacgtatggtactcgacttcacccactaa

SEQ ID NO: 37586 - DNA, 813 bp, Streptococcus pneumoniae
atgacgaaaaaaattattgcagttgacctggatggaaccctgctcaactcagacagtcaaatttctgactttaccaaaaaaaccatcaaaaaagttgctgaaaaaggacatcaggttattattacgacaggtcgcccttaccgtatgtcaaaagatttttaccgtgaactgggcttagacactcctatgattaacttcaacggatcccttactcatttaccagaccaagtttgggattttgaaaagtgtttgactgtagacaaaaaatatctgctagatatggttcaacgttcagaggacattcaagccgattttatcgctggagaatatcgtaaaaaattctacattacaaatcccaatgaagaaattgccaatcccaaactatttggtgtagaagctttccagcctgaagatcaattccagcctgaattggtgaccaagaaccctaactgtatcctcttgcagaccagagccagtgacaaatatgccttggcaaaagacatgaacgccttctaccagcatcaactttctatcaatacctggggaggtccgctcaatatccttgaatgtaccccaaaaggtgtcaacaaggcctttgctttggactacttgctcaagataatgaatcgtgacaaaaaagatttgattgcctttggagatgaacataatgataccgaaatgctcgcttttgctgggaagggttatgccatgaaaaatgccaatccagagctactcccttatgcagatgagcaaatttcccttaccaacgaccaagatggggttgccaaaaccctacaagacttattcttataa

SEQ ID NO: 37587 - DNA, 945 bp, Streptococcus pneumoniae
atgtcaagtaaagccaatcatgcaaagacagttatttgcggaattatcaatgtaaccccagactccttttcggacggtggtcaattttttgctcttgagcaggcactccagcaggctcgtaaattgatagcagaaggagccagtatgctcgatatcggcggagaatcgactcggccgggcagtagctatgttgagatagaagaggaaatccagcgtgttgttccagtgatcaaagcgattcgcaaggaaagtgatgtcctcatctctattgatacttggaagagccaagtagcagaggctgctttggctgctggtgccgatctagtcaatgatatcactggtcttatgggtgatgagaaaatgcctcatgtggtagctgaagcgagagcgcaagtggtcatcatgtttaatccagttatggcgcgacctcagcaccctagctcgctcatcttccctcattttggttttggtcaagcttttacagaggaagagttagctgactttgaaacattgccaatcgaagaattgatggaggctttctttgaacgagcactagcgagagcggcagaagctggtattgcaccagaaaatatcctgttggatccaggaattggctttggtctgaccaagaaagaaaatctgcttcttttacgggacctggataaactacatcagaagggctatccaatctttctcggagtgtcgcgcaagcgatttgtcatcaatatcctagaggagaatggttttgaagtcaatcctgagacagagcttggtttccgcaatcgggacacggcttcggctcatgtaaccagtatcgctgcaagacagggtgtagaagtggtgcgcgtgcatgacgtagctagtcacaggatggcagttgaaattgcctctgccattcgtctggctgatgaagcggaaaatttagatttaaaacaatataaataa

SEQ ID NO: 37588 - DNA, 813 bp, Streptococcus pneumoniae
atggatcaactgcagattaaggatttggaaatgtttgcctatcatggtctttttcctagtgagaaagaattggggcagaaatttatcgtttcagccatcctatcctatgatatgaccaaggcagctacagacttggatttaacagcctctgtccattacggagaattgtgtcagcagtggacgacttggtttcaggaaacgagtgaagatttgattgaaacggtagcctataaactggtggaacgtacctttgagtcttatcctcttgtccaagaaatgaagttggaactgaaaaaaccttgggcaccggtgcatttgtcactagatacttgctcggtaaccattcatcgccgcaagcaacgagcctttatcgccctaggaagcaatatgggagataagcaagcaaacttgaagcaagccattgacaaactgcgagctcgtggcatccatattctcaaagagtccagtgtcttagcgacggagccttggggtggagtggagcaggatagctttgccaatcaagtggttgaggtggaaacctggctaccagcacaagacttgttagaaaccttgttagccattgagtcagagctgggacgggtgagagaagtgcattggggacctcgtttgattgatttggacttgctctttgtggaggaccagatcctttatacagacgacctcatattgcctcatccttacatagcggaacgcctttttgtccttgagtccttacaggaaattgcgcctcattttatccatccgatattaaaacaaccgatccgcaacttgtatgatgctttgaaaaaatag

SEQ ID NO: 37589 - DNA, 447 bp, Streptococcus pneumoniae
atgaacaaaacaacatttatggctaaaccaggccaagttgaacgtaaatggtacgtagttgacgcaactgatgtaccacttggacgtctttctgcagtagttgctagcgtacttcgcggaaaaaacaaaccaacatttacaccacacactgatacaggtgacttcgtgattgttatcaatgctgaaaaagttaaattgactggtaaaaaagcaactgataaaatctactacactcactcaaaccacccaggtggattgaaacaaatctctgcaggtgaacttcgttctaaaaatgcagtacgtttgattgagaaatcagttaaaggtatgcttccacacaatacacttggacgcgctcaaggtatgaagttgaaagtatttgttggagctgagcacactcatgctgcacaacaaccagaagttcttgacatttcaggacttatctaa

SEQ ID NO: 37590 - DNA, 393 bp, Streptococcus pneumoniae
atgtcacaagcacaatatgcaggtactggacgtcgtaaaaacgctgttgcacgcgttcgccttgttccaggaactggtaaaatcactgttaacaaaaaagatgttgaagagtacatcccacacgctgaccttcgtcttgtcatcaaccaaccattcgcagttacttcaactgtaggttcatacgacgttttcgttaacgttgtaggtggtggatacgctggtcaatcaggagctatccgtcacggtatcgctcgtgcccttcttcaagtagacccagacttccgcgattcattgaaacgcgcaggacttcttacacgtgactcacgtaaagttgaacgtaagaaaccaggtcttaagaaagctcgtaaagcatcacaatttagtaaacgttaa

SEQ ID NO: 37591 - DNA, 1437 bp, Streptococcus pneumoniae
atgactacttttaaagatggatttttatggggtggtgctgttgctgctcatcaacttgaaggtggatggcaagaaggtggcaagggaattagtgttgctgatgttatgactgctggtcgtcatggagtagctcgtgaaattactttgggagttttagagggtaaatattatccaaatcatgaggcgatagatttttatcatcgttataaagaagacatagcactttttgctgaaatgggattcaagtgcttccgtacctctattgcatggacacgtatctttccaaaaggtgatgagttagagccgaatgaagaaggattacagttttatgataatctttttgatgaatgcttaaagaatggtattgaacctgtcatcactctatctcattttgaaatgccttatcacttagtgaccgaatatggtggttggaaaaataggaaattgattgatttctttgctcgttttgcagaagtcgtatttaaacgttacaaagataaggttaaatattggatgactttcaatgaaatcaataatcaagcgaattatcaggaagattttgcaccatttactaactcaggtattgtatatgaggaaggtgataatagagaagcaattatgtatcaagcagcacattacgaattagttgcttctgcacgagctgtaaaaattggtcatgagattaatccagattttcaaataggttgtatgattgcgatgtgtccaatttatccagttacttgcaatcctaaggatatcttaatggcaatgaaagctatgcagaagcgttattattttgctgatgtgcatgttttaggtaaatatcctgagcatattttcaagtattgggaacgaaaaggtatttcagttgattttactgaccaggataaagaagatttacttggtgggactgtagattacattggtttcagttactatatgtcctttgctatagactctcatcgtgaaaataatccttattttgattatcttgaaacagaagatttagtgaaaaataattatgttaaggcttctgaatgggagtggcaaattgatccagaaggtttacgttatgcgttaaattggtttacagaccactatcacttaccactctttattgttgaaaatggttttggagctatagatcaagttgcagcagatggtatggtacatgatgattatagaattgaatatctaggtgcccatattcgtgaaatgaaaaaggctgtagttgaagatggtgttgatttaatgggttatactccatggggatgtattgatttggtttcagctggtaccggtgaaatgcggaaacgttatggctttatttatgtagataaagatgacaatgggaagggaagttataatcgttccccgaaaaaatcttttggctggtataaggaagttatttcatctaacggtgaatcagtagaatag

SEQ ID NO: 37592 - DNA, 630 bp, Streptococcus pneumoniae
atgaccaaatcagatacgattattgaactaaaaaaacagaaaattgtcgctgtcattcgaggaaatacaaaggaagaaggactacaagcctcgattgcttgtatcaagggcggtatcaaagctattgaaatcgcctataccaatcagtatgcaggacaaatcatcaaggaacttgtagacttgtatcaggacgatcagagtgtttgtatcggtgcaggtactgtgcttgatgccgtaactgctagagatgccattctagctggagcaaattacgttgtttctccatctttccatgctgaaactgcgaaaatgtgcaatctctacagcacaccgtacattccaggctgtattaccctcacagagatcacgactgcacttgaagccggtagtgaaatcatcaaactcttcccaggtagtgctctcagtccagcatatatctctgcagtcaaggcaccgatcccacaagtttccgtaatggtaaccggaggagtcgacctaaacaacatccctcaatggttcgctgctggtgcagatgccgttggaattggtggcgaactcaataaactcgcttcccaaggcaactttgaccgcatcagcgagattgcccaacagtatgttacactcagataa

SEQ ID NO: 37593 - DNA, 816 bp, Streptococcus pneumoniae
atgacaaatacatcattctcaattgagcagttttctttaaaaggaaaaattgctctcatcaccggcgcttcttatggaattggatttgctattgccaaatcctacgctgaagccggcgctactattgtctttaacgatatcaatcaagatctggtcaataaagggattgaagcttatcgtgaagttggcatcgaagcccatggatatgtctgtgacgtgacagacgaggacggtatccaagccatggtcaagcaaatcgaacaagaggttggtgtcattgacatcctcgttaataacgctggtattatccgccgagttccaatgtgcgaaatgagcgccgctgatttccgtaaggtcatcgatattgacttaaacgcaccatttatcgtttcaaaggcagttattccttctatgataaagaaagggcatggaaagattatcaatatttgttcgatgatgagcgaactgggacgtgaaacagttagcgcttatgctgctgctaaagggggcttgaaaatgttgacccgcaacattgcgtctgaatacggtggagccaatatccaatgtaacggaattggaccaggttatattgccactcctcaaacagcacctcttcgtgagttgcaagaagatggttctcgccacccatttgaccagttcatcattgcaaaaacacctgctgcacgttggggaaatcctgaagatttgatgggccctgctgtctttctcgctagtgatgccagcaattttgtcaatggccacatcctatatgtagatggcggtatcttagcctacatcggaaaacaacctgagtaa

SEQ ID NO: 37594 - DNA, 951 bp, Streptococcus pneumoniae
atgacaaaagaatttcatcatgtaacggtcttactccacgaaacgattgatatgcttgacgtaaagcctgaaggtatctacgttgatgcgactttgggcggagcaggacatagcgagtatttattaagtaaattaagtgaaaaaggccatctctatgcctttgaccaggatcagaatgccattgacaatgcgcaaaaacgcttggcaccttacattgagaagggaatggtgacctttatcaaggataacttccgtcatttacaggcacgtttgcgcgaagctggtgttcaggaaattgatggaatttgttatgacttgggagtgtctagtcctcaattggaccagcgtgagcgtggtttttcttataaaaaggatgcgccactggacatgcggatgaatcaggatgctagtctgacagcctatgaagtggttaatcattatgactatcatgatttggttcgtattttcttcaaatacggtgaggataaattctctaaacagattgcgcgtaagattgagcaagcgcgtgaagtgaagccgattgagacaacgactgagttagcagagattatcaagttggtcaaacctgccaaggaactcaagaagaagggtcatcctgctaagcagattttccaggctattcgaattgaagtcaatgatgaactgggagcggcagatgagtccatccagcaggctatggatatgttggctctggatggtagaatttcagtgattacctttcattccttagaagaccgcttgaccaagcaattgttcaaggaagcttcaacagttgaagttccaaaaggcttgcctttcatcccagatgatctcaagcccaagatggaattggtgtcccgtaagccaatcttgccaagtgcggaagagttagaagccaataaccgctcgcactcagccaagttgcgcgtggtcagaaaaattcacaagtaa

SEQ ID NO: 37595 - DNA, 318 bp, Streptococcus pneumoniae
atggcagaaaaaatggaaaaaacaggtcaaatactacagatgcaacttaaacggttttcgcgtgtggaaaaagctttttacttttccattgctgtaaccactcttattgtagccattagtattatttttatgcagaccaagctcttgcaagtgcagaatgatttgacaaaaatcaatgcgcagatagaggaaaagaaaaccgaattggacgatgccaagcaagaggtcaatgaactattacgtgcagaacgtttgaaagaaattgccaattcacacgatttgcaattaaacaatgaaaatattagaatagcggagtaa

SEQ ID NO: 37596 - DNA, 2253 bp, Streptococcus pneumoniae
atgaagtggacaaaaagagtaatccgttatgcgaccaaaaatcggaaatcgccggctgaaaacagacgcagagttggaaaaagtctgagtttattatctgtctttgtttttgccatttttttagtcaattttgcggtcattattgggacaggcactcgctttggaacagatttagcgaaggaagctaagaaggttcatcaaaccacccgtacagttcctgccaaacgtgggactatttatgaccgaaatggagtcccgattgctgaggatgcaacctcttataatgtctatgcggtcattgatgagaactataagtcagcaacgggtaagattctttacgtagaaaaaacacaatttaacaaggttgcagaggtctttcataagtatctggacatggaagaatcctatgtaagagagcaactctcgcaacctaatctcaagcaagtttcctttggagcaaagggaaatgggattacctatgccaatatgatgtctatcaaaaaagaattggaagctgcagaggtcaaggggattgattttacaaccagtcccaatcgtagttacccaaacggacaatttgcttctagttttatcggcctagctcagctccatgaaaatgaagatggaagcaagagcttgctgggaacctctggaatggagagttccttgaacagtattcttgcagggacagacggcattattacctatgaaaaggatcgtctgggtaatattgtacccggaacagaacaagtttcccaacgaacgatggacggtaaggatgtttatacaaccatttccagccccctccagtcctttatggaaacccagatggatgcttttcaagagaaggtaaaaggaaagtacatgacagcgactttggtcagtgctaaaacaggggaaattctggcaacaacgcaacgaccgacctttgatgcagatacaaaagaaggcattacagaggactttgtttggcgtgatatcctttaccaaagtaactatgagccaggttccactatgaaagtgatgatgttggctgctgctattgataataatacctttccaggaggagaagtctttaatagtagtgagttaaaaattgcagatgccacgattcgagattgggacgttaatgaaggattgactggtggcagaatgatgactttttctcaaggttttgcacactcaagtaacgttgggatgaccctccttgagcaaaagatgggagatgctacctggcttgattatcttaatcgttttaaatttggtgttccgacccgtttcggtttgacggatgagtatgctggtcagcttcctgcggataatattgtcaacattgcgcaaagctcatttggacaagggatttcagtgacccagacgcaaatgattcgtgcctttacagctattgctaatgacggtgtcatgctggagcctaaatttattagtgccatttatgatccaaatgatcaaactgctcggaaatctcaaaaagaaattgtgggaaatcctgtttctaaagatgcagctagtctaactcggactaacatggttttggtagggacggatccggtttatggaaccatgtataaccacagcacaggcaagccaactgtaactgttcctgggcaaaatgtagccctcaagtctggtacggctcagattgctgacgagaaaaatggtggttatctagtcgggttaaccgactatattttctcggctgtatcgatgagtccggctgaaaatcctgattttatcttgtatgtgacggtccaacaacctgaacattattcaggtattcagttgggagaatttgccaatcctatcttggagcgggcttcagctatgaaagactctctcaatcttcaaacaacagctaaggctttggagcaagtaagtcaacaaagtccttatcctatgcccagtgtcaaggatatttcacctggtgatttagcagaagaattgcgtcgcaatcttgtacaacccatcgttgtgggaacaggaacgaagattaaaaacagttctgctgaagaagggaagaatcttgccccgaaccagcaagtccttatcttatctgataaagcagaggaggttccagatatgtatggttggacaaaggagactgctgagacccttgctaagtggctcaatatagaacttgaatttcaaggctcgggctctactgtgcagaagcaagatgttcgtgctaacacagctatcaaggacattaaaaaaattacattaactttaggagactaa

SEQ ID NO: 37597 - DNA, 981 bp, Streptococcus pneumoniae
atgtttatttccatcagtgctggaattgtgacatttttactaactttagtaggaattccggcctttatccaattttatagaaaggcgcaaattacaggccagcagatgcatgaggatgtcaaacagcatcaggcaaaagctgggactcctacaatgggaggtttggttttcttgattacttctgttttggttgctttctttttcgccctatttagtagccaattcagcaataatgtgggaatgattttgttcatcttggtcttgtatggcttggtcggatttttagatgactttctcaaggtctttcgtaaaatcaatgaggggcttaatcctaagcaaaaattagctcttcagcttctaggtggagttatcttctatcttttctatgagcgcggtggcgatatcctgtctgtctttggttatccagttcatttgggatttttctatattttcttcgctcttttctggctagtcggtttttcaaacgcagtaaacttgacagacggtgttgacggtttagctagtatttccgttgtgattagtttgtttgcctatggagttattgcctatgtgcaaggtcagatggatattcttctagtgattcttgccatgattggtggtttgctcggtttcttcatctttaaccataagcctgccaaggtctttatgggtgatgtgggaagtttggccctaggtgggatgctggcagctatctctatggctctccaccaggaatggactctcttgattatcggaattgtgtatgtttttgaaacaacttctgttatgatgcaagtcagttatttcaaactgacaggtggtaaacgtattttccgtatgacgcctgtacatcaccattttgagcttgggggattgtctggtaaaggaaatccttggagcgagtggaaggttgacttcttcttttggggagttgggcttctagcaagtctcctgaccctcgcaattttgtatttgatgtaa

SEQ ID NO: 37598 - DNA, 2106 bp, Streptococcus pneumoniae
atgaacaacaattttaataattttaacaacatggatgatttatttaaccaattgatgggtggtatgcgaggatacagttctgaaaatcgacgttacttgattaatggacgtgaagtgacacctgaggaatttgcttactatcgtgcaactggtcaattgccaggaaatgcagaatctgatgtgcaaatgcaacaacaggcttcaggtatgaaacaagatggtgtccttgctaaactgggtcgaaacttgacagcagaagcgcgtgagggcaagctggatcctgttatcggacgaaacaaggaaattcaagaagcatctgaaatcctctcacgccgtaccaagaacaatcctgttttagtcggagacgcaggtgttggtaagacagccgttgtcgaaggcctagcgcaagcgattgtgaacggcgatgtcccagctgctattaagaacaaggaaattgtttccattgatatctcaggtcttgaggctggtactcaataccgtggtagctttgaagaaaatgtccaaaacttagtcaatgaagtgaaagaagcagggaatattatcctcttctttgatgaaattcaccaaattcttggtgctggtagcactggtggagacagtggttctaaaggacttgcggatattctcaagccagctctctctcgtggagaattgacagtgattggggcaacaactcaagacgaataccgtaacaccatcttgaagaatgctgctcttgctcgtcgtttcaacgaagtgaaggtcaatgctccttcggcagagaatacttttaaaattcttcaaggaattcgtgacctctatcaacaacaccacaatgtcatcttgccagacgaagtcttgaaagcagcggtggattattctgttcaatacattcctcaacgtagcttgccagataaggctattgaccttgtcgatgtaacggctgctcacttggcggctcaacatccagtaacagatgtgcatgctgttgaacgagaaatcgaaacggaaaaagacaagcaagaaaaagcagttgaagcagaagattttgaagcagctctaaactataaaacacgcattgcagaattggaaaggaaaatcgaaaaccacacagaagatatgaaagtgactgcaagtgtcaacgatgtggctgaatctgtggaacgaatgacaggtatcccagtatcgcaaatgggagcttcagatatcgaacgtttgaaagatatggctcatcgcttgcaagacaaggtgattggtcaagataaggccgtagaagttgtagctcgtgctatctgtcgtaaccgtgctggttttgatgaaggaaatcgcccaatcggcaacttcctctttgtagggtctactggggttggtaagacggagcttgctaagcaattggcactcgatatgtttggaacccaggatgcgattatccgtttggatatgtctgaatacagtgaccgcacagctgtttctaagttaattggtacaacagcaggctatgtgggttatgatgacaatagcaataccttaacagaacgtgttcgtcgcaatccatactctatcattctcttggatgaaattgaaaaggctgaccctcaagttattacccttctcctccaagttctagatgatggtcgtttgacagatggtcaaggaaatacagtaaacttcaagaacactgtcattattgcgacctcaaatgctggatttggctatgaagccaacttgacagaagatgcggataaaccagaattgatggaccgtttgaaacccttcttccgtccagaattcctcaaccgctttaatgcagtcatcgagttctcacacttgactaaggaagacctttctaagattgtagatttgatgttggctgaagttaaccaaaccttggctaagaaagacattgacttggtagtcagtcaagcggctaaagattatatcacagaagaaggttacgacgaagtcatgggggttcgtcctctccgtcgcgtggttgaacaagaaattcgtgataaggtgacagacttccacttggatcatttagatgctaaacatctggaagcagatatggaagatggcgttttggttattcgtgagaaagtctaa

SEQ ID NO: 37599 - DNA, 1608 bp, Streptococcus pneumoniae
atgcaagaaaaatggtggcataatgccgtagtctatcaagtctatccaaagagttttatggatagtaatgaagatggagttggtgatttgccaggaattaccagtaagttggactatctagccaagctaggaatcacagcaatttggctttctcccgtttatgacagccctatggatgataatggctatgatattgctgattatcaagcgattgcggctatttttggaaccatggaggacatggatcagctgattgcagaagctaagaagcgtgatatccgtatcatcatggacttggtggtcaatcatacctcggatgagcatgcctggtttgtagaggcctgtgaaaatcctaatagccctgagcgagactactatatctggcgggatgagcctaacgatttagattctatttttagtggatctgcttgggaatacgatgaaaaatctggtcaatactatctccactttttcagcaagaaacagccggatctcaattgggaaaatgaaaaacttcgccagaaaatttatgagatgatggacttctggattgataaaggtattggtggtttccgtatggatgttattgacatgattggcaaaattcctgacgagaaggtagtcaataatggtcctatgctccatccctatctcaaggaaatgaatcaggcgacctttggagataaggatctcttgacagtaggggagacttggggagcaacgccagagattgccaagctctactctgatccaaaggggcaagaattgtctatggtcttccagtttgaacatatcggtcttcagtatcaggaaggtcagcctaaatggcactatcaaaaagagctgaatatcgctaagttaaaagaaatcttcaacaaatggcagacagagttaggagttgaggacggttggaattccctcttctggaacaatcatgacctccctcgtattgtctcaatctggggaaatgaccaagaataccgcgaaaaatctgccaaagcctttgcaatcttgcttcatcttatgagaggaactccttatatctaccaaggtgaggagattgggatgaccaactatccgtttgaaacactggatcaagtagaagatattgaatctctcaactatgcgcgtgaggctcttgaaaaaggtgttccgattgaagaaatcatggacagtatccgtgttattggacgtgacaatgcccgtacccctatgcaatgggacgagagcaaaaacgctggtttctcaacaggtcaaccttggttggcggttaatccaaattacgagatgatcaacgtccaagaagcgctggcaaatccagattctattttctatacctatcagaaactggtccaaattcgcaaggagaatagctggctaattcgagctgactttgaattgcttgatacggctgataaggtctttgcttatatacgtaaggatggcgaccgtcgcttcctagttgtggctaacttgtccaatgaagagcaagacttgacagtagaaggaaacgtcaaatctgtcttgattgaaaacaccctagctcaagaagtctttgaaaaacaaatcttagttccatgggatgctttctgtgtggaattactataa

SEQ ID NO: 37600 - DNA, 1239 bp, Streptococcus pneumoniae
gtgaaaatagcagtagcaggtacgggatatgttggtctatccattgcagttttattgtctcaacaacatcaagtaatggcggtggacattattcctgagaaggtcgaattaattaatcaaagaaagtcacctattcaagatgactatatagagaaatatctggcaaaaaaggatttaaatttagtggctacattggatgcaaaagaagcatatcaagatgcggattttgttgtgattgcagctccaactaactatgatccaaagaagaacttttttgacacttctgctgtagagtctgtcattgaaacggcgcttaaatataatccagatgccatcatggtcattaaaagtacagttccagttggttatacagagtcagctcgaaagaaatttcagactgaaaatatcttatttagtcctgaatttttgcgtgagtcaaaggcgctttacgataacttatatcccagccgtattattttagggacagataaaaataatgaacgcttggtaagtgctgctgagacatttgcgagattgctccaagaaggcgctttaaaagaaaacattgatacattatacatgggctttactgaagctgaggcggtcaagctttttgcaaatacttaccttgctttgcgtgtttcttattttaatgagctggatacttattctgagatgaaggggctagacactcaagctattattgatggagttggtttggatccccgtattggttcgcactacaacaatccttccttcggctatggtggctattgtcttcctaaagataccaagcaacttcttgccaactatgaagatataccagaagaacttataggagccatagtacggagcaattcgacacgtaaagactttattgctgatcaggttcttaagatggtagattattatgattattcagcccataatattttcgatgagagagtagaaaaagatattattattggcatctatagattgaccatgaagagtaatagcgataattttcgtcaaagctctattcaaggtattatgaaacgtataaaagctaagggagtaagagtagttatttatgaacccactttagaaagcgggagtacattttttggaagttccgttatcaatgatttagaggaattcaaacgactgagtaatgccattgttgctaatcgctatgataactcattagaagatgtcaaggaaaaagtctatacacgtgatatttttgaaagagattaa

SEQ ID NO: 37601 - DNA, 606 bp, Streptococcus pneumoniae
ttgttagaagcggtccatactgagaagcaatgggaacgctcagcgacagaacttcctccatttatcattaaacgccttccagttcgtttaacctttgataataactattttaacgaccgttatcaagtgattcctattggtggatacaatgtgattattgaaaatatacttaaagacgtagaagttgggctaggagtggattgctttgactatcgtgaagagctggaagcatctgctaacaaagttgcttttacaggaatgattgaccagtattttgattataagcatggtgagctagagtatcgcagtttacgttttaagcacgaagtgcttgatgaggaaaatcaccaaggaaatgctgtagtgaactatacagatcgtgagattccttatactcgtatcattgagcataaaaaatttgagtatggtctgcagcctaagacagtcataacgcatgaatatccagctgactggaaacgtggagatgaaccatattatccaattaatgatgagaaaaataatgctatcttttctaaataccacgaagaagcttcacagaatgataaggttatcttctgtggacgtttagcagattataaatattag

SEQ ID NO: 37602 - DNA, 2160 bp, Streptococcus pneumoniae
atgaacaaaccaacgattctgcgcctaatcaagtatctgagcattagcttcttaagcttggttatcgcagccattgtcttaggcggaggagtttttttctactacgttagcaaggctcctagcctatccgagagtaaactagttgcaacaacttctagtaaaatctacgacaataaaaatcaactcattgctgacttgggttctgaacgccgcgtcaatgcccaagctaatgatattcccacagatttggttaaggcaatcgtttctatcgaagaccatcgcttcttcgaccacagggggattgataccatccgtatcctgggagctttcttgcgcaatctgcaaagcaattccctccaaggtggatcagctctcactcaacagttgattaagttgacttacttttcaacttcgacttccgaccagactatttctcgtaaggctcaggaagcttggttagcgattcagttagaacaaaaagcaaccaagcaagaaatcttgacctactatataaataaggtctacatgtctaatgggaactatggaatgcagacagcagctcaaaactactatggtaaagacctcaataatttaagtttacctcagttagccttgctggctggaatgcctcaggcaccaaaccaatatgacccctattcacatccagaagcagcccaagaccgccgaaacttggtcttatctgaaatgaaaaatcaaggctacatctctgctgaacagtatgagaaagcagtcaatacaccaattactgatgggctacaaagtctcaaatcagcaagtaattaccctgcttacatggataattacctcaaggaagtcatcaatcaagttgaagaagaaacaggctataacctactcacaactgggatggatgtctacacaaatgtagaccaagaagctcaaaaacatctgtgggatatttacaatacagacgaatacgttgcctatccagacgatgaattgcaagtcgcttctaccattgttgatgtttctaacggtaaagtcattgcccagctaggagcacgccatcagtcaagtaatgtttccttcggaattaaccaagcagtagaaacaaaccgcgactggggatcaactatgaaaccgatcacagactatgctcctgccttggagtacggtgtctacgagtcaactgccactatcgttcacgatgagccctataactaccctgggacaaatacccctgtttataactgggataggggctactttggcaacatcaccttgcaatacgccctgcaacaatcgcgaaacgtcccagccgtggaaactctaaacaaggtcggactcaaccgcgccaagactttcctaaatggtctcggaatcgactacccaagtattcactactcaaatgccatttcaagtaacacaaccgaatcagacaaaaaatatggagcaagtagtgaaaagatggctgctgcttacgctgcctttgcaaatggtggaacttactataaaccaatgtatatccataaagtcgtctttagtgatgggagtgaaaaagagttctctaatgtcggaactcgtgccatgaaagaaacgacagcctatatgatgaccgacatgatgaaaacagtcttgagttatggaactggacgaaatgcctatcttgcttggctccctcaggctggtaaaacaggaacctctaactatacagacgaggaaattgaaaaccacatcaagacctctcaatttgtagcacctgatgaactatttgctggctatacgcgtaaatattcaatggctgtatggacaggctattctaaccgtctgacaccacttgtaggcaatggccttacggtcgctgccaaagtttaccgctctatgatgacctacctgtctgaaggaagcaatccagaggattggaatataccagaggggctctacagaaatggagaattcgtatttaaaaatggtgctcgttctacgtggagctcacctgctccacaacaacccccatcaactgaaagttcaagctcatcatcagatagttcaacttcacagtctagctcaaccactccaagcacaaataatagtacgactaccaatcctaacaataatacgcaacaatcaaatacaacccctgatcaacaaaatcagaatcctcaaccagcacaaccataa

SEQ ID NO: 37603 - DNA, 342 bp, Streptococcus pneumoniae
atggagagagacatggcaagtattattttttcagcgaaagatatttttgaacaagagtttggacgtgaagtccgtggctataataaagtagaagttgacgagtttttagacgatgtcatcaaggactatgaaacctatgctgccttggtcaagtcacttcgtcaggaaattgcggatttgaaggaagaattaactcgtaaaccgaaaccttcaccagttcaagcagaaccccttgaagcggcaattacaagttctatgacgaattttgatattttgaaacgcctgaatagattggaaaaagaagtttttggtaaacaaattttagataactcagatttttaa

SEQ ID NO: 37604 - DNA, 1425 bp, Streptococcus pneumoniae
atgacaaaagctaactttggtgtcgtaggtatggccgtaatgggtcgtaaccttgcccttaatattgaatcacgtggttacacagttgctatctacaaccgtagtaaagaaaaaacggaagatgtgattgcttgccatcctgaaaagaattttgtaccaagctatgacgttgaaagttttgtaaactcaatcgaaaaacctcgtcgtatcatgctgatggttcaagctggacctggtacagatgctactattcaagcccttcttccgcaccttgacaagggtgatatcttgattgacggtggaaatactttctacaaagataccatccgtcgtaatgaagaattggcaaactctggtatcaactttatcggtactggggtttctggtggtgaaaaaggtgcccttgaaggtccttctatcatgcctggtggacaaaaagaagcctacgaattggttgcggatgttcttgaagaaatctcagctaaagcaccagaagatggcaaaccatgtgtgacttacatcggtcctgatggagctggtcactatgtgaaaatggttcacaatggtattgagtacggtgatatgcaattgatcgcagaaagctatgacttgatgcaacacttgctaggcctttctgcagaagatatggctgaaatctttactgagtggaacaagggtgaattagacagctacttgattgaaatcacagctgatatcttgagccgtaaagacgatgaaggccaagatggaccaatcgtagactacatccttgatgctgcaggtaacaagggaactggtaaatggactagccaatcatctcttgaccttggtgtaccattgtcactgattactgagtcagtgtttgcacgctacatttcaacttacaaagaagaacgtgtacatgctagcaaggtgcttccaaaaccagctgccttcaactttgaaggagacaaggctgaattgattgaaaagatccgtcaagccctttacttctcaaaaatcatttcatacgcacaaggatttgctcaattgcgtgtagcctctaaagaaaacaactggaacttgccatttgcagatatcgcatctatctggcgtgatggctgtatcatccgttctcgtttcttgcaaaagattacagatgcttacaaccgcgatgcagatcttgccaaccttcttttggacgagtacttcttggatgttactgctaagtaccaacaagcagtacgtgatatcgtagctcttgcggttcaagcaggtgtgccagtgccaactttctcagcagctattacttactttgatagctaccgttcagctgaccttccagctaacttgatccaagcacaacgtgactactttggtgctcacacttaccaacgtaaagacaaagaaggaaccttccactactcttggtatgacgaaaaataa

SEQ ID NO: 37605 - DNA, 1035 bp, Streptococcus pneumoniae
ttgtatcatagccttggtaaccaatttgacacacgcacaagaactagcagaaagattagaagagaaaggagctgttcagacatggatagagagcctgtgacagtacgttcctacgcaaatattgctattatcaaatattggggaaagaaaaaagaaaaagagatggtgcctgctactagcagtatttctctaactttggaaaatatgtatacagagacgaccttgtcgcctttaccagccaatgtaacagctgacgaattttacatcaatggtcagctacaaaatgaggtcgagcatgccaagatgagtaagattattgaccgttatcgtccagctggtgagggctttgtccgtatcgatactcaaaacaatatgcctacggcagcgggcctgtcctcaagttctagtggtttgtccgccctggtcaaggcttgtaatgcttatttcaagcttggattggatagaagtcagttagcgcaggaagccaagtttgcctcaggctcttcttctcggagtttttatggaccactaggagcctgggataaggatagtggagaaatttaccctgtagagacagacttgaaactagctatgattatgttggtgctagaggacaagaaaaaaccaatctctagccgtgacgggatgaaactttgtgtggaaacctcgacgactttcgacgactgggttcgtcagtctgagaaggactatcaggatatgctgatttatctcaaggaaaatgattttgccaagattggagaattaacggagaaaaatgccctggctatgcatgctacgacaaagactgctagtccagccttttcttatctgacggatgcctcttatgaggctatggactttgttcgtcagcttcgtgagaaaggagaggcctgctactttaccatggatgctggtcccaatgttaaggtcttctgtcaggagaaagacttggagcatttgtcagaaattttcggtcagcgttatcgcttgattgtgtcaaaaacaaaggatttgagtcaagatgattgctgttaa

SEQ ID NO: 37606 - DNA, 1008 bp, Streptococcus pneumoniae
atgattgctgttaaaacttgcggaaaactctattgggcaggtgaatatgctattttagagccagggcagttagctttgataaaggatattcccatctatatgagggctgagattgctttttctgacagctaccgtatctattcagatatgtttgatttcgcagtggacttaaggcccaatcctgactacagcttgattcaagaaacgattgctttgatgggagacttcctcgctgttcgcggtcagaatttaagacctttttctctagcaatctatggcaaaatggaacgagaagggaaaaagtttggtctaggttctagtggcagcgtcgttgtcttggttgtcaaggctttactggctctctataatctttcggttgatcagaatctcttgttcaagctgactagtgctgtcttgcttaagcgaggagacaatggttccatgggcgaccttgcctgtattgcggcagaggatttggttctctaccagtcatttgatcgccagaaggtggctgcttggttagaagaagaaaacttggcgacagttctggagcgtgattggggattttcaatttcacaagtgaaaccaactttagaatgtgatttcttagtgggatggaccaaggaagtggctgtatcgagtcacatggtccagcaaatcaagcaaaatatcaatcaaaattttttaacttcctcaaaagaaacggtggtttctttggtcgaagccttggaacaggggaaatcagaaaagattatcgagcaagtagaagtagccagcaagcttttagaaggcttgagtacagatatttacacgcctttgcttagacagttgaaagaagccagtcaagatttgcaggccgttgccaagagtagtggtgctggtggtggtgactgtggcatcgccctgagttttgatgcgcaatcaaccaaaaccttaaaaaatcgttgggccgatctggggattgagctcttatatcaagaaaggataggacatgacgacaaatcgtaa

SEQ ID NO: 37607 - DNA, 1011 bp, Streptococcus pneumoniae
atgacgacaaatcgtaaggacgagcatatcctctatgcccttgagcagaaaagttcctataatagctttgatgaggtggagctgattcattcttccttgcctctttacaatctggatgaaatcgatctttcgacagagtttgctggtcgaaagtgggactttcctttttatatcaatgccatgactggtggaagtaataagggaagagaaatcaatcaaaagctggctcaggtggcggaaacctgtggtattttatttgtaacgggttcttatagcgcagccctcaaaaatccaacggatgattctttttctgtcaagtctagtcatcccaatctcctccttggaaccaatattggattggacaagcctgtcgagttaggacttcagactgtagaagagatgaatcctgttctattgcaagtgcatgtcaatgtcatgcaggaattactcatgcccgagggagaaaggaagtttagaagctggcaatcgcatctagcagattatagcaagcaaattcccgttcctattgtcctcaaggaagtgggctttggaatggatgccaagacaatcgaaagagcctatgaattcggtgttcgtacagtggacctatcgggtcgtggtggcaccagctttgcctatatcgaaaaccgtcgtagtggccagcgtgattacctcaatcaatggggtcagtctaccatgcaggcccttctcaatgcccaagaatggaaagataaggtcgaactcttggttagtggaggggttcggaatccgctggatatgattaagtgcttggtttttggtgctaaggctgtgggattgtcacgaaccgttctggaattggttgaaacctacacagttgaagaagtgattggcattgtccaaggctggaaagcagatctacgcttgattatgtgttcccttaactgtgccaccatagcagatctacaaaaagtagactatcttctttatggaaaattaaaagaagcaaatgatcagatgaaaaaggcgtaa

SEQ ID NO: 37608 - DNA, 996 bp, Streptococcus pneumoniae
atgaaaaaacaagcctatgtcattattgctctcacctccttcctgtttgtcttttttttctcccacagcttgctggaaatacttgattttgactggtctatctttttgcacgatgtcgaaaaaacagaaaaatttgtctttttattgttggttttcagcatgtccataacctgtctcttagccctgttttggcgagggatcgaagagctttctctaagaaaaatgcaggctaatctcaagcgtttattggcagggcaagaagtagttcaggttgtagatccagatttggatgccagtttcaagtccttatcaggtaaacttaaccttttgacagaggctcttcaaaaagcagaaaatcagagtcttgctcaggaagaggaaatcatcgagaaggaacggaagcgaattgctcgggatttgcacgatacagtcagtcaggagttgtttgcggcccacatgattttatcgggtatcagtcagcaggctttgaaattggatagagaaaagatgcagacccagttgcagagtgtcacagctattttagaaacagcccagaaggatttgcgggttttgctcttgcatttgcgaccagttgaactggagcagaagagcttgatagaagggattcaaattctcttaaaagagcttgaggacaagagtgatcttagggttagtctcaagcagaatatgacgaaattgcctaagaaaatcgaggagcatattttccgtatcctgcaagagttgattagcaatacgctccgccatgcccaggcatcttgcctagatgtctacctctatcagacagatgttgaattgcaactgaaggtggtggacaatgggattggtttccagttagggagcttagacgacttgagttatggactgcgaaatatcaaggagcgggttgaagatatggcagggacggttcagttattaacagctcccaagcaagggctggcagttgatatccgtattcccctgttagataaggaatga

SEQ ID NO: 37609 - DNA, 186 bp, Streptococcus pneumoniae
atggtggagtccttctttgggattctgaaatcggaaatgttttatggctatgagaaaacatttaaatcacttaatcaattggaacaagccattatagactatattgattattacaacaacaagagaattaaggtaaaactaaaaggacttagtcctgtgcagtacagaactaaatcctttggataa

SEQ ID NO: 37610 - DNA, 438 bp, Streptococcus pneumoniae
atgaaacttgaaaaacatttgattaagcttaataaacaattttctaacaaggaggaagctatttgttattgtgggcaagttctttatgagggtggatatgttaatgaagactatattgaagccatgattgagcgagataaagagctatctgtttacatgggtaactttatcgccataccgcatggaacagatgcagcaaaaaatgatgtccttaagtctggtattacagtcgttcaagtccctagaggggttgattttgggaatgtatctaaccctcaagtggcaacggttctttttggtattgctggtattggtaatgaacacttagaaattattcagaaaatttctatcttctgtgcagatgtggataatgttcttaaactagcagatgctcagtcaaaagaggaagtattgcgcttatttgatgctgttgaataa

SEQ ID NO: 37611 - DNA, 1137 bp, Streptococcus pneumoniae
atgaaacattctgttcattttggtgccggtaatatcggtcgtggttttataggtgaaattctatttaaaaatggtttccatattgattttgtggatgtcaataatcagataattcatgctctaaatgaaaagggcaagtatgaaattgaaattgcacagaaaggacagtctcgtatagaagtaactaatgtggctggcattaatagcaaagaacatcctgagcaagtcattgaagcgattcaaaagacggatattattactactgcaatcggacctaatatactcccttttatcgctgaacttctagccaaaggaatcgaagctcgccgagttgcagggaatacacaggtattggatgttatggcctgtgaaaatatgattggcgggtctcaatttctttatcaagaagtcaagaaatatttaagtccggaaggtttgacatttgctgataactacataggttttccaaatgctgcagtagacaggattgttccagcacaaagtcacgaagattccctttttgttgtggtcgagccctttaatgaatgggtcgtggaaaccaagcgtcttaaaaatccagatttacgtctaaaagatgtgcattatgaagaagatttagaaccctttattgagcgaaaacttttttcagtcaattctggacatgcaacttcagcttacattggtgcgcattatggtgccaagacaattttggaagctcttcaaaatcctaatatcaaatctcggattgaatctgtattagctgaaattcggagtctcttgattgccaaatggaactttgataaaaaagaattggagaattatcacaaagtcattatagaacggtttgaaaaccctttcatagtggacgaagttagtcgcgtagctcgtactccaatccgaaaattaggctataatgaacgattcatccggccgatacgtgaattgaaagaactcagtttgtcatataaaaacctacttaaaacagttggctatgcctttgactatcgcgatgtaaatgatgaagaaagtattcgattaggtgaattgttggctaaacaattagtcaaagatgttgttatacaagttacaggtttagacgaccaagaattgattgagcaaattgtagagtatatttaa

SEQ ID NO: 37612 - DNA, 2367 bp, Streptococcus pneumoniae
atggaagtttatttttcaggaaccattgaacggattatttttgaaaatcccagcaatttttatcgcatcctcctcctagaaatcgacgatacggacgcagaggattttgatgattttgaaatcattgtcacaggaaccatggctgatgtaattgagggcgaagactatactttttgggggcaaattgtccagcactccaagtatggagaacaactgcaaatcagtcgttatgatcgcgcaaaaccaactagtaagggcttggtcaagtacttttcaagtagccatttcaaggggattggtctcaagacagctcagaaaatcgtggatacctatggcgaaaataccattgacgaaattttgcaacacccagaaaagttagaaggcatcgcaggactctctgccaaaaatcgcgaggctttcgtctccactctccgtctcaactacggtacggagatggttttggccaaactagccaactacggcattcccaacaaactagcctttcagattcaagacttttacaaggaagaaacccttgatgtggttgaaaattatccctaccagctggttgaggatatcaagggtttgggctttaccattgctgaccaactagctgaggaactaggcatcgaaagtcaggctcctgaacgcttccgcgccggtctagttcacagtctttttcaggcctgtatggaaacaggggacacctatgttgaagcacgggatttgctggaacaaacccttactctccttgagtcttcccgtcccgtggaactagaccccagccaagttgcccaagagctctcctacctgatcgaagaagacaaggttcagcagattgataccaagatctttgacaacagcctctttttcgctgaggaaggtatccgcagtcacttgattcgtatccttgaaaaaggagaacagaagagacaagatttagaaactattcaaaagcatatcactactgtcgagcaagaactggggattgagtatgataacattcaaaaacaagctatttgtgacgctatccagaacaaggtctttatcctgacaggtgggcctggtactggtaagacaactgttatcaatggaatcatcgctgtttatgcccttttagaaggacttgacttcaggaagaaaagcaatctgcccattcttcttgctgctccaactggtcgagctgctcgtcgcatgaatgaattgacaggtttgcctagcgcgaccatacatcgccacttgggaatgacaggtgacgatgataccagtcatctggaagattacctagatgctgagtttatcatcgtggatgaattctctatggtagatacttggctggccaatcaactcttctccaatatctcttctaacagtaagatcctcatcgtaggtgacagtgatcagctaccttctgtcagtcctggacaggttctagcggatctgcttcatattcctttgattcctcagactcgcttggaaaaaatttatcgacaaagcaaagaatcaaccatcgtcaccctagctagtcagattcgacagggcatcttgccagctgatttcacccaaaaaaaagctgaccgttcctactttgaaattgctagtggccatattcctgccaccattgaaaaaatcttaggtgccgccctcagaaatggtattcccgcccgtgatatccaagttctggctcctatgtaccgagggacggcagggattgatgctatcaatcagctcatgcaagacctgctcaatcccccacaaaaagatcaactcagttttgaagctcctcagtgtcactatcgtaagagagacaaggtcattcatttggttaacgatgctgaaatcaatgtctttaatggggatttaggagctatcacagacctgattcctggtaaatacaccgaatcgaaacaagacgagattgtcattgattttgatagtaatgaagtctcttacccccgtaacgaatggtacaagattcgcttggcctatgccatgagtattcataagtctcagggaagtgagttcccagttgtcatcctaccgattactagtgctagccgacgtatgctggagcgaaatctcatctacacagccattacacgtgccaaaagcaaactcatcttactaggcgaattacaagccttcgactatgctacccaacacatcggaactgcccgaaaaacctatctgattgaacgcttcagtgatctactggagaatgttgaagaaaagcaacaagctgtctctgaaacagtcacatcaagtgcctctgaacaatcctacatcctaaccgaagaaaactgggaccgcatcccagccatgattgggattacagacacagacctcaaagagatttttggaaaatag

SEQ ID NO: 37613 - DNA, 615 bp, Streptococcus pneumoniae
atgaatttatttaaaaatttcttaaaagagtggggattattcctcctgattctgtcattactagctttgagccgtatctttttttggagcaatgttcgcgtagaaggacattccatggatccgaccctagcggatggtgaaatcctctttgttgttaagcacctccctattgaccgttttgatatcgtggtggcccatgaggaagatggcaataaggacatcgtcaagcgcgtgattggaatgcctggcgacaccattcgttacgaaaatgataaactctacatcaatgacaaagaaacggacgagccttatctagcagactatatcaaacgcttcaaggatgacaaactccaaagcacttactcaggcaagggctttgaaggaaataaaggaactttctttagaagtatcgctcaaaaagcccaagccttcacagttgatgtcaactacaacaccaactttagctttactgttccagaaggagaataccttctcctcggagatgaccgcttggtttcgagcgacagccgccacgtaggtaccttcaaagcaaaagatatcacaggggaagctaaattccgcttctggccaatcacccgtatcggaacattttaa

SEQ ID NO: 37614 - DNA, 2337 bp, Streptococcus pneumoniae
atgaataagaaaatattagaaacattagagttcgataaggtcaaggccttgtttgagcctcatttgttgaccgagcagggcttggagcaattgagacaactggctccgactgccaaagcagataaaatcaaacaggcttttgctgagatgaaggaaatgcaggctcttttcgtcgagcaaccgcattttactattctctcaactaaggaaattgcaggagtctgcaagaggttggagatgggagcggatctcaatatcgaggagttcctactcttgaaacgcgtgcttcttgccagccgagaacttcaaagtttttacgccaatctggaaaatgtcagcttggaagaattagccttttggtttgagaaattacatgattttccgcaattacaaggaaatcttcaggcctttaatgatgcgggtttcattgaaaattttgccagtgaagaattggcgcgaatccgtcgaaaaatacatgatagcgagagtcaggtacgcgatgttttacaagacttgctcaagcaaaaagcgcagatgttgacggaaggaattgttgctagcagaaatggccgtcaggttttaccagtcaaaaacacctaccgcaataagattgcaggtgtcgttcatgatatttctgctagtggaaacaccgtctatatcgaaccacgtgaggtagtcaaactgagcgaagaaattgctagtctgcgagcagatgagcgctatgaaatgcttcgcattctccaagaaatttctgagcgtgtccgccctcatgcggctgagattgctaatgatgcttggattatcggtcatctggacttgattcgtgccaaggttcgatttatccaagaaagacaagcagtcgtgcctcagctgtcagaaaatcaagagattcaactgctccatgtctgccatcctttggtcaaaaatgccgtcgcaaatgatgtctattttggtcaagatttaacagctattgtcattacaggtcccaatacaggtgggaagaccatcatgctcaaaactctgggcttgacacaggtcatggcccagtcaggattgccgattttagcagacaagggaagtcgtgttggtatttttgaagaaatctttgctgatattggagatgagcagtctattgagcagagcttgtctaccttctctagccatatgaccaatatcgtggatattcttggtaaggtcaaccaacattcactcttacttttggatgagttgggggctggtactgatccccaagagggagcagcccttgccatggctattctggaggaccttcgcctgcgtcaaatcaagaccatggcgacgacccactatccagaactcaaggcctacggtattgagacagcctttgtgcaaaatgccagtatggagtttgatactgcaactcttcgcccgacctatcgctttatgcagggtgttcctggccgaagtaatgcctttgaaattgccaaacgtctaggcctatctgaagttatcgtaggagatgccagtcagcagatcgatcaggacaatgacgtcaatcgtatcattgagcaattagaagagcagacgctggaaagccgcaaacgcttggacaatatccgtgaggtggagcaagaaaatctcaagatgaaccgtgcgctaaaaaaactctacaacgagcttaatcgtgaaaaggaaaccgagcttaacaaggcgcgtgaacaggctgctgagattgtggatatggccctaagtgaaagtgaccagattctcaaaaatctccacagtaaatcccaactcaagccccacgaaatcattgaagccaaggccaagttgaaaaaattggctcctgaaaaagtggacttgtctaaaaacaaggtccttcaaaaggccaagaaaaaacgagctccaaaggtgggagatgatatcgtggttctcagttatggtcagcgtggtaccttgaccagtcaactcaaggacggccgctgggaagcccaagttggcttgattaagatgaccttggaagagaaagagtttgatcttgtccaagcccagcaagaaaaagcagtcaagaagaaacaggtcaatgttgtgaaacgaacttctgggcgaggacctcaagctagactggatcttcgaggcaagcgctatgaagaagccatgaatgagctagataccttcatcgaccaagccttgcttaacaatatggctcaagttgatatcatccatggtatcggaacaggagtcatccgtgaaggagttaccaaatacttgcaaagaaacaaacatgtcaagagtttcggctatgccccacaaaatgctggaggcagtggtgcgactattgtcacttttaaaggatag

SEQ ID NO: 37615 - DNA, 1338 bp, Streptococcus pneumoniae
atggaaccgtggccctgccactccaacgttttgtcagggtgcttttttcataaaggagttcttatgttagatatcaaacgtattcgtacagattttgaagctgtcgcagaaaaattagctacacgtggtgtagatgctgctgtcttgaatgaaatgaaagaaatcgatgctaaacgtcgtaacatcttggtcaaggttgaaactctcaaagcagaacgtaacacagtttctgctgagattgcccaagctaagcgcaacaaggaaaatacagatgacaagattgctgccatgcaaaatctatctgctgaggttaaagccttggatgctgaattggcagaaatcgatgctaaattgacagaatttacaacgactcttccaaatatcccagctgacagcgttcctgttggggctgacgaagacgacaatgtggaagttcgccgttggggtactccacgcgagtttgacttcgaacctaaagctcactgggatctcggtgaagaccttggtatccttgactgggaacgcggtggtaaggtaacaggcgctcgcttcctcttctataaaggcctcggtgctcgtttggaacgtgctatctacaactttatgttggatgaacatggaaaagaaggctatactgaagtcatcacaccttacatagtcaaccatgattctatgtttggtactggtcagtatccaaaatttaaggaagatacttttgaactcagcgataccaactttgtcttgattccaactgctgaagttcctctgacaaactactaccgtgatgaaatcttagacggcaaagatcttccaatctacttcactgctatgagtccgtcattccgttctgaggctggttctgccggtcgtgatacgcgtggcttgatccgtttgcaccaattccacaaggttgaaatggtcaaatttgccaaaccagaagaatcttacgaagaattggaaaaaatgacagccaacgctgaaaacattcttcaaaaactcaaccttccataccgtgtcgttgctctctctactggagatatgggcttctcagctacgaagacttacgacttggaagtgtggattccagcacaaaacaattaccgtgaaatctcaagctgttcaaacacagaagatttccaagcccgtcgtgcccaaatccgttaccgtgatgaagcagatggcaaggtgaaactccttcataccttgaacggttctggacttgcagttggacgtacagtggctgcaattcttgaaaattaccaaaatgaagatggttctgtgaccatcccagaagcacttcgtccatacatgggtggagctgaagtcatcaaaccataa

SEQ ID NO: 37616 - DNA, 1365 bp, Streptococcus pneumoniae
atgaaagttgttaaatttggaggtagttctcttgcctctgctagtcaattagaaaaagttttaaacatcgtcaaaagcgattcagagcgtcgttttgtagtcgtttctgcgcctggtaaacgcaatgctgaagatactaaggttacggatgccctgattaaatactaccgcgactatgttgcgggtaacgatattagcaagagccaaagctggattatcgaccgctatgctgctatggttagtgaattgggactaaaaccagctgtgctagaaaaaatttctaaaagcattcacgccttggccactcttcctattgaagaaaatgaatttctctacgatactttcctagcagccggtgaaaataacaatgccaaattgattgctgcctactttaaccaaaatggtatcgatgcacgctatatgcaccctagagaagctgggattgtggtcacaagtgaacctggtcacgctcgcatcattccatcaagttatgacaagattgaagaattgacaaacaccaatgaagtccttgtcattcctggtttctttggtgtcactaaggaaaatcaaatctgtactttctcacgtggaggatctgatattacaggttctatcattgctgctggtgtcaaagccgacctctatgaaaactttacggacgttgatggtatctttgcagcccaccctggtattatccaccaaccacactcgattcctgagttgacctaccgtgaaatgcgcgagttggcctatgcaggcttctcagtccttcatgacgaggctcttcttcctgcctaccgtggaaaaattcctctggttatcaagaataccaacaaccctgaccatccaggtactcgtatcgttctaaaacacagtaatgatgaatttccagttgtgggaattgctggtgactcaggctttgtcagcattaacatgtcgaaatacctcatgaaccgtgaggttggatttggccgcaaggttctgcaaatcctggaagaacttaacatcggttgggaacatatgccaacaggtatcgacgatctttctatcattctccgttctcgccaactaactcccatcaaggaagaagaaatcctgcgtcagttggttcaaaaggctaaagtagatcatgcagaaatcgaacacgacctttctatcattatgattgttggtgaaaaaatgaagagccacatcggagtgactgctactgcgacacgcgctctatctgaaaacaaaatcaacatccagatgatgtctcaaggttctagtgaagtttctattatgtttgttgtcaataaagaccaagagaaagcagcaattaaagccctctacaatgccttttttggagaaagtaaggaagactaa

SEQ ID NO: 37617 - DNA, 786 bp, Streptococcus pneumoniae
atggaacacattatttatcagcttgaagaggacttggcaatccttaccttgaaccgtcctgaggtcgcaaatggttttcatattcccatgtgtgaggagattttagaagctctgactttggcagaagaaaatccagctgtgcattttatcttaatcaatgccaatggaaaggtcttctcagttgggggagatttggtagagatgaagcgggcagtggatgaggatgatattccatcattgacaaaaatcgcagagttggtcaatacgatttcttataaaatcaagcaaatagccaaacctgttttaatggaagttgacggtgctgttgcaggtgccgcagcgaatatggctgttgcggcagatttctgtttggcgacggataaggctaagtttatccaagcctttgttggtgttggtttggctccagatgcagggggaattcatctcttgagccgcagtatcggtgtgacgcgtgctgctcaattagctatgacaggagaggctttaacggcagaaaaagccctagaatgggggttggtttaccgcgtttctgaagctgaaaaacttgaaaagacgagagaacagcttcttaaaaaattaagacgtgcttcaagtaattcctatgctgccattaagaagttggtttgggagagccaatttaaagactggcagggttacgctactttagaactgaacctacagaaatccttagctcaaacagaggatttcaaagaaggagtgcgagctcattcggagagaagaagacctaaatttataggaaaataa

SEQ ID NO: 37618 - DNA, 975 bp, Streptococcus pneumoniae
atggcttttgcaaaaataagtcaggttgctcattatgtgccagagcaagtggttacaaatcacgacttggctcagattatggataccaatgatgagtggatttcaagtcgaacgggaatacgacaaaggcatatttcaagaacagaatctaccagtgatttggctacagaggttgctaagaaactgatggcaaaagctggaataacaggagaagaactggattttatcatcctagctaccattactccagattcgatgatgccctctacagctgctcgtgttcaagctaatattggcgctaataaagcctttgcttttgacttaaccgcggcttgcagtggatttgtatttgctctttcaactgctgaaaagtttatcgcttctggtcgctttcaaaaaggcttggtgattggtagtgaaaccctctctaaggcagtcgattggtcggatcgatcaacagctgtgttgtttggagatggtgctggtggtgtcttgttagaagctagcgagcaagagcatttcttagctgagagtctcaatagcgatggaagtcgcagcgagtgtttaacttatgggcattcaggtttgcattctccattttcagatcaagaaagtgcagattcatttttgaagatggatggacgcacagtctttgattttgccattcgagatgtagccaagtctatcaagcagactattgatgaatctcctatagaggtgacagacttggattatctgctacttcatcaagccaatgaccgtattttggataagatggctagaaaaattggtgttgaccgagccaaacttccagccaatatgatggaatatggcaataccagtgcagccagtatcccgattttactttcagagtgtgtagaacaaggtctcatccctttagatggtagccagactgttcttctatcaggcttcggtggaggcttgacctggggcacgctcattcttacaatttag

SEQ ID NO: 37619 - DNA, 225 bp, Streptococcus pneumoniae
atggcagtatttgaaaaagtacaagaaattatcgttgaagaacttggaaaagacgcatcagaagtaacacttgaatcaacttttgatgatttggacgcagattcattggacttgttccaagtaatctcagaaatcgaagatgcttttgatatccaaatcgaagcagaaaatgacttgaaaacagttggtgacttggttgcttacgttgaagagcaagcaaaataa

SEQ ID NO: 37620 - DNA, 975 bp, Streptococcus pneumoniae
atgaaaacgcgtattacagaattattgaagattgactatcctattttccaaggagggatggcctgggttgctgatggtgatttggcaggggctgtttccaaggctggaggattaggaattatcggtgggggaaatgccccgaaagaagttgtcaaggccaatattgataaaatcaaatcattgactgataaaccctttggggtcaacatcatgctcttatctccctttgtggaagatatcgtggatctcgttattgaagaaggtgttaaagttgtcacaacaggagcaggaaatccaagcaagtatatggaacgtttccatgaagctgggataatcgttattcctgtcgttcctagtgtcgctttagctaaacgcatggaaaaaatcggtgcagacgctgttattgcagaaggaatggaagctggggggcatatcggtaaattaacaaccatgaccttggtgcgacaggtagccacagctgtatctattcctgttattgctgcaggaggaattgcggatggtgaaggtgctgcggctggctttatgctaggtgcagaggctgtacaggtggggacacggtttgtagttgcaaaagagtcgaatgcccatccaaactacaaggagaaaattttaaaagcaagggatattgacactacgatttcagctcagcactttggtcatgctgttcgtgctattaaaaatcagttgactagagattttgaactggctgaaaaagatgcctttaagcaggaagatcctgatttagaaatctttgaacaaatgggagcaggtgccctagccaaagcagttgttcacggtgatgtggagggtggctctgtcatggcaggtcaaatcgcagggcttgtttctaaagaagaaacagctgaagaaatcctaaaagatttgtattacggagccgctaagaaaattcaagaagaagcctctcgctggacaggagttgtaagaaatgactaa

SEQ ID NO: 37621 - DNA, 921 bp, Streptococcus pneumoniae
atgactaaaacagcctttttatttgctggtcaaggtgcccagtatctagggatgggacgggatttctatgatcagtatccgattgttaaagaaacgattgatcgagcgagtcaggtgctaggttatgatttgcgttatctcatcgatacggaagaagacaaactcaatcagacccgctatacgcaaccagccattctagcgacttcggttgctatctaccgtttattgcaagaaaagggctatcagcctgatatggttgctggtttgtctcttggagaatactctgccttggtggcaagcggcgccttggattttgaagatgcggttgccttggtagctaagcgtggagcctatatggaagaagcggctcctgctgactctggcaagatggtagcagttctcaatacgccagtagaggtcattgaagaagcctgtcaaaaagcttctgaacttggagtggttactccagccaactataacacacctgcacaaatcgtcattgctggagaagtggttgcagttgatcgagcggttgaacttttgcaagaagcaggtgccaaacgcttgattcctcttaaggtgtcaggtccctttcacacctctctccttgaacctgctagccagaaactagctgaaactctggctcaggtaagtttttcagattttacttgtcccctagtcggcaatacagaagctgctgtgatgcaaaaagaggacattgctcagctcttgacgcgtcaggtcaaggaacccgttcgtttctatgaaagtattggggtcatgcaagaagcaggcataagcaactttatcgagattggaccggggaaagtcttgtcaggttttgttaaaaaaattgatcaaactgctcacttagctcatgtggaagatcaagcgagtttagtagcacttttagaaaaatag

SEQ ID NO: 37622 - DNA, 732 bp, Streptococcus pneumoniae
atgaaactagaacataaaaatatctttattacaggttcgagtcgtggaattggtcttgccatcgcccacaagtttgctcaagcaggagccaacattgtcttaaacagtcgtggggcaatctcagaagaattgctcgctgagttttcaaactatggtatcaaggtggttcccatttcaggagatgtatcagattttgcagacgctaagcgtatgattgatcaagctattgcagaactgggttcagtagatgttttggtcaacaatgcagggattacccaagatactcttatgctcaagatgacagaagcagattttgaaaaagtgctcaaggtcaatctgactggtgcctttaatatgacacaatcagtcttgaaaccgatgatgaaagccagagaaggtgctatcattaatatgtctagtgttgttggtttgatggggaatattggtcaagctaactatgctgcttctaaggctggcttgattggctttaccaagtctgtggcacgcgaggtcgctagtcggaatatacgagtcaatgtgattgctccaggaatgattgagtctgatatgacagctatcttatcagataagattaaggaagctacactagctcagattccgatgaaagaatttgggcaggcagagcaggttgcagatttgacagtatttttagcaggccaagattatctaactggtcaagtgattgccattgatggtggcttaagtatgtag

SEQ ID NO: 37623 - DNA, 1245 bp, Streptococcus pneumoniae
gtgaaaagaatgaaactaaatcgagtagtggtaacaggttatggagtaacatctccaatcggaaatacaccagaagaattttggaatagtttagcaactgggaaaatcggcattggtggcattacaaaatttgatcatagtgactttgatgtgcataatgcggcagaaatccaagattttccgttcgataaatactttgtaaaaaaagataccaaccgttttgataactattctttatatgccttgtatgcagcccaagaggctgtaaaccatgccaatcttgatgtagaggctcttaatagggatcgttttggtgttatcgttgcatctggtattggtggaatcaaggaaattgaagatcaggtacttcgccttcatgaaaaaggacccaaacgtgtcaaaccaatgactcttccaaaagctttaccaaatatggcttctgggaatgtagccatgcgttttggtgcaaacggtgtttgtaaatctatcaatactgcctgctcttcatcaaatgatgcgattggggatgccttccgctccattaagtttggtttccaagatgtgatgttggtgggaggaacagaagcttctatcacaccttttgccatcgctggtttccaagccttaacagctctctctactacagaggatccaactcgtgcttcgatcccatttgataaggatcgcaatgggtttgttatgggtgaaggttcagggatgttggttctagaaagtcttgaacacgctgaaaaacgtggagctactatcctggctgaagtggttggttacggaaatacttgtgatgcctaccacatgacttctccacatccagaaggtcagggagctatcaaggccatcaaactagccttggaagaagctgagatttctccagagcaagtagcctatgttaatgctcacggaacgtcaactcctgccaatgaaaaaggagaaagtggtgctatcgtagctgttcttggtaaggaagtacctgtatcatcaaccaagtcttttacaggacatttgctgggggctgcgggtgcagtagaagctatcgtcaccatcgaagctatgcgtcataactttgtaccaatgacagctgggacaagtgaagtatcagattatatcgaagctaatgtcgtttatggacaaggtttggagaaagaaattccatacgctatttcaaatacttttggttttggaggccacaatgcagttcttgctttcaaacgttgggagaatagataa

SEQ ID NO: 37624 - DNA, 486 bp, Streptococcus pneumoniae
atgaatttaaacgatattaaagacttgatgactcaatttgaccagtcaagtttgagagaattttcttataaaaatgggacggatgagttgcagtttagcaagaatgaagcaagacctgtgcctgaagttgcaactcaagtcgctccagcacccgttctagcaacaccgagtccagtagctcctacatctgctccagcagagactgtagcagaagaagttccagctccagctgaagcaagtgtggctactgagggaaatcttgtagagagtccacttgttggagtggtttacttggctgctggaccagataaacctgccttcgttacagttggtgatagtgtcaaaaaaggtcaaacattggtaattatcgaagccatgaaagtcatgaatgaaatcccagctcctaaggatggtgtggtaacggaaattctcgtctctaacgaagaaatggttgagtttggtaaaggattggtacgtatcaaatga

SEQ ID NO: 37625 - DNA, 423 bp, Streptococcus pneumoniae
atgatcgatattcaaggaatcaaagaagctcttccccaccgttatcctatgcttctagtggaccgtgtcttggaagtgagcgaggataccattgttgctatcaaaaatgtgaccattaacgaacctttctttaacggccactttcctcaatacccagttatgccaggtgttctgattatggaagccttggcgcaaactgctggtgtgttggagttatcaaaacctgaaaataaaggaaaactggtcttttacgctggtatggacaaggttaagttcaagaagcaagttgtaccaggcgaccaattggttatgacagcgacttttgtaaaacgtcgtggcaccatagctgtggttgaagcaaaggctgaagtggatggcaagcttgcagccagtggtatccttacttttgcaattgggaactaa

SEQ ID NO: 37626 - DNA, 1368 bp, Streptococcus pneumoniae
atgtttcgaaaaattttaattgccaatcgtggtgaaattgcggttcgtattatccgtgcggcacgtgaattggggattgcgacggtagcggtttattcaactgctgataaggaagctcttcatacgcttttggcagatgaagcagtttgtattggtcctggcaaggcaacagagtcttatctcaatattaatgcagttctatcagctgcagtcttgactgaggcagaagctattcaccctggttttggatttctcagtgaaaattccaaatttgcgaccatgtgtgaagaagtaggtatcaagtttatcggtccatctggtcatgttatggatatgatgggggataagatcaatgcgcgtgctcagatgattaaagcaggtgtgcctgttataccaggttcagatggagaagtgcataactctgaagaagctttgattgttgctgaaaaaattggctatcctgttatgctcaaggcttcagcaggtggaggtggtaaagggattcgtaaggttgaaaaaccagatgacctcgtttctgcctttgaaactgcctctagtgaggccaaggccaattatggcaatggtgccatgtacatagaacgggttatctatccagctcggcacattgaggttcaaatcctaggtgatgagcatggacatgtgattcacttgggtgaacgggattgttctcttcaaaggaataaccaaaaggttttggaagaaagtccctcgattgcaatcggaaaaacgctgcgtcatgaaataggtgctgctgctgttcgagcggcagagtttgttggctatgagaatgcaggaaccattgaatttcttcttgatgaagcaagtagaaatttctatttcatggagatgaatactcgtgttcaggtagaacatccagtaacagagtttgtttcaggtgttgatatcgttaaggaacagatttgcattgcggcaggtcagcctttgtctgttaagcaagaagatattgtcctacgcggtcatgccatcgagtgtcgtatcaatgcagaaaacccagcctttaactttgctccaagtccaggtaagattactaatctctatctgccaagtggtggagttggcttgcgcgtggattcagcagtttatccaggttataccattccgccttattatgatagtatgattgccaaaatcatagtacacggcgaaaatcgttttgacgccttgatgaaaatgcaacgtgccctctatgaattagagattgaaggagtgcagaccaatgcagatttccagcttgatctcatttcagatcgcaatgtcattgctggggattatgatacttccttcttgatggaaaccttcttacctaaatatcaagaaaaagaataa

SEQ ID NO: 37627 - DNA, 867 bp, Streptococcus pneumoniae
atggctctatttagtaaaaaagataagtatattcgaatcaatcccaatcgttcggttagggaaaaacctcaagctaagccagaggttccagatgaattattttcccagtgtccaggctgtaagcataccatctatcagaaggatctgggaagtgaacgtatctgtccgcactgtagctatacctttcgtatttctgcccaagaacgcttggctttgacgattgatatgggaaccttcaaagaattgtttacagggattgaaagcaaggatcccttgcatttccctggttaccaaaagaaactggcatctatgcgtgaaaaaacaggtctgcatgaagccgttgtgacaggaactgctcttattaaaggtcagactgtggctcttgggattatggattctaattttatcatggcttctatgggtacggttgtaggtgaaaaaatcactcgtttgtttgagtatgcgactgtcgaaaaattgccagttgtcctattcacagcctctggtggagcccgtatgcaggaaggaatcatgagtctcatgcagatggctaagatctctgcagcggttaaacgccattcaaatgctggtctcttttacctgaccattttgacagatccaacgactggtggtgtgacagcttctttcgctatggaaggcgatatcattctggctgaaccacagagcttggttggttttgctgggcgtcgtgtgattgaaaatacggttcgtgaaagcttgcctgaggatttccaaaaggcagaattcctattagaacatggctttgtggatgctattgtcaaaagaagagacttaccagatacgattgctagcctagtcagattgcatggagggagtcctagatga

SEQ ID NO: 37628 - DNA, 768 bp, Streptococcus pneumoniae
atgaatattgcaaaaatagtcagagaagcgcgtgagcagagtcgcttgacaaccttggactttgcgacaggcatttttgatgaatttatccaattacatggtgaccgttcttttcgtgatgatggtgcagttgttggtggtattggttggcttggagaccaagctgtaacagtggttggtatccaaaaaggcaagagtttgcaagacaacctcaaacggaattttggccaaccacatccagaaggctaccgaaaggcactgcggttgatgaaacaggctgagaaatttggccgtccagttgtgacctttatcaatacagcaggtgcttatcctggtgtcggagcggaagaacgtggtcaaggggaagctatcgctcgcaatctcatggaaatgagtgacctgaaagttcctattatcgccattattatcggtgaaggtggttcaggcggggctctggctctagctgtcgcggaccgtgtctggatgctggaaaattctatctatgccattctcagtccagaaggctttgcttccattttatggaaggacggtactcgcgccatggaagcagcagaactgatgaaaatcacttcgcatgaactgttagaaatggacgtggtggataaggtgatttctgaagtaggactttctagtaaagaactaattaagagtgtcaaaaaagaactccaaacggagctggctagactttcacaaaaaccgctagaagagttgctggaagaacgctatcaacgatttagaaaatactaa

SEQ ID NO: 37629 - DNA, 441 bp, Streptococcus pneumoniae
ttgacgaggacttcctcaatgactagtccactattagaatctagacgccaactccgtaaatgcgcttttcaagctctcatgagccttgagttcggtacggatgtcgaaactgcttgtcgtttcgcctatactcatgatcgtgaagatacggatgtacaacttccagcctttttgatagacctcgtttctggtgttcaagctaaaaaggaagaactagataagcaaatcactcagcatttaaaagcaggttggaccattgaacgcttaacgctcgtggagagaaacctccttcgcttgggagtctttgaaatcacttcatttgacactcctcagctggttgctgttaatgaagctatcgagcttgcaaaggacttctccgatcaaaaatctgcccgttttatcaatggactgctcagccagtttgtaacagaagaacaataa

SEQ ID NO: 37630 - DNA, 1443 bp, Streptococcus pneumoniae
atgaactttgaaacagtcattggacttgaagtccacgtagagctcaacaccaattcaaaaatcttctcacctacttctgcccacttcggaaatgatcaaaatgccaacactaacgtgattgactggtctttcccaggagttctgccagttctcaataaaggggttgtcgatgccggaatcaaggctgctcttgccctcaacatggacatccacaaaaagatgcactttgaccgcaagaactacttctatcctgataaccccaaagcctaccaaatttctcaatttgatgaaccaatcggatataatggctggattgaagtcgaactagaagacggtacgaccaagaaaatcggtatcgaacgtgcccacctagaggaagacgctggtaaaaacacccatggtacagatggctactcttatgttgacctcaaccgccaaggggttcccttgattgagattgtatctgaggcagatatgcgttctcctgaagaagcctatgcttatctgacagccctcaaggaagttatccagtacgctggcatttctgacgttaagatggaggaaggttcgatgcgtgtggatgccaacatctcccttcgtccttatggtcaagagaaattcggtaccaagactgaattgaagaacctcaactccttctcaaacgttcgtaaaggtcttgaatacgaagtccaacgccaggctgaaattcttcgctcaggtggtcaaatccgccaagaaacacgccgttacgatgaagcgaataaagcaaccatcctcatgcgtgtcaaggaaggggctgctgactaccgctacttcccagaaccagacctacccctctttgaaatttctgacgagtggattgaggaaatgcggactgagttgccagagtttccaaaagaacgtcgtgcgcgttatgtatctgaccttggtttatcagactacgatgctagtcagttgactgctaataaagtcacttctgacttctttgaaaaagctgttgccctaggtggtgatgccaaacaagtctctaactggctccaaggggaagtcgctcagttcttgaatgctgaaggtaaaacactggaacaaatcgaattgacaccagaaaacttggttgaaatgattgccatcatcgaagacggtactatttcatctaagattgccaagaaagtctttgtccatctagctaaaaatggcggtggcgcgcgtgaatacgtggaaaaagcaggtatggttcaaatttcagatccagctatcttgatcccaatcatccaccaagtctttgccgataacgaagctgctgttgccgacttcaagtcaggcaaacgtaacgccgacaaagcctttacaggattccttatgaaggcaaccaaaggccaagccaacccacaagttgcccttaaactacttgcacaggaattggcgaagttgaaagaaaactag

SEQ ID NO: 37631 - DNA, 1467 bp, Streptococcus pneumoniae
atgacttttaacaataaaactattgaagagttgcacaatctccttgtctctaaggaaatttctgcaacagaattgacccaagcaacacttgaaaatatcaagtctcgtgaggaagccctcaattcatttgtcaccatcgctgaggagcaagctcttgttcaagctaaagccattgatgaagctggaattgatgctgacaatgtcctttcaggaattccacttgctgttaaggataacatctctacagacggtattctcacaactgctgcctcaaaaatgctctacaactatgagccaatctttgatgcgacagctgttgccaatgcaaaaaccaagggcatgattgtcgttggaaagaccaacatggacgaatttgctatgggtggttccggtgaaacttcacactacggagcaactaaaaacgcttgggaccacagcaaggttcctggtgggtcatcaagtggttctgccgcagctgtagcctcaggacaagttcgcttgtcacttggttctgatactggtggttccatccgccaacctgctgccttcaacggaatcgttggtctcaaaccaacctacggaacagtttcacgtttcggtctcattgcctttggtagctcattagaccagattggaccttttgctcctactgttaaggaaaatgccctcttgctcaacgctattgccagcgaagatgctaaagactctacttctgctcctgtccgcatcgccgactttacttcaaaaatcggccaagacattaagggcatgaaaattgctttgcctaaggaatacctaggcgaaggaattgatccagaggttaaggaaacaatcttaaacgcggccaaacactttgaaaaattgggtgctatcgtcgaagaagtcagccttcctcactctaaatacggtgttgccgtttattacatcatcgcttcatcagaagcttcatcaaacttgcaacgttttgacggtatccgttacggctaccgcgcagaagatgcgactaatcttgatgaaatctatgtaaacagccgtagccaaggttttggtgaagaagtgaagcgccgtatcatgctgggtactttcagtctttcatcaggttactacgatgcctactacaagaaggctggacaggtccgtacacttatcattcaagatttcgaaaaagtcttcgcggattacgatttgattttgggtccaactgctccaagtgttgcctatgacttggattctctcaaccatgacccagttgccatgtacttagccgacctcttgaccatacctgtaaacttggcaggactgcctggaatttcgattcctgctggattctctcaaggtctacctgtcggtctgcaattgattggtcccaagcactctgaggaaaccatttaccaagttgctgctgcctttgaagcaacaacaggctaccacaaacaacaacccgtgatttttggaggtgacaactaa

SEQ ID NO: 37632 - DNA, 303 bp, Streptococcus pneumoniae
atgaaaattacgcaagaagaggtaacacacgttgccaatctttcaaaattaagattctctgaagaagaaactgctgcctttgcgaccaccttgtctaagattgttgacatggttgaattgctgggcgaagttgacacaactggtgtcgcacctactacgactatggctgaccgcaagactgtactccgccctgatgtggccgaagaaggaacagaccgtgatcgcttgtttaaaaacgtacctgaacaagacaactactatatcaaggtgccagctatcctagacgatggaggagatgcctga

SEQ ID NO: 37633 - DNA, 1545 bp, Streptococcus pneumoniae
atgaatattcaagaagaaattaagaaacgtcgtacctttgccattatctcccacccggacgcggggaaaacaaccatcactgagcagttactctactttgggggtgagattcgtgaggctggtacggtaaaagggaagaaaacagggacttttgctaaatctgactggatggatatcgagaagcaacgtgggatttctgttacttcatctgttatgcaatttgactacgacggcaagcgcgtgaatatcttagacacgccagggcacgaggacttctcagaagatacctatcgtaccttgatggcggtggatgctgcggtcatggtcgtggactctgccaaggggatcgaggctcaaaccaagaaattgtttgaggttgtgaaacatcgtggcattccagtttttacctttatgaacaagctggaccgtgacggtcgtgagcctttggatctcttgcaagaattggaagaaatcttgggcattgctagctaccctatgaactggcctatcgggatggggaaagcctttgagggcttgtatgacctctataaccaacgtttagagctttacaaaggggatgagcgttttgccagtctagaagacggggacaaactctttggtagcaatcctttctacgagcaagtcaaggatgacattgagcttttaaatgaagctgggaatgagttttcagaggaagctattctggctggagaattgacgcctgtctttttcggttcagccctgacaaactttggtgtgcagaccttccttgaaatcttcctcaagtttgctccagaaccacatggtcacaagaaaacagacggtgaaattgtggatccttatgacaaggatttctcaggctttgtctttaaaatccaagccaacatggatcctcgtcaccgtgaccgtattgcctttgtccgtatcgtatcaggcgaatttgagcgcggcatgagtgtcaatctccctcgtactggtaagggggctaaactatctaatgttacccagtttatggcggaaagtcgtgagaatgtgatcaatgccgtggcaggtgatattatcggggtttacgataccggtacttatcaggttggggataccttgacggttggaaaaaacaagtttgaatttgaaccactgccaacctttactcctgaaattttcatgaaagtttctgccaagaatgttatgaagcaaaaatccttccacaaggggattgagcaattggtgcaagaaggagccgttcagctttataagaattaccaaacaggtgagtacatgctgggagctgttggtcaactccagtttgaagtctttaaacaccgtatggaaggcgaatacaatgcggaagtggtcatgagcccaatgggtaaaaagaccgttcgttggatcaagcctgaggacttggatgaacggatgtcgtcaagtcgcaatatcttagccaaagaccgttttgaccaaccagtctttctctttgaaaatgactttgccctccgctggtttgcggacaagtatccagacgtagagttagaggagaagatgtga

SEQ ID NO: 37634 - DNA, 189 bp, Streptococcus pneumoniae
atggctaaagtatgttactttacaggtcgtaagactgtatcaggaaacaaccgttcacacgcgatgaaccaaacaaaacgtgccgtaaaaccaaaccttcaaaaagttactgttcttatcgatggtaaacctaaaaaagtttgggcttcagctcgtgctttgaaatcaggtaaagttgaacgcgtttaa

SEQ ID NO: 37635 - DNA, 1701 bp, Streptococcus pneumoniae
atggagaaaatcagtttagaatctcctaagacggggtcggacctagttttggaaacacttcgtgatttaggagttgataccatctttggttatcctggtggtgcggttttgcctttttatgatgcgatatataattttaaaggcattcgccacattctagggcgccatgagcaaggttgtttgcatgaagctgaaggctatgccaaatcaactggaaagttgggtgttgccgtcgtcactagtggaccaggagcaacaaatgccattacagggattgcggatgctatgagcgatagcgttccccttttggtctttacaggtcaggtggcgcgagcagggattgggaaggatgcctttcaggaggcagacatcgtaggaattaccatgccaatcactaagtacaattaccaagttcgtgagacagctgatattccgcgtatcattacggaagctgtccatatcgcaactacaggccgtccagggccagttgtaattgacctaccaaaagacatatctgctttagaaacagacttcatttattcatcagaagtgaatttaccaagttatcagccgactcttgagccgaatgatatgcaaatcaagaaaatcttgaagcaattgtccaaggctaaaaagccagtcttgttagctggtggtggaattagttatgctgaggctgctacggaactaaatgaatttgcagaacgctatcaaattccagtggtaaccagtcttttgggacaaggaacgattgcaacgagtcacccactctttcttggaatgggaggcatgcacgggtcattcgcagcaaatattgccatgacggaagcggactttatgattagtattggttctcgtttcgatgaccgtttgacggggaatcctaagactttcgctaagaatgctaaggttgcccacattgatattgacccagctgagattggcaagattatcagtgcagacattcctgtagttggagatgctaagaaggccttgcaaatgttgctagcagaaccaacagttcacaacaatactgaaaagtggattgagaaagtcactaaagacaagaatcgtgttcgttcgtatgacaagaaagagcgtgtggttcaaccgcaagcagttattgaacgaattggtgaattgacgaatggagatgccattgtggtaacagacgttggtcaacaccaaatgtggacagctcagtattatccctaccaaaatgaacgtcagttagtgacttcagatggtttgggaacaatgggctttggaattccagcagcaatcggtgctaaaattgctaacccagataaggaagtagtcttgtttgttggggatggtggtttccaaatgaccaaccaggagttggctattttgaatatttacaaggtgccaatcaaggtggttatgctgaacaatcattcactcggaatggttcgccagtggcaggaatccttctatgaaggcagaacatcagagtcggtctttgatacccttcctgatttccaattgatggcgcaggcttatggtattaaaaactataagtttgacaatcctgagaccttggctcaagaccttgaagtcatcactgaggatgttcctatgctaattgaggtagatatttctcgtaaggaacaggtgttaccaatggtaccggctggtaagagtaatcatgagatgttgggggtgcagttccatgcgtag

SEQ ID NO: 37636 - DNA, 501 bp, Streptococcus pneumoniae
atgagatgttgggggtgcagttccatgcgtagaatgttaacagcaaaactacaaaatcgttcaggagtcctcaatcgctttacaggtgtcctatctcgtcgtcaggttaatattgaaagcatctctgttggagcaacagaagatccgaatgtatcgcgtatcactattattattgatgttgcttctcatgatgaagtggagcaaatcatcaaacagctcaatcgtcagattgatgtgattcgcattcgagatattacagacaagcctcatttggagcgcgaggtgattttggttaagatgtcagcgccagctgagaagagagctgagattttagcgattattcaacctttccgtgcaacagtggtagacgtagcgccaagctcgattaccattcagatgacgggaaatgcagaaaagagcgaagccctattgcgagtcattcgcccatacggtattcgcaatattgctcgaacgggtgcaactggatttacccgcgattaa

SEQ ID NO: 37637 - DNA, 1023 bp, Streptococcus pneumoniae
atgacagttcaaatggaatatgaaaaagatgttaaagtagcagcacttgacggtaaaaaaatcgccgttatcggttatggttcacaagggcatgcgcatgctcaaaacttgcgtgattcaggtcgtgacgttattatcggtgtacgtccaggtaaatcttttgataaagcaaaagaagatggatttgatacttacacagtagcagaagctactaagttggctgatgttatcatgatcttggcgccagacgaaattcaacaagaattgtacgaagcagaaatcgctccaaacttggaagctggaaacgcagttggatttgcccatggtttcaacatccactttgaatttatcaaagttcctgcggatgtagatgtcttcatgtgtgctcctaaaggaccaggacacttggtacgtcgtacttacgaagaaggatttggtgttccagctctttatgcagtataccaagatgcaacaggaaatgctaaaaacattgctatggactggtgtaaaggtgttggagcggctcgtgtaggtcttcttgaaacaacttacaaagaagaaactgaagaagatttgtttggtgaacaagctgtactttgtggtggtttgactgcccttatcgaagcaggtttcgaagtcttgacagaagcaggttacgctccagaattggcttactttgaagttcttcacgaaatgaaattgatcgttgacttgatctacgaaggtggattcaagaaaatgcgtcaatctatttcaaacactgctgaatacggtgactatgtatcaggtccacgtgtaatcactgaacaagttaaagaaaatatgaaggctgtcttggcagacatccaaaatggtaaatttgcaaatgactttgtaaatgactataaagctggacgtccaaaattgactgcttaccgtgaacaagcagctaaccttgaaattgaaaaagttggtgcagaattgcgtaaagcaatgccattcgttggtaaaaacgacgatgatgcattcaaaatctataactaa

SEQ ID NO: 37638 - DNA, 936 bp, Streptococcus pneumoniae
atgattcaagtagaacctggtttcaaaactggggaagaagatacagctatcgctatcgggcttcgtaaaaatgacaatcgtattagccaaatcaatgccagcattgaaaccatttcaaaagatgaccaagttgccttgatggatcgtatgatcaaggaacaacctgccgaagctacaacaactgaagagactagcagtagtttctttagccaagttgctaaaattctttctgaaaactggcaacaactcttgcgtggtgctggtatcactcttttaatctctatcgtcggaaccatcataggtctcattattggacttgccattggtgtcttccgtactgctcctctctctgaaaacaaagtcatttacggcctacaaaaactagtcggctgggttctcaatgtctacattgaaattttccgtggtacgccaatgattgttcaatcgatggttatctactatggaactgcccaagctttcgggatcaaccttgaccgtacactggctgctatcttcatcgtttcaatcaataccggtgcctacatgactgaaatcgtccgtggtggtatcctagcagttgacaagggacaatttgaagctgcgactgctcttggtatgacccataaccagaccatgcgtaagattgtcctacctcaggtagtccgtaacatcctacctgcaactggtaatgaatttgtcatcaatatcaaagatacatctgtattgaacgttatctctgttgtcgaactttatttctcaggaaataccgtggcaacacaaacctatcaatacttccagacatttacaatcatcgccgtgatttactttgtcctcaccttcaccgtaacacgtatcctacgctttatcgagcgcagaatggacatggatacctacactacaggtgctaaccaaatgcaaacggaggatttgaaataa

SEQ ID NO: 37639 - DNA, 1440 bp, Streptococcus pneumoniae
atgaataaaagtatgattcgttacctcctttcaaagttacttttgattgaagctgttctcctcttggttcctgtggctatcgctgtctattaccgtgaatcgagccaagtctttacagccctcttttcgaccatagggattctcgtattgttaggcggttcagggaatttacagaagccaaaaaatcaacggatttatgccaaggagggagtcttgatcgttgccctctgttggatcctttggtctttctttggtggtctcccctttgtcttttctgggcaaatccccagccttattgatgccttttttgaaattagttctgggtttacaactactggagcaagtattttgaacgacgtttcggttctcagccgttccctcctcttctggcgaagttttacccacttgattggagggatgggagtgcttgtttttgcacttgctattatggacaatgccaaaaatagccacctagaggtgatgaaggctgaggttccaggtcctgtttttggcaaggttgtatccaaactaaaaaacactgcccagattctctatctcctttatctagctctcttctccctctttgtcatcatctattatctagctggtatgcctctctacgatagttttgtcattgctatggggacagcgggaactggaggctttaccgtctataacgacggaattgcccactatggcagctcactgattacctatctggtcagtatcggagttctggtttttggggtaaatttcaacctctactactacctcatgctccgtcgcatcaaggccttctttggtgacgaagaacttcgggcttacttggtcattgtactggtttctacaggcttgattagcctcaacaccctctacctctacccagggttttcaaagagctttgaaatgaccttcttccaggtttccaacatcattacaacaactggttttggatatggagatattaccaactggcccctcttctcccagtttatcctccttttcctcatggcaatcggtggctctgctggatcaactgcaggtggactcaagattattcgaggcctcatcctttcaaaaattgccaaaaaccaaattttgtcaatcctatcgccccaccgtgttttgaccctccatgtgaatcaaacggtgattgataaagatacccagcataagattctcaagtactttgtcatctatgctatgattttgctagcgcttatctttattgtcagcctagatagcaatgattttctggtcgtgaccagcgctgtctttagctgtttcaataacatcgggcctattctaggaaccacttctagtttctcaatctttagtcccatctcaaaaattctcctctcctttgcaatgattgcagggcgcttggagatttacccaatcctccttctctttatgaaaagaacttggtctaagagataa

SEQ ID NO: 37640 - DNA, 1350 bp, Streptococcus pneumoniae
atgaaaattatccttgtcggagggggaaaagttggttttgccctctgtcgctccttggttgcagaaaagcatgatgttttgctgattgagcaagacgaagctgttctcaatcatattgtcagtcgctttgatatcattggtatccttggtaacggggccgattttgccattcttgagcaagccagcgtccaagattgtgatatctttatcgccctgactgagcacgatgaagtcaacatgattgcagcagttctagccaagaaaatgggagctaaagaaactatcgttcgggtgcggaaccctgaatattctaactcttatttcaaggaaaagaatattctcggtttttctcttatcgttaatcctgagctcttggctgcccgcgctatcgcgaatatcattgacttccccaacgccctgtctgtcgaacgctttgctggtggacgcgttagcctcatggaatttgtcgtcaagtccaccagcggtctttgccaaatgcccatttctgattttcgtaaaaaatttggtaatgtcattgtctgtgcgatagagagggatcatcaaattatcattccaagcggtgacatgactgtacgggataaagatagaatctttgtcactggtaaccgtgtcgatatgatactcttccataattattttaaatcacgcgccgtgaagagccttctcatcgttggggcaggtagaattgcctattatctacttggtattctcaaagatagtcgtatcgatacaaaagtcattgaaatcaatcctgaaatcgccagcttctttagcgagaaattcccaaatctctacatcgttcaaggagatggaaccgcaaaagatatcctgctggaagaaagtgctcaacactatgatgccgttgcgactctaacaggagtcgatgaggaaaatctgattacatctatgttccttgacagggtaggtgtacagaaaaatattactaaggtcaatcgtaccagtctcctcgagattatcaatgcgcctgatttttcaagtatcatcacacctaaaagcatcgctgtagatacgattatgcactttattcgtggtcgagttaatgcccagtattcagaccttcaagccatgcaccatctagccaatggccaaatcgaaaccctgcaattccatatcaaggaagccaataaaatgactgccaaacctctttctcaactgaaattgaaaaaaggggttcttattgcagccattattcgaaagggcaagactattttcccaactggggaggatatgttggaagttggagacaagctcctagtaacaaccttgttgccaaacatcaccaagatttatgacttgattgcgaggtaa

SEQ ID NO: 37641 - DNA, 876 bp, Streptococcus pneumoniae
atgataaaggatatacaaggagataaaatgaataataatttactggtattacaatcagactttggtctggttgatggtgcggtatcggctatgattggagtggctttagaagagtctccaaccttaaaaatccatcacttgacgcacgatatcacgccttataatatttttgaggggagctatcgtctctttcagacggtggattactggcctgagggaacgacgtttgtatcggttgtcgatccaggtgtcggttcgaaacgtaagagtgtagttgccaagactgcaaaaaatcaatacattgtcacgccagataatgggacgctttcctttatcaagaaacacgttggcattgtagccattcgtgagatttctgaggtggccaataggcgtcaaaacacagagcattcttataccttccacggtcgtgatgtctatgcctatactggtgctaaactggccagtggtcacattacttttgaggaagtagggccagagctcagtgtggaccagattgtagagcttccagtcgtagcgaccatcatagaagatcatctggtgaagggagccattgatattctggatgtgcgtttcggttcgctttggacctctatcacacgggaagaattttacaagctggaaccagaatttggtgatcgttttgaagtgaccatctatcatgctgatatgctggtttatcaaaatcaggttgtctatggcaaatcatttgcagatgtgagaattgggcaacccattctttacatcaactctctctatcgtttaggtttggctatcaaccaaggttcctttgccaaggcctataatgtaggtgtcggttcatcttggaccattgaaataaagaaaatagaaggataa

SEQ ID NO: 37642 - DNA, 543 bp, Streptococcus pneumoniae
gtgtggctatttttttgcaatggtaaaaggaagcaagtcatgacaaatcacattgtattatttgaaccacaaattccacaaaatacaggcaatatcgcgcgtacttgcgctgcgaccaattctcccctccacatcatcaagcctatgggctttcctatcgatgaccgcaagatgaagcgagctggtttggattattgggataagctagagatttatttttacgagagtttggaggatttcatgtctcagatgaagggcaaactctatctgatttcgaaattcgcggaaaaagtctattctgatgtggatttatctactaacgaagatcattattttctatttggacgtgaagacaagggcttgccggaggactttatgcgagaacatcctgagaaagctctccgtattcctatgaatgatgaacatgtccgcagtctcaatgtgtctaataccgtctgcatgattgtctatgaggctcttcgccagcagaactttgcaggtcttgagcttgttcatacctatgaagtggataaattgaaataa

SEQ ID NO: 37643 - DNA, 651 bp, Streptococcus pneumoniae
atgaaagataaacaaacatttttaatgaagggcagttttgcccttttacttttcgttattcttggctacatggtcaaattttaccctgaaacgctggtcaattttgaccaatcgattcagactgccattcgaggagacttaccagattatttgactattctttttcgagccctcacacgtctgattgatatcccagtgattatcacttgggttgtcattacagcttttgtcttttatcgtaagcgatggaagatagaaagtttcttcatgctgggaaatctggctttggcaggtcttttaatcgtgacctttaaaaatatctaccagcgcccacgaccagctatcttacatcttgtggaggagaagggattttccttcccaagtgggcattctctggctgtaaccttgatggtaggcactctgattgtcattctcagtcaacgaattaaaaatccagtctggagaaaaatcgtacaaattgtccttggcctctacctagtcagtgtgctggtatcaagagtctatctgggagttcattacccatcagacgtccttgccagtctctgtgtgggcttgggagtcctgtttatcgagtttcccttctatgacaagctccgcttccaatggcgatttaaaggcaaacagaagtga

SEQ ID NO: 37644 - DNA, 1608 bp, Streptococcus pneumoniae
atgtctacgaaatatatttttgtaactggtggtgtggtatcgtctattgggaaagggattgtggcagcgagtctaggccgtctcttgaaaaatcgtggtctcaaagtaaccattcaaaagtttgacccttatatcaatattgatccgggaaccatgagtccttaccagcacggggaagtttttgtgacagatgacggagctgagacagatttggacttgggtcactatgaacgtttcatcgatatcaatctcaacaaatattccaacgtgacaactgggaaaatttacagtgaagttcttcgtaaagaacgccgtggagaataccttggggcaactgttcaagtcattcctcatatcacagatgctttgaaagaaaaaatcaagcgtgccgctctaacgaccgactctgatgtcattatcacagaggttggtggaacagtaggagatatcgagtccttgccattcctagaggctcttcgtcagatgaaggcagatgtgggtgcggataatgtcatgtatatccatacaaccttgcttccttacctcaaggctgctggtgaaatgaaaaccaaaccaacccaacactctgtcaaagaattgcgtggcttgggaatccaaccaaatatgttggttattcgtacagaagagccagctggtcaaggaattaaaaataaactggcccagttctgtgatgtggcaccagaagccgttatcgaatcgttggatgttgaacacctttaccaaattccactgaacttgcaggcacaagggatggaccaaattgtttgtgatcatttgaaattagacgcaccagcagcggatatgacagaatggtcagccatggtggacaaggtcatgaacctcaagaaacaagttaagatttcccttgttggtaagtatgtggagttgcaagatgcctatatctcagtggtcgaagccttgaaacactctggctatgtcaatgatgtagaagttaaaatcaattgggtcaatgccaatgatgtgacagcagagaatgtagcagaactcttgtctgatgcggacgggatcatcgtaccaggtggttttggtcaacgtggtacagaagggaaaatccaagccatccgctatgcgcgtgaaaatgatgttccaatgttgggagtctgcttgggaatgcagttgacatgtatcgagtttgctcgtcacgttttaggtcttgaaggtgccaattctgcagagcttgcaccagaaacaaaataccctatcattgatatcatgcgtgatcagattgatattgaggatatgggtggaacccttcgtttgggactttatccgtctaagttgaaacgtggctctaaggctgctgctgcttatcacaatcaagaagtggtgcaacgccgtcaccgtcaccgttatgagtttaataatgccttccgtgagcagtttgaggcagcaggttttgtcttttcaggagtttctccagacaatcgtttggtagaaatcgtggaaattcctgaaaataaattctttgtagcttgtcagtatcaccctgaactgtcaagccgtccaaaccgaccagaagaactctacactgcctttgttactgcagcggttgagaacagcaattag

SEQ ID NO: 37645 - DNA, 1632 bp, Streptococcus pneumoniae
atgtccattaattggcaggaaattttatttcactttttaggtggtctggggctattcttatatagcatcaagaccatgggagacggtttacaacaagctgctggagatcgccttcgtttttacattgacaaatatactagtaatcctttctttggagttctggttggtattgggatgactgctctaattcagtctagttctggtgtaacagttatcacagtcggcctggtcagtgccggtctcttaaccttacgtcaggctatcgggattgtcatgggtgctaatattgggacaactgtcacatcctttctcatcggttttaaattaggtaactatgccctacctatgctctttatcggtgccgtctgtcttttttttacgaaaaatcggacagtcaataatatcggacgcatcctctttggtgtcggtggtatcttttttgccctcaatctcatgagcggcgcaatggctccactcaaggatttacaggtctttaaggactatatgattgagctaagtaagaatcctgttttgggtgtctttgtcggtactggcttgaccttgctaattcaagcttcttcggctaccattgggattttacaaaacctctacgccggcaatctaattgatctacagggagctttgccagttctatttggtgacaatatcgggacaaccattacagccatcattgcctctttaggggctaatattgcagctaaacgggtagcaggagctcatgttgccttcaacattatcggaacagttttctgcgttatttttctagttccttttactgtcctgattcattggtttgaagctacgctaaatctagcaccggaaatgaccatcgcctttgctcacggaacctttaatattaccaacaccattgtccaatttccatttatcggagctctggcttactttgtaaccaagattattcctggagaggacgaggttgtcaaatacgaacccttatatcttgatgaacatttcatcaaacaagccccatctatcgctctaggaaatgctaaaaaagagctcttgcacttaggaaactacgctgctaaagcctttgacctttcctataagtacatcattgacttggatgaaaaagttgctgaaaaagggcataaaaccgaagaagcaattaacaccatcgatgagcaattaacacgttatctcattgccctttcaagcgaagctctcagccaaaaagaaagtgaagtgcttaccaatatccttgattcctcccgtgatttggaacggattggagaccacacggaggctctactcaatctgactgactatcttcaacggaaaaatgttgaattttctgatgccgccttgaaagaattagaggaagtttaccgccaaactagtgactttatcaaagatgctctggatagtgtggaaaacaatgatattgaaaaagcacgcagtcttgtagaacgtcatgaagcaatcaataagatagaacgtgttctcagaaaaacccacatcaaacgcctcaacaaaggcgaatgttcaacacaagctggagtcaactttatcgacatcatctcacactacactcgtgtatcagaccacgctatgaaccttgctgaaaaggtttttgcagaacaaatctaa

SEQ ID NO: 37646 - DNA, 1197 bp, Streptococcus pneumoniae
atggcaaaacttactgttaaagacgttgacttgaaaggtaaaaaagtcctcgttcgtgttgacttcaacgtaccattgaaagatggcgtaatcactaacgataaccgtatcacagcagctcttccaactattaagtacatcatcgaacaaggtggacgtgcaattcttttctctcaccttggacgtgtgaaagaagaatctgataaagctggtaaatcacttgctcctgtagcagctgacttggcagcaaaacttggtcaagatgttgttttcccaggtgtcactcgtggtgctgaattggaagcggcaatcaacgctcttgaagatggacaagttctcttggttgaaaacactcgttacgaagatgttgacggcaagaaagaatctaaaaacgatcctgaacttggtaaatactgggcatcacttggagatggtatcttcgtaaacgatgcattcggtacagctcaccgtgcacacgcatctaacgttggtatctcagcaaacgttgaaaaagcagttgctggtttccttcttgaaaacgaaattgcctacatccaagaagcagttgaaactccagaacgtccattcgtggctatccttggtggttcaaaagtttcagacaagatcggtgttatcgaaaacttgcttgaaaaagctgataaagtccttatcggtggtgggatgacttacacattctacaaagcacaaggtatcgaaatcggtaactcacttgtagaagaagacaaattggatgttgcgaaagctcttcttgaaaaagcaaatggtaaattgatcttgccagttgactcaaaagaagctaacgcatttgctggttacactgaagtgcgtgacactgaaggtgaagcagtttctgaaggcttccttggtcttgacatcggtccaaaatctatcgccaaatttgacgaagctttgactggtgccaaaacagttgtatggaacggacctatgggtgtatttgaaaacccagatttccaagctggtacaatcggtgtgatggacgctatcgtgaaacaaccaggagttaaatcaatcatcggtggtggtgactcagctgccgcagcgattaaccttggccgtgcagacaagttctcatggattagtacgggtggtggagcatcaatggaacttcttgaaggtaaggttcttccaggacttgcagccttgacagaaaaataa

SEQ ID NO: 37647 - DNA, 1347 bp, Streptococcus pneumoniae
atgccaatcacagctgcagatattcgtcgtgaagtcaaggaaaaaaatgttacctttattcgtcttatgttctcagatattttgggaaccatgaaaaacgtcgaaattcctgctacagatgaacagttagataaggtcttgtcgaacaaggttatgtttgatggatcttctattgaaggttttgtacgtatcaatgagtcggatatgtacttgtacccggacttggatacatggacagtcttcccttggggagatgaaaatggaagtgttgcaggtctgatctgtgatgtctatacaacagaaggtgaaccatttgcgggtgaccctcgtggtaatttgaaacgagctcttcgtcacatggaagaagttggattcaaatccttcaaccttggtccagagccagaattcttcctatttaagttggatgaaaatggggacccaacacttgaagtgaatgacaagggtggctactttgatttggcacctactgaccttgcggacaacacacgtcgtgagattgtgaatgtcttgaccaaaatgggatttgaagtagaagcgagtcaccacgaggttgcggttggacagcatgagattgactttaagtacgatgaagttctccgtgcttgtgataagattcaaatctttaagcttgttgttaaaaccattgctcgcaaacacggactttacgcaacatttatggcgaagccaaaatttggtattgctggatcaggtatgcactgtaatatgtccttgtttgatgcagaaggaaataacgccttctttgatccaaatgatccaaaaggaatgcagttgtcagaaacagcttaccatttcctaggcggtttgatcaagcatgcttacaactatactgccatcatgaacccaacagttaactcatacaaacgtttggttccaggttatgaagcgcctgtttacattgcttgggctggtcgtaaccgttcgccacttgtgcgcgtacctgcttcacgtggtatgggaactcgtcttgagttgcgttcagtggatccaatggcgaacccttacgttgctatggctgttcttttggaagttggtttgtatggtattgaaaataaaatcgaagcaccagctcctatcgaagaaaatatctacatcatgacagcagaagagcgcaaggaagctggtattacagaccttccatcaactcttcacaacgctttgaaagctttgacagaagatgaagtggttaaagctgctctcggagatcacatctacactagcttccttgaagccaaacgaatcgaatgggcaagttatgcaaccttcgtttcacaatgggaaattgataattatttagacctttactaa

SEQ ID NO: 37648 - DNA, 1281 bp, Streptococcus pneumoniae
gtgaggataaaatcaatttattggaattttgggcaaaataagccagagaaatcctttaggtatatagatacgtctagtattgatagaaaaaagaacataatcaactacaaaaatctacaatatctttcacctgaacaagcgccttcccgtgctagaaaattagtttcgcagaatagtgtcttattttcaacagttagaccatatctaaaaaatattgctgtagttagagaacttaaagagtatttgatagctagtacagcatttattgttttggatactttacttaacgaaacatatttgaaatattatttattatcagataattttatcaatcgtgttaataataaatctactggaacaagttatcctgcaatcaatgattataattttaatctattattaattgctctccccccactatccgaacaacaacgaatagtagaagcaatcgaatcagctttagaaaaagtagatgaatatgctgaaagttataatagactagaacagctagataaagaatttccagataaactaaaaaaatctattcttcaatatgctatgcaaggaaaattagttgaacaagacccaaatgatgaatcagtcgaagttttacttgaaaaaatacgagcagaaaaacaaaaactatttgaagaaggcaagattaaaaagaaagatttggacatttctattgtttcccaaggagatgataactcttattatgggaacaaagacgaaacaacctcttatcctatatatgaaatcccagaagcatggagatatattaaatttgctagcctagttaacttcagaataggaaaaactcctccacgcagtgaagctactttttggggaactgaaataccttgggtatctatatcagatatgcctatatctggttatgtaactaatacgagagaatctatttctaaattagcattaaaatcaaagaaaatagacatttcacctaaaggaactttattaatgagttttaaattatctattggaaaagttgccatattggatattcctgccactcataatgaagccattatatcgatattcccctatgctaataaagaaaatattatcagagattacttaatgatatttttgccacttatctctactttaggtgattcaaaagatgctatcaaagggaaaacattaaatagtaccagtatctccgaattattaatccctatttctaatcatgaagagatgaaaagaatcattttcaaagttgatttactttttcaaaaagtttctcaactttttgagtaa

SEQ ID NO: 37649 - DNA, 600 bp, Streptococcus pneumoniae
gtggtcaaactgactacctgctatttttgtgattatggctcttattatgggaatatacctatgaattgggttgttataaaaataaaagatattttttcaatgaatacaggtctttcttacaagaagggcgatttaagcattaataataaaggtgttagaattatacgtggtggtaatattaagcctttagaattttctctgttggataatgattactacattgatacacaattcatctcctctgagcaagtttatttaaaacataatcagctaataacacctgtagcaacctctttagaacatattggaaagtttgcaagaatcgataaagactatgatggtgttgtggctggtggatttattttccaattaacaccattcgaaagttcagagattatttcaaaatttctattatttaacttgtcctctccgttattttataaacaattgaaagcaataactaaactatcaggtcaagctttatataatattcctaaaactacactgagcgagctattaattccgttagctccttttgaggaacaggaacttattactcaaaaagttgagaaactttttgaaaaagtaaatcaactttga

SEQ ID NO: 37650 - DNA, 1569 bp, Streptococcus pneumoniae
atgacaccagaacaacttaaagcaagtattctccaaagagcgatggaagggaaattagtgccgcaaaatcccaatgacgaacctgcaagtgaattattaaagagaattaaagctgaaaaagaaaaacttatcagtgaaggaaaaatcaaacgagataaaaaggaaactgagatatttcgtggtgatgatgggaaacattatgggaagtttgctgatggaagtactcaagaaattgatgttccttatgatattcctgatacttgggagtgggtgaggttttctacattggttgaaattgtcagaggtggctctccacgaccaatcaaagattatcttacttctgaagtagatggaataaattggataaaaataggtgatactgaaaagggtgaaaagtatataaataatgttaaagaaaaaatcaaaaaatcagggcttaacaaaactagatttgtaaaaaaaggtacatttttgttaactaattctatgagttttggtagaccttatattttgaatgttgatggtgcaatacacgatggatggttggctatttcgaactatgaaaactcattaaataaagattacctattctatattctttcatcaaatgtagtttattctcaatttctatctctaattagtggagctgttgtgaaaaacttgaatagtgataaagttgcttctattcttatccctctccccccactatccgaacaacaacgcataatagaagcaatcgaatcagctttagaaaaagtagatgaatatgctgaaagttataatagactagaacagctagataaagaatttccagataaactaaaaaaatctattcttcaatatgctatgcaaggaaaattagttgaacaagacccaaatgatgaatcagtcgaagttttacttgaaaaaatacgagcagaaaaacaaaaactatttgaagaaggcaagattaaaaagaaagatttggacatttctattgtttcccaaggagatgataactcttattatgaggaagtaccttgtgaaataccagaaagttgggaatgggtgaggttaaacgatataacctcctacattcaaagagggaagtctccaaaatattcaaatattcctatataccctgtgattgctcagaaatgtaatcaatggtctggcttttctattgacttagcaagatttattgatcccgaaacagttcatagttaccagaaagaaagattactaagggatggtgatttaatgtggaattcaacaggtctaggtacgttaggacgattagctatttaccatgaaaataaaaatccttatgcctgggctgttgcagatagccatgttacagttataagagtcttatcgggggttattaattgccatttcatctataattttctttcctctcctattgttcagtcagttattgaagaaaaagcgtcgggtagtacaaaacaaaaagaattattaacgaaaactataaaagaatatttaatccccctcccaccccttcctgaacaatccagaatcgttgataaaatcgaacaatttttcgcccatattgacgcactaatttag

SEQ ID NO: 37651 - DNA, 1824 bp, Streptococcus pneumoniae
atgtctaaaattatcggtattgacttaggtacaacaaactcagcagttgcagttcttgaaggaactgaaagcaaaatcatcgcaaacccagaagggaaccgcacaactccatctgtagtctcattcaaaaacggagaaatcatcgttggtgatgctgcaaaacgtcaagcagtcacaaacccagatacagttatctctatcaaatctaagatgggaacttctgaaaaagtttctgcaaatggaaaagaatacactccacaagaaatctcagctatgatccttcaatacttgaaaggctacgctgaagactaccttggtgagaaagtaaccaaagctgttatcacagttccagcttacttcaacgacgctcaacgtcaagcaacaaaagacgctggtaaaattgctggtcttgaagtagaacgtattgttaacgaaccaactgcagcagctcttgcttatggtttggacaagactgacaaagaagaaaaaatcttggtatttgaccttggtggtggtacattcgacgtctctatccttgaattgggtgacggtgtcttcgacgtattgtcaactgcaggggacaacaaacttggtggtgacgactttgaccaaaaaatcattgaccacttggtagcagaattcaagaaagaaaacggtatcgacttgtctactgacaagatggcaatgcaacgtttgaaagatgcggctgaaaaagcgaagaaagacctttctggtgtaacttcaacacaaatcagcttgccatttatcactgcaggtgaggctggacctcttcacttggaaatgactttgactcgtgcgaaatttgacgatttgactcgtgaccttgttgaacgtacaaaagttccagttcgtcaagccctttcggatgcaggtttgagcttgtcagaaatcgacgaagttatccttgttggtggttcaactcgtatccctgccgttgttgaagctgttaaagctgaaactggtaaagaaccaaacaaatcagtaaaccctgatgaagtagttgctatgggtgcggctatccaaggtggtgtgattactggtgatgtcaaggacgttgtccttcttgatgtaacgccattgtcacttggtatcgaaacaatgggtggagtatttacaaaacttatcgatcgcaacactacaatcccaacatctaaatcacaagtcttctcaacagcagcagacaaccaaccagccgttgatatccacgttcttcaaggtgaacgcccaatggcagcagataacaagactcttggacgcttccaattgactgatatcccagctgcacctcgtggaattcctcaaatcgaagtaacatttgacatcgacaagaacggtatcgtgtctgttaaggccaaagaccttggaactcaaaaagaacaaactattgtcatccaatcgaactcaggtttgactgacgaagaaatcgaccgcatgatgaaagatgcagaagcaaacgctgaagccgataagaaacgtaaagaagaagtagaccttcgtaatgaagtagaccaagcaatctttgcgactgaaaagacaatcaaggaaactgaaggtaaaggcttcgacgcagaacgtgacgctgcccaagctgcccttgatgaccttaagaaagctcaagaagacaacaacttggacgacatgaaagcaaaacttgaagcattgaacgaaaaagctcaaggacttgctgttaaactctacgaacaagccgcagcagcgcaacaagctcaagaaggagcagaaggcgcacaagcaacaggaaacgcaggcgatgacgtcgtagacggagagtttacggaaaagtaa

SEQ ID NO: 37652 - DNA, 795 bp, Streptococcus pneumoniae
atggatttgggtgataatgagctaacactgactcccatacctgggaaaagtggcaaggcttatatgggtagctatcctgatgggaagcgcatctttgtaaaaatgaacacctctccaatcctacctggtctagctagagaacaaattgctccacaattattatggagtcgtcgtttggcagatgggcgtgatatgtgtgctcaagaatggttgacaggcaagatattgaccccctatgatatgaatcgtaagcaaatcgtcaatattttaacccgtcttcatcgctcacgtccgttgatgacacaattgagtcgtttgggctatgccatggaaacacctgtagatttactacagtcttggcaagaaacggctccagatgctttgcgtaaaaatcattttatcagtgaagtgatggctgatttgcgtcagactattccaggatttagagaggaccatgcgaccattgtccatggagatgtacgacatagtaattggattgagacagatagtggcttgatttatttagtagattgggattcggttcgcttgaccgatcgcatgtttgatgtggcccatatgctctgccattatatttcagaacatcagtggaaggaatggttgacctactacggttacaagtacaatcaaacggtattaagtaaattgtattggtatggtcaattgtcttatttgagtcagatttccaagtattatatgaaccaagatttagaaaatgtcaatcgggagattcatggtttgcgtcatttccgagacaagtatggaaagagaagatga

SEQ ID NO: 37653 - DNA, 1137 bp, Streptococcus pneumoniae
atgagtaaagaaatgctagaggccttccgcattttggaagaagacaagagaatcaaaaaagaagatatcatcgacgcagtagtagagtcgcttcgttccgcttatcgcagacgctatggtcagtcagacagcgtagctattgacttcaacgaaaaaacaggtgactttacagtttatactgtccgtgaagttgttgatgaagcatttgatagccgtttggaaatcagcttgaaagatgctcttgccattaattcagcttatgaacttggagacaaaatcaagtttgaagaagcaccagctgagtttggtcgtgtagcagcccaatctgccaaacaaaccatcatggaaaaaatgcgcaagcaaacacgtgccatcacttacaatacttacaaagaacatgagcaagaaatcatgtctggtacagtagaacgctttgacaaccgctttatctatgtcaaccttggtagcatcgaagcccaattgtcaaaacaagaccaaattcctggagaagtttttgcttctcatgatcgtatcgaagtttatgtttacaaggttgaagacaaccctcgtggtgtgaacgtctttgttagccgtagccatccagaaatgatcaaacgtttgatggagcaagaaattccagaagtttatgatggaactgttgaaatcatgagcgtggctcgtgaagcaggtgaccgtacgaaggttgctgttcgtagccacaatccaaacgtggatgctatcggtacaatcgttggacgtggtggtgctaatatcaagaagattactagcaaattccacccagctcgttacgatgctaaaaatgaccgcatggtaccaatcgaagaaaatatcgatgttatcgagtgggtagcagatccagctgaatttatctacaatgccatcgctcctgctgaggttgaccaagttatctttgatgaaagcgacagcaaacgtgccttggtggttgttccagataacaagctttctcttgccattggtcgtcgtggacaaaacgtgcgcttggcggctcacttgactggttaccgtatcgatatcaagtctgctagcgaatttgaagccatggaagacgctgcttcagtagagttggaagtagaaaacgatactgtagaagaataa

SEQ ID NO: 37654 - DNA, 2793 bp, Streptococcus pneumoniae
ttgtctaagaaaagattgtacgaaatcgcaaaagaacttggaaaagaaagtaaagaagttgtagcgcgtgcaaaagagttgggcttggatgtgaaaagccactcatcaagtgtggaagaagctgtcgctgcaaaaattgctgccagctttaagcctgcagctgctccgaaagtagaagcaaaacctgcagcaccaaaagtaagtgcagaaaagaaaaccgaaaaatctgagccagctaaaccagctgtagctaaggaagaggcaaaaccggctgagccagttgctccgaaaacagaaaaagtagcagcgaaaccgcaaagccgtaatttcaaggctgagcgtgaagcccgtgctaaagagcaggcagaacgacgcaagcaaaataagggcaataaccgtgaccaacaacaaaacggaaaccgtcagaaaaacgatggccgtaatggtggaaaacaaggtcaaagcaaccgcgacaatcgtcgctttaatgaccaagctaagaagcagcaaggtcagcaaaaacgtagaaatgagcgccgtcagcaagaggacaaacgttcaaatcaagcggctccacgtattgactttaaagcccgtgcagcagccctaaaagcagagcaaaatgcagagtacgctcgttcaagtgaggaacgcttcaagcagtatcaggctgctaaagaagccttggctcaagctaacaaacgcaaggaaccagaggaaatctttgaagaagcggctaagttagctgaacaagcacagcaagttcaagcagtggttgaagtcgtccctgagaaaaaagaacctgcagtggatacacgtcgtaaaaaacaagctcgaccagacaaaaatcgtgacgattatgatcatgaagaagatggtcctagaaaacaacaaaagaatcgaagtagtcaaaatcaagtgagaaatcaaaagaatagtaactggaataacaacaaaaagaacaaaaaaggcaataacaagaacaaccgtaatcagactccaaaacctgttacggagcgtaaattccatgaattgccaacagaatttgaatatacagatggtatgaccgttgcggaaatcgcaaaacgtatcaaacgtgaaccagctgaaatcgttaagaaacttttcatgatgggtgtcatggccacacaaaaccaatccttagatggggaaacaattgaactcctcatggtggattacggtatcgaagccaaacaaaaggttgaagtggataatgctgacatcgaacgtttctttgtcgaagatggttatctcaatgaagatgaattggttgagcgtccaccagttgttactatcatgggacatgttgaccacggtaaaacaacccttttggatactcttcgtaactcacgtgttgcgacaggtgaagcaggtggtattactcagcatatcggtgcctaccaaatcgtggaaaatggtaagaagattaccttccttgatacaccaggacacgcggcctttacatcaatgcgtgcgcgtggtgcttctgttaccgatattacgatcttggtcgtagcggcagatgacggggttatgcctcagactattgaagccatcaaccactcaaaagcagctaacgttccaatcatcgtagccattaacaagattgataaaccaggtgctaacccagaacgcgttatcggtgaattggcagagcatggtgtgatgtcaaccgcttggggtggagattctgaatttgttgaaatctcagctaaattcaaccaaaatatcgaagaattgttggaaacagtccttcttgtagctgaaatccaagaactcaaggcagacccaacagtgcgtgcaatcggtacggttatcgaagcgcgcttggataaaggaaaaggtgcggtcgcaacccttcttgtacaacaaggtaccttgaatgttcaagacccaatcgttgtcggaaataccttcggtcgtgtccgtgctatgaccaacgaccttggtcgtcgtgttaaagttgctggaccatcaacaccagtctctatcacaggtttgaacgaagcaccgatggcgggtgaccactttgccgtttacgaggatgaaaaatctgcgcgtgcagcaggtgaagagcgtgccaaacgtgccctcatgaaacaacgtcaagctacccaacgtgttagccttgaaaacctctttgatacccttaaagctggggaactcaaatctgttaatgttatcatcaaggctgatgtacaaggttctgttgaagccctttctgcctcacttcaaaagattgacgtggaaggtgtcaaagtgactatcgtccactcagcggtcggtgctatcaacgaatcagacgtgacccttgccgaagcttcaaatgcctttatcgttggtttcaacgtacgccctacaccacaagctcgtcaacaagcagaagctgacgatgtggaaatccgtcttcacagcattatctacaaggttatcgaagagatggaagaagctatgaaagggatgcttgatccagaatttgaagaaaaagttattggtgaagcggttatccgtgaaaccttcaaggtgtctaaagtgggaactatcggtggatttatggttatcaacggtaaggttgcccgtgactctaaagtccgtgttatccgtgatggtgtcgttatctatgatggtgaactcgcaagcttgaaacactataaagacgacgttaaggaagttacaaacggccgtgaaggtggattgatgatcgacggctacaatgatattaagatggatgatgtgattgaggcgtatgtcatggaagaaatcaagagataa

SEQ ID NO: 37655 - DNA, 2652 bp, Streptococcus pneumoniae
atgtctaaagaactttcatctaaatacaatccagccgaggttgaggctggtcgttaccaaaaatggcttgatgctgatgttttcaagccttcaggcgatcaaaaggctaagccttattcaatcgttattccaccaccaaacgttacaggtaaacttcaccttggtcacgcttgggatacaactttgcaagatattatcatccgtcaaaaacgcatgcaaggttttgataccctttggcttcctgggatggaccacgcagggattgccactcaggctaaggttgaggagcgcttgcgtggtgagggcatttcccgctatgaccttggtcgtgagtctttcttgacgaaagtctgggaatggaaagacgaatatgccactaccatcaaggaacaatggggcaagatggggctctctgtagactattctcgtgagcgtttcactcttgacgaaggtttgtcaaaagctgttcgtaaggtctttgtggacctttacaagaaaggctggatctaccgtggtgagtttatcatcaactgggacccagcagctcgcacagccctttctgatattgaggtgattcacaaggatgtggaaggtgccttctaccacatgaattacatgctggaagatggttcacgcgcccttgaagttgctacaactcgtcctgagactatgtttggggacgttgcgattgcggttaatccagaagacccgcgctacaaggacttgattggtaaaaacgtcatccttccaatcgctaataaactcatcccaatcgttggagatgagcacgcagatcctgagtttggtactggtgtcgtgaaaatcacacctgcccacgatccaaatgacttcttggttggccaacgtcataacttgccacaagtcaacatcatgaacgacgacggaactatgaacgagcttgtctttgaattttcaggcatggatcgttttgaagctcgtaaggcagtcgttgctaagttggaagaaatcggtgcccttgtcaaaatcgaaaaacgtgtccacagtgttggtcactcagaacgtacaggtgtcgtagttgagccacgcttgtctactcaatggttcgtcaagatggaccaattggctaagaacgccattgccaaccaagacacagaggacaaggtcgaattctacccacctcgtttcaacgataccttccttcaatggatggaaaatgtccacgactgggttatctctcgtcagctctggtggggtcaccaaatccctgcttggtacaatgctgatggtgaaatgtatgtcggcgaagaagctccagaaggtgacggatggactcaggacgaagacgtcttggatacttggttcagttctgccctctggccattttcaaccatgggctggcctgaagtcgactcagaagactttaaacgttatttcccaacttcaaccttggtaacaggttacgacatcatcttcttctgggtgtctcgtatgatcttccagtcattggaattcacaggccgtcaaccattccaaaacgtccttatccacggtctcattcgtgacgagcaaggacgcaagatgtctaagtctctcggtaacgggattgacccaatggatgttatcgagaaatacggtgccgatgcccttcgatggttcctttcaaacggttctgcgccaggacaagacgtgcgtttctcttatgagaaaatggatgcttcatggaactttattaacaagatttggaacatttctcgctatatcctcatgaacaatggaggtttgacgctggatgtggcgcatgacaatgtcacaaaagttgcaacaggtgaggctggtaatgtgacggaccgctggattctccacaatctcaacgaaaccattgcaaaagttactgaaaactttgataagttcgagtttggtgtggctggtcatatcctttacaacttcatttgggaagaatttgccaactggtatgttgagttgaccaaggaagttctttacagcgacaatgaagacgataaggtaattactcgatctgttctcctctatacgctggataaaatccttcgtctccttcactcaataatgccgttcgtgacagaagaaatctttggtcagtacgctgaaggctctatcgtgacagcagcatacccaactgtcaacccagcctttgaggaccttgctgcccacactggtgtggaaagtctcaaagacttgatccgtgccgttcgtaatgcgcgtgcggaagtaaatgtagcaccaagcaaacctatcaccatccttgttaagactagcgatagtgacttggaagccttctttaacagcaatgtcaactacatcaaacgctttacaaatccagaacacttggaaatcgcatcaaccatccctgcacctgaactggctatgtcaagcgttattacaggagccgaaatcttcttgccactggtagacctcttgaatgtcgaagaagaattggcacgtctggaaaaagaacttgccaaatggcagaaagaactcgacatggttggcaaaaaactcagcaacgaacgcttcgtcgccaacgctaaaccagaagttgtccaaaaagaaaaagacaaacaagccgactaccaagccaagtatgatgtgaccgtagcacgtattgatgagatgaagaagttggtgaaataa

SEQ ID NO: 37656 - DNA, 804 bp, Streptococcus pneumoniae
atgcaaccaacttacaacattgacaatccaaacttgtcttatgaagcgaagcgtgatttatggcggataggttttggtctgcagaaagttgacaatctagtgccatcagcgtatatggaatctttggctgagaaacagtcccggggagaactgacttatgagcaggtttatgaggatgcaacggcttatcaccatactattgatgcaagtacggaagaggcagacttggtttctctacgtattgtagaactattgtctcgaagaggctttagctttagtcctgcgaccttacttgctattcataaggagttgtttcaagatatatttgaaccctctattccggtggggcaatttcgtcagaccaatatcacaaagaatgaacctgttttgaatggtgaaagtgttgtgtactctgattactccatgattcaaatgaccttagattatgattttaatcaggaaaaacaagttgcatatgcgacactaactcaggcggatgtggttaaacaaatccagcattttatttcaggaatctggcagattcatccatttcgcgaaggaaacactcggacagtaacggtctttttgattcagtatcttcgtgagtttggttttgatattgataatacaccatttcagcaacattccaaatattttcgtgatgccttggtattagataatgcaaagattttacagcgacgttctgagtttttaacagctttttttgaaaatctcttgctcggtggtcaaaatgatttgtcttcagaaaaaatgtatctagatttagacctcgatttttcataa

SEQ ID NO: 37657 - DNA, 108 bp, Streptococcus pneumoniae
ttggaacaagctattgtagactatattgattactacaacaataaacgaattaaggtaaaactaaaaggacttagccttgtgcaatacagaactaaatccttcggataa

SEQ ID NO: 37658 - DNA, 390 bp, Streptococcus pneumoniae
atggaaaagtgctacacagatgtgacagaatttgccattccagcaagtactcaaaagctttacttatcaccagttttagatggctttaacagcgaaattatcgcctataatctttcaacttcacccaacttagaacaagtgaagagtatgttagaacaggcctttacagagaaatactatgagaatacgattctccatagtgaccaaggctggcaatatcaacacgattcttatcatcggttcttagagagtaagggaattcaagcatccatgtcacgcaagggaaacagccaagacaacggtatgatggagtccttctttgggattctgaaatttatggctatgagaaaacatttaaatcacttaatcaattggaacaagctattgtag

SEQ ID NO: 37659 - DNA, 1839 bp, Streptococcus pneumoniae
atgagttataaagataaggtacaaaaaatcctcgatgtaattggaggtgaaaaaaatgtcaatagagttacccattgtgtaacacgtttaagattagaattaaaagatgaaaatttagtcaatgatgatgatgtgaagaagataccaggtgtaataggtattatgaaaaagaatggacaatatcaaattatacttggtaatgatgtagctaattattataaagaattcgttaaacttggcaattttgaatccgattcagttgttcaagggcacaaagggaatattttagaaagaatcattgagtatatcgctggttccatgactccaatcattccagcaatgttagggggaggtatgctgaaagtcttggtaattattttaccaatgcttggtatattgcaatcagattctcagactattgcttttttgacattttttggggatgctccatattatttcttaccgctgttattagcttattctgcatcacaaaaattaaaagtaacatctacattagctatgtctgtagcaggtgtacttctccatccaaattttgttcaaatggtgcaatcagggaatcctcttagtttatttggtgtacctgtgataccagctagttatggttcgtcagtcgttccaattattattatggtttggttgatgaaatatattgaaaaaatgattgctaaattaacaccagctgttactaagagttttttgcaacctacgctagtattattagtatcaagctgtattgccttagttgtagtcgggcctattggagtaattgttggtgaaggattatcaaatctagttgggcaaatgtatgatgtagctggatggcttacattagctattcttggtgctattatgccatttattgttatgactggaatgcattgggcttttgcacctatttttttggcggcatctattgctactccagacgtattaattcttccagcaatgttagggtcaaacttagctcaaggggctgcttcgatggctgttgcattaaagagtaaaaataataatacaaaacaaattgcttttgcagcaggtttctcagccttacttgcagggattaccgaacctgcattatatggtgtgactttaaaatataaaaaaccgctttatgcagctatgattggtggtggattagcgggattatttgcaggtcttactagtgttaaagcgtatctatttgctgtcccatctttgatagcgttgcctcaatttatttattctgatgtaccatcaaatattgtaaatgctttaattgtggcggttatttcggttgttattacctttgtattagcttatatatttggaatcgatgaagaagagagttctagcaatttagaagttaaagctggagtttcaaataaaaaaatgatattttctcctatatcaggagaaatcattccgttaagcgatgtccaggataaaacattttcagataaactaattggagacggagtagcgattattccaagtgaaggtaaggtttatgcaccatttgatgggaaaattacaaatatttttccgactaagcacgcaattggattgaagagtgatgagggtgttgagttactaattcatattggattagatactgttgagctaaaaggtcaaggttttattagtcatgtagaagaaggagacagagttttcaaaaatcagttgatttttgaaatggacttgaatttaatcaagactaaaggctacgaaacagttacaccagtaattgtaacgaataccaatgattttctagatgtattagtattacctaataatcagacaatcgagcattctaaggaattactggtaatattataa

SEQ ID NO: 37660 - DNA, 1128 bp, Streptococcus pneumoniae
atggtaccgcgtgtcaacgctccgagtggagtttttggcatgtggttttctttttatctacgagagactgatggaggaaatatgtcaactattgaagaacaattaaaagcgcttcgcgaagaaacgctgactagcttgaagcagattactgctggaaatgaaaaagagatgcaagatttgcgtgtctctgtccttggtaaaaagggttcgctcactgaaatcctcaaagggatgaaagatgtttctgctgagatgcgtccaatcatcgggaaacacgtcaatgaagctcgtgatgtcttgacagctgcttttgaagaaacagctaagctcttggaagaaaagaaagtcgcggctcaactggctagcgagagtatcgatgtgacgcttccaggtcgtccagttgcgactggtcaccgtcacgttttgacacaaaccagtgaagaaatcgaagatatcttcatcggtatgggttatcaagtcgtggatggttttgaagtggagcaagactactataactttgaacgtatgaaccttccaaaagaccacccagctcgtgatatgcaggatactttctatatcactgaagaaatcttgctccgtacccacacgtctccagttcaggcgcgtgctatggatgcccatgatttttctaaaggtcctttgaagatgatctcgccagggcgtgtcttccgtcgcgatacggacgatgcgacccacagtcaccaattccaccaaatcgaaggcttggtagttgggaaaaatatctctatggctgatcttcaaggaacgcttcagttgattgtccaaaaaatgtttggtgaagagcgtcaaattcgtttgcgtccatcttacttcccattcacagagccatctgttgaggtggatgtttcttgcttcaagtgtggtggagaaggctgtaacgtatgtaagaaaacaggttggatcgaaattatgggagccggtatggttcacccacgtgtccttgaaatgagtggtatcgatgcgactgtatactctggttttgcctttggtcttggacaagagcgtgtagctatgctccgttatggaatcaacgatatccgtggattctaccaaggagatgtccgcttctcagaacagtttaaataa

SEQ ID NO: 37661 - DNA, 510 bp, Streptococcus pneumoniae
atgattagaaaagtagaaatggcagatgttgaggtgttggctaaaattgccaaacaagcctttcgtgaaacctttgcatatgataatacggaagagcagttacaggaatactttgaagaggcttatagtctgaaaactttgtcaactgagttgggaaatcctgactctgaaacctatttcattatgcatgaggaggagatagctggttttctcaaagtcaactggggaagtgctcaaactgagagagaattagaggacgcttttgaaattcaacgcctctatgtgctacaaaaattccaaggatttggactaggtaagcaactgtttgaattcgcacttgaacttgctacaaaaaatagtttttcttgggcttggctaggtgtttgggagcataatacaaaagctcaagcgttttataatcgatatggttttgaaaaatttagccaacatcattttatggttggtcaaaaagtagatacggattggttactgagaaagaaattaaggtaa

SEQ ID NO: 37662 - DNA, 2403 bp, Streptococcus pneumoniae
atgcttatatcttataaatggttaaaagaattggtggacattgatgtgccatcacaagagttggctgaaaaaatgtcaactacaggaatcgaggtagagggtgtcgaatcaccagctgctggtctctcaaaaattgtcgtcggtgaggtcttgtcttgcgaagatgtgccagagactcacctccatgtttgtcaggttaacgttggcgaagaagagcgtcagatcgtttgtggtgccccaaatgtgcgtgctgggatcaaggtcatggtggctcttccaggagctcgtatcgctgataactacaaaatcaaaaaaggaaaaatccgtggtttggagtcacttggaatgatctgttcacttggtgaattgggaatttctgactcagttgtgcctaaggaattcgcagatggcatccaaatcttgcctgaagatgccgtgccaggtgaggaagtcttttcttacctagacttggatgatgaaatcatcgaactttccatcacaccaaaccgtgcagatgccctttctatgtgtggagtggctcacgaagtggcagccatctatgacaaggcagtcaactttaaagaatttactctaacagaaactaatgaagctgcggcagatgccctttctgtcagcattgagacagacaaggcgccttactatgcagctcgtatcttggacaatgtgaccatcgcaccaagtccacaatggttgcaaaaccttctcatgaacgaaggaatccgtcccatcaataacgtagtggacgtgaccaactacatcctgctctattttggtcaaccaatgcatgcctttgacttggataactttgaagggactgacatccgtgtgcgtgaagcgcgtgctggtgaaaaattggtgaccttggacggtgaagaacgtgacttggacgtgaatgacctagtcatcactgtcgcagacaagccagtagcccttgcaggtgtcatgggtggtcaagcaacagaaatctctgaaaaatctagtcgtgttgtccttgaagctgctgttttcaatggcaaatctatccgtaagacaagtggtcgcctgaaccttcgttctgagtcatcttctcgctttgaaaaaggaattaatgtggcaacagttaatgaagcccttgatgcggcagctagcctgattgcggaacttgcaggtgcgacggtgcgtaagggcatcgtttcagcgggtgagcttgatacttcagatgtagaagtttcttcaacccttgctgatgttaaccgtgtcctcggaactgagctgtcttatgctgatgtagaagacgtcttccgtcgtcttggctttggtctttctggaaatgcagacagctttacagtcagagtcccacgtcgtcgttgggatatcacaatcgaagctgacctctttgaagaaattgctcgtatctatggttatgaccgcttgccaactagtctaccaaaagacgatggtacagcaggtgaattgacagccacacaaaaactccgccgtcaagttcgtactattgctgaaggagcaggtttgacagaaatcatcacctatactctaacaactcctgaaaaagcagttgagtttacggctcaaccaagtaaccttacggaactcatgtggccaatgactgtggatcgttcagtcctccgtcaaaatatgatttcaggtatccttgataccgttgcctacaacgtggctcgtaagaataaaaacttggccctttacgagattggaaaagtctttgaacaaacaggtaatccaaaagaagaacttccaaatgaaatcaacagttttgcctttgccttgacaggcttggttgctgaaaaagatttccaaacagcagcagttccagttgatttcttctatgctaagggaatccttgaagccctatttactcgtttgggactccaagtaacctatacagcaacatctgaaatcgctagccttcatccaggtcgtacagccgtgatttcactcggtgaccaagttcttggtttccttggccaagtgcatccagtcactgccaaggcttacgatattccagaaacgtatgtggctgagcttaacctttcagctatcgaagctgcgcttcagccagcgactccatttgtagaaatcaccaaattcccggcagtcagccgtgacgttgcccttctcctcaaggcagaagtgactcatcaagaagttgtagatgctatccaagctgccggcgtgaaacgtttgacagatatcaaactctttgacgtcttctcaggtgagaaattgggacttggtatgaagtcaatggcttatagcttgaccttccaaaatccagaagatagcttaacggacgaagaagtcgcacgctatatggaaaaaatccaagcatcgctcgaagaaaaagtcaatgcagaagtgcgttaa

SEQ ID NO: 37663 - DNA, 867 bp, Streptococcus pneumoniae
atgtcacgccaaacaccgtcactctcatttgaagtgttccctccaaccccagccgtgggtaatgataacattatttcagccttgcaggatatgcaggagttggctccccattttatcagtgtaactgccagcaataataaatttaatatcaaggaaacgacggttcgtttggctgactttatccaaaatgatttggcgattccgaccattgcccacttgccagctatttatctaactaaggacaaggttgctgaaactattgctgacttggacaaagttggggtgcagaaaatcttggctcttcgtggggatattattccagacgtggaaccacaaaaggatttccgctatgcaaccgacttgattgagcttatcaaggaacgagcccctcactttgatattattggagcttgctatccagaagggcatccagattcgccaaatcagatttcagatattcaaaatcttaagaagaaagtggatgcaggctgttcgagcctcgtaactcagctcttctttgacaatgagcgcttctatgattttcaggacaagtgcatcttggctgggattgatgttcccattcatgcaggaattatgccaattctgaatcgaaatcaggctctccgactcttgaagacttgtgagaatatccatcttccacgcaaatttaaagccatcttagacaagtatgagcatgaccctgagtcgctcagagcagcaggacttgcctatgcagtggaccaaatcgtggacttggtaactcaggatattgccggtgtgcatctctatacgatgaataatgctgatacagcaaaatacatccatcaagcaacccatgccttgtttaatcaccagtctctaggataa

SEQ ID NO: 37664 - DNA, 2328 bp, Streptococcus pneumoniae
ttgtcttcatcgaagacttcgtcagtttcctatttttactttgcttttgacgtccttggtatcttgatctttgtaggcaaggcgtataatttcatcaatccaaaggggattaaaatggcaaaacaagtgtttcaaacgacttttgcgggtcgtgagttaattgtagaaactggtcaggttgctaagcaagcaaatggctctgttgtcgtacgttacggtgagtcaactgtcttgactgctgccgttatgtctaagaaaatggcaactggggatttcttcccactccaagtcaactacgaagaaaaaatgtatgcggctgggaagtttcctggtggctttatgaaacgtgaaggacgtccttcaacagatgcgaccttgacagcgcgtttgattgaccgtccgattcgtcctatgtttgcggaaggtttccgtaatgaagtccaagtcatcaatacagtgctttcttatgatgaaaatgcatctgcaccaatggctgctatgtttggttcatctttggcactgtctatttcagatattccatttgacggaccaattgctggggtacaagtgggatatgtagatggccaaatcatcatcaacccaagtcaagaacaagcagagcaatctcttcttgaattgacagtagctggaaccaagcacgctatcaacatggtagagtctggtgccaaagaattgtcagaagaaatcatgttggaagcgcttcttaaagggcacgaagctgtcaaagaattgattgccttccaagaagaaatcgttgctgctgtcggtaaagaaaaagcagaagtggaattgcttcacgtggatgctgaattgcaagctgaaatcattgcagcctacaacagtgacctccaaaaggcagttcaagtagaagagaaattggcccgtgaagctgcaactcaagcagtgaaagaccaagtgactgccgtttacgaagaaaaatatgcgaaccacgaagaatttgaccgtattatgcgtgatgtggctgaaatcttggaacaaatggaacacgcagaagtgcgacgtttaattacagaagacaaggtgcgtcctgatggtcgtaaggtcgatgaaatccgtcctttggatgcggttgttgacttccttcctcgtgtacatggttcaggtctctttactcgtgggcaaactcaagctctttcagtcttgaccttggctccgatgggagaaactcaaatcattgatggtttggatccagagtacaagaaacgctttatgcaccactataacttccctcaatattctgtaggggaaacaggtcgttacggtgcgccaggtcgtcgtgaaatcggtcacggtgcccttggtgagcgtgctcttgctcaagtcttgccaagcttggaagaattcccatacgctatccgtctagtagcagaagttttggaatcaaacggttcttcatctcaagcttctatctgtgcgggaactcttgcccttatggctggtggtgtgccaatcaaggcgccagtagctggtattgctatgggacttatctcagatggaaataactacacagtattgacagatatccaaggtttggaagatcactttggagatatggacttcaaggttgcaggtactcgtgatgggattacagcccttcaaatggatatcaagattcaagggattactgcagaaatcttgacggaggctcttgctcaagccaagaaagcgcgttttgaaatccttgatgtcattgaagcaaccattccagaagttcgtccagaattggctccaactgctccgaaaattgatacgatcaagattgatgtggacaagattaagattgtcatcggtaagggtggagaaaccatcgacaagattatcgctgaaacaggtgttaagattgatatagacgaagaaggaaatgtgtctatctactctagtgaccaagatgctattaaccgtgccaaagaaattattgctggtttggttcgtgaagccaaagtggatgaagtttaccgtgctaaagtcgttcgtatcgagaaatttggtgcctttgttaacctctttgataagacagatgcccttgttcatatctctgagatggcttggactcgtaccaatcgtgtagaggatttggtagaaatcggggatgaagttgatgttaaggttatcaaaattgatgaaaaaggccgtatcgatgcctctatgaaggctcttctacctcgtccgccaaaacctgagcatgatgaaaaaggtgaaaagtctgagcgccctcaccgcccacgtcatcaaaaggattacaaacctaagaaagaatttacagaaacaccaaaagattcagaataa

SEQ ID NO: 37665 - DNA, 618 bp, Streptococcus pneumoniae
atggggtggtggcgcgaaaccattgatattgtaaaagaaaatgatccagcggcccgcaccactttggaggttttgctgacttatccaggtgtcaaggccttggcggcccaccgtctctcgcattttctctggaagcacggcttcaaactattagctcgtatgtacagtcagttttggcgcttttggactcagattgagattcatccaggagcccagattgattcaggtgtttttattgaccatggttctggtctggtgattggagagacagcgattgttgaaaaaggcgttcttctctatcacggagtgactctcgggggaacagggaaagactgtggcaaacgccatccgactgtacgaaagggagctctcatatcagcccatgcccaagttatcgggcctgtggaaattggtgaaaatgccaaggtcggtgctgcagcagttgtcgtagcagatgtacctagtgacgtgacggttgtcggtattccggccaagattgtccgtcttcatggtaagaaagatgagcctgtcattcacgaagtcgaagaaaaacgagagtattatgtcaataaactcgagcaggctaaagatgccagtcacagatcgtctggtttgtag

SEQ ID NO: 37666 - DNA, 1344 bp, Streptococcus pneumoniae
atgattaaaatctatgacaccatgtctcgtgatttgcgagaatttgtcccgattgaggacggcaagatcaagatgtatgtttgtgggccaacggtgtacaactatatccacgtaggaaacgcccgttcgacggtagcttttgatacgattcgtcgctattttgagtaccgtgggtataaggttgcctatatttccaattttacagatgtggatgataagattatcaaccgtgccagggaagaaggtatcacgcctcaggaggttgcggataagtacatcgctgcctttcgtgaggatgtgacggccttaggcgtgaaacctgcgactcgccatccgcgtgtagtggagtttatggcagacatcatccgttttgtggaagacttgatcgagagaggctttgcctatgagagtcaaggggatgtctatttccgtgtagaaaaatcccacaactatgctaaattggctaataaaaccttggaagatttggagctaggtgcttcaggtcgtaccgatgaagaaacggctcgtaaggaaaatcctgtagattttgctctatggaaatcttccaaaccaggtgagatttcttgggatagtccttggggacctggacgtccgggttggcatattgagtgttcagtcatgtcgacagagattttaggtgataccattgatatccacggtggtggagctgacctagagtttccacaccacaccaatgaaattgcccaatctgaagctaaaacaggcaaggcttttgctaactactggatgcacaatggctttgtcaatatcgacaatgtcaaaatgtctaagtccttgggtaacttcattacggtacacgatgcccttaaaactcttgatgggcaagtacttcgtttcttctttgcgacccagcactaccgtaagcctatcaacttcacggaaaaggcagttcgcgatgccgagaccaatctcaagtatctgaagaatacttacgaacaaccatttacaggaaacgtggatgcccaagagttacaaaactttaaagataagtttgtagcagctatggatgaagattttaatgctgccaacggtatcacagttgtctttgaaatggccaaatggatcaactcagggaactatgatgcaagtgtcaagcaagctcttgcagatatgttagaaatttttggaattgtctttgttgaggaagttttggatgcagagattgaagacttgattcaaaaacgccaagaggcgcgtgccaatcgagactttgagacagcagaccaaatccgtgaccaattggttactcaaggaattaagctccttgataccaaggatggagtgaggtggacacgtgattga

SEQ ID NO: 37667 - DNA, 885 bp, Streptococcus pneumoniae
atgagggaaaaagaactacaagactggtttcctgaggctcggatttcagaccaaccagtagagaaagagggctatctcacgctccctttagcttctcagcagtggattttgctggaggaagctgggctcagcgagcgtgaaaagcagttggttgcccttttgacccagcaggagcaggctcgttcgctaaacccttggtattcctatctggttgaaggcaagggacaggcaccgcaagtttttaaaaagattcagttggtttattgccatctttcttattttcagcaggaaaatctggcttcttggctagatatgatgcggactctttttccgaattgtcagacagtgctacaggtcggatctcaggattatgttttcgtgcttcaacaagacaaatacacttctgtaagagatattttaagtgatacgattgaagcggttgagtatgactttggacttcgtctttctatcatgttgggtcaggtttggtctcagacgggacatcaagccctatcagacttaatcaaagctgagcgggatttgttcaagacatggtggcgtcagggtcaccaaggtgttcatactttttctcagctctatctttggagtatgggagaaagactcgtggacttgaagccaatcaaggaatgtctacaccagatgattttggatcaagatcagattcaggaaatcattctctctctttgggaaaatagtgctgttctcactaaaacagcccagcaactctatctgcaccgcaattctctccaatacaagattgataaatgggaagagttgacagggcttcagttgaaagagttgaccgacctgaccttgtgttatcaattgattttaggttctttgtcaactatagttggtttgtaa

SEQ ID NO: 37668 - DNA, 882 bp, Streptococcus pneumoniae
atggcaatcgtttcagcagaaaaatttgtccaagcagcccgtgacaacggttatgcagttggtggatttaacacaaacaaccttgagtggactcaagctatcttgcgcgcagcagaagctaaaaaagctccagttttgatccaaacttcaatgggtgctgctaaatacatgggtggttacaaagttgctcgcaacttgatcgctaaccttgttgaatcaatgggtatcactgtaccagtagctatccaccttgaccacggtcactacgaagatgcacttgagtgtatcgaagttggttatacttcaatcatgtttgacggttcacaccttccagttgaagaaaaccttaaattggctaaagaagttgttgaaaaagcacacgctaaaggtatctcagtagaagctgaagttggtactatcggtggtgaagaagacggaatcatcggtaaaggtgaattggctccaatcgaagacgctaaagcaatggttgaaactggtatcgacttcttggcagctggtatcggtaacatccacggcccttacccagtaaactgggaaggtcttgaccttgaccacttgcaaaaattgacagaagctcttccaggattcccaatcgtattgcacggtggatcaggtattcctgatgagcaaatccaagcagctatcaaacttggtgttgccaaagttaacgttaacacagaatgccaaatcgcattcgctaacgcaactcgtaaatttgctcgtgactacgaagcaaacgaagcagaatacgacaagaaaaaactcttcgacccacgtaaattcttggctgacggtgtaaaagctatccaagcatcggttgaagaacgtatcgacgtattcggttcagaaggtaaagcataa

SEQ ID NO: 37669 - DNA, 2235 bp, Streptococcus pneumoniae
gtggatgtctttttgataacacctacttatgaatggcagtttgccctgcaggtagaagatgcggattttacaaagatagccaagaaggctggactgggtcctgaggtggctcggttattgtttgagagagggattcaggaccaagaaagtctgaagaagtttttagaaccttccttggaggacttacatgatgcttatctgctccatgatatggacaaggcagtggagcggattcgtcaggctattgaagaaggggaaaatattctcgtttatggagactatgatgcggatggcatgacttcggcttctattgtgaaggaaagtttggaacaacttggtgctgagtgccgagtttacctgccaaatcgttttaccgatggctatggccctaatgctagtgtttataaatactttatcgagcaagaaggaatttccttgattgtgacggtggacaatggggttgctggtcatgaggctattgcattggctcagtctatgggagtagatgtcattgtgacagaccatcattccatgcctgaaaccctgccagatgcttatgctattgtccatcctgaacatccagatgcggattatccttttaaatatttggctggttgtggagttgctttcaagttggcttgtgccctgttagaagaagtgcaagtggaattgcttgatttggtcgctattggaactattgcagatatggtgagtctgacggatgaaaatcgtatcttagttcaatatggtctggaaatgttgggtcatacccagcgcattggtctgcaagaaatgctggacatggctgggattgctgccaacgaagtaacagaagaaacggttggtttccagattgctcctcgtttgaatgccttgggtcgcttggatgatcccaatcctgccattgatttgttgactggatttgatgatgaggaagcgcatgagattgcccttatgattcaccagaaaaacgaagagcgcaaggaaatcgttcagtctatctatgaagaagccaagaccatggtggatcctgagaagaaggttcaggtcttggccaaggaaggctggaatcctggggttctaggaatcgtggctggtcgtttattggaagaattgggacagacagtcattgttcttaatatagaagacggtcgtgccaagggcagtgctcgtagtgtggaagcggtcgatatttttgaagctctggatccccatcgagacctcttcatcgcctttggaggtcatgcaggtgcagcgggtatgacgctggaagttgagcaactctcagatttatctcaggttttggaagattatgttcgtgaaaaaggtgcagatgctggtggcaagaataagttaaacctagatgaagagttggatttggaggcacttagcttggaaacggtcaaaagttttgaacgtttagctccttttggaatggataatcagaaacctattttttatatcaagaattttcaggtcgaaagtgctcgtactatgggggcaggtaatgcccatctaaagctgaaaatttccaagggtgaggcgagttttgaagtggtagcctttggtcaaggcagatgggcgacagagttttctcaaaccaagaatctagagttagcggttaaattgtctgtcaaccaatggaatggccaaactgctctccagttgatgatggtggatgcgcgagtggaaggtgttcaactttttaacattcgtggaaaaaatgcagtcttgccagaaggtgttccagtcttggattttcctggagaactgccaaatcttgcggctagtgaagctgttgtcgtaaaaaacattccagaggatattactcagctgaagaccatttttcaggaacagcatttctctgctgtctatttcaaaaatgatattgacaaggcttattatctgacaggttatgggactagagatcagtttgccaaattgtacaagactatttaccagttcccagagtttgatattcgctacaagctgaaagatttggctgcatatcttaatattcaacaaatcttgctggtcaagatgattcaagtatttgaagaactaggctttgtgacgataaaagatggtgtgatgacagtcaataaagaggcgccaaagcgggagataggagaaagtcaaatttaccaaaatctcaaacaaaccgttaaagaccaagaaatgatggcgctgggtacggtgcaagaaatttatgattttttgatggaaaaagagtag

SEQ ID NO: 37670 - DNA, 1662 bp, Streptococcus pneumoniae
atgagtaatatcagtttaacaacacttggtggtgtgcgtgagaatggaaaaaatatgtacattgctgaaattggagagtccatttttgttttgaatgtagggttaaaatatcctgaaaatgaacaattaggggtcgatgtggtgattccaaacatggattacctttttgaaaatagcgaccgtattgctggggttttcttgacccacgggcatgcggatgccattggtgctctaccttatctcttggcagaggctaaagttcctgtatttgggtctgagttgaccattgagttggcaaagctctttgtcaaaggaaatgatgccgttaagaaatttaatgatttccatgtcattgatgagaatacggagattgattttggtgggacagtggtttccttcttccctacgacttactccgttccagagagtctgggaattgtcttgaagacatcggaaggaagcatcgtttatacaggtgacttcaaatttgaccaaacggctagtgaatcttatgcaactgattttgctcgtttggcagagattggtcgtgacggcgtcctggctctcctcagtgattcggccaatgcagacagcaatattcaggtggctagtgaaagtgaagttagggatgaaattacccaaactattgctgactgggaaggtcgtatcatcgttgcagctgtttccagtaatctttctcgtattcagcagatttttgacgctgcggataaaacaggtcgacgtatcgtcttgacaggatttgatattgaaaatatcgtccgcacagcgattcgtcttaagaagttgtctttagccaacgaaattctcttgattaagcctaaagatatgtctcgctttgaagaccatgagttgattattcttgagacaggtcgtatgggtgaacctatcaatggacttcgtaagatgtcgattggtcgccatcgttatgtagaaatcaaggatggggacctggtctatattgctacggctccgtctattgctaaagaagcctttgttgcgcgtgtggaaaatatgatttatcaggcaggtggggttgtcaaattgattacccaaagtttacatgtatcagggcacggaaatgtgcgtgatttgcagctgatgatcaatcttttgcaacctaagtacctcttccctgtccaaggggagtatcgtgagttggatgctcacgctaaggctgccatggcagttgggatgttgccagaacgcatcttcattcctaaaaaggggacgaccatggcttacgagaatggagactttgttccagctggatcggtttcagcaggagatatcttgattgatgggaatgccattggtgatgttggaaatgttgttcttcgtgaccgtaaggtcttgtcagaggatggaattttcatcgtggctattacagtcaaccgtcgtgagaagaaaattgtggctagagctcgtgttcacacgcgtggatttgtttatctcaagaagagtcgcgatattctccgtgaaagttcagaattgattaaccaaacggtagaagagtatcttcaaggagatgactttgactgggcagatctcaaaggtaaggttcgtgacaatctgaccaagtacctctttgatcaaaccaagcgtcgcccagccattttaccagtagtcatggaagcaaaataa

SEQ ID NO: 37671 - DNA, 1221 bp, Streptococcus pneumoniae
atgtaccgttatcaaattggcattcccacattagaatatgatcagtttgtcaaagaacatgaattagccaatgtattacaaagtagtgcttgggaggaagttaagtctaattggcaacatgagaagtttggtgtttacagggaagaaaaattactggcgacagctagtattttgattagaactcttccgctaggctataaaatgttttacatcccaagaggacctatattggattatggggataaagaactcttgaattttgccattcagtctattaagtcctatgctcgcagtaagagagtggtttttgtgacttttgacccaagtatttgcctatctcaaagtttaatcaatcaggaaaagacagaatttcctgaaaatctggctattattgatagtttgcaacaaatgggagtaaggtggtcaggaaaaacggaggaaatgggagacaccattcaacctcgtattcaggcgaaaatatacaaggaaaattttgaagaagataaactttccaagtcaacaaaacaggctattcgaacagcacgaaacaaagggcttgagattcaatatggtggactggaactattagattcattttcggagttgatgaaaaaaactgagaagcgaaaagagattcatttgaggaatgaagcctattataaaaaattgttagataattttaaggacaaggcctatatcaccttggccaccttggatgtttctaaacgttcgcaagaattagaagaacagttagcgaaaaatagagccttggaagagacctttactgagtcgactcgaacttcaaaagtagaagcgcagaagaaggaaaaagaacgtttgttagaggaattgaccttcttgcaggaatatatagatgtaggtcaagcgagagttcctttagcggctactttgagtttggaatttggtactacctctgtcaatatatatgctggtatggatgatgattttaaacgttacaatgcaccaattttaacatggtatgaaacggctcgctatgcctttgagcgaggtatggtctggcaaaatttaggtggtgttgaaaactctctcaatggtggactttatcattttaaggaaaaatttaatccaacgattgaagaatacttgggtgaatttacaatgcccactcatcctctctatcctctgttaagacttgctcttgatttccgtaaaacattaagaaaaaaacatagaaagtaa

SEQ ID NO: 37672 - DNA, 1401 bp, Streptococcus pneumoniae
atgatagcaattgattttacagcagaagtagaaaaacgcaaagaagacctcttggctgacttgtttagtcttttggaaatcaactcagaacgtgatgatagcaaggctgatgcccaacatccatttggacctggtccagtaaaagccttggaaaaattccttgaaatcgcagaccgtgatggttatccaactaaaaatgttgataactatgcaggacattttgagtttggtgatggagaagaagttctcggaatctttgcccatatggacgtggttccagctggtagcggttgggatacagatccttacacaccaactatcaaagatggtcgcctttatgcgcgcggggcttcggacgataagggtcctacaacagcttgttactatggtttgaaaatcatcaaagaattgggtcttccaacttctaagaaagttcgcttcatcgttggaacagacgaagaatcaggctgggcagacatggactactactttgagcacgtaggacttgccaaaccagatttcggtttctcaccagatgctgaatttccaatcatcaatggtgaaaaaggaaatatcacggaatacctccactttgcaggagaaaatacaggtgctgcccgtcttcacagctttacaggtggtttacgtgaaaatatggtaccagaatcagcaacagcagtcgtttcaggtgatttggctgacttgcaagctaaactagatgcctttgttgcagaacacaaacttagaggagaactccaagaagaagctggcaaatacaaggtgacgatcattggtaaatcagcccacggtgctatgcctgcttcaggtgtcaatggcgcaacttaccttgccctcttcctcagccagtttggctttgctggtccagccaaagactaccttgacatcgcaggtaaaattctcttgaacgatcatgagggtgaaaatctcaagattgctcatgtggatgaaaagatgggtgctctttctatgaatgccggcgtcttccgcttcgatgaaacaagtgctgataataccattgcccttaacatccgctatccaaaaggaacaagtccagaacaaatcaagtcaatcctagaaaacttgccagttgcttctgtcagtctatcagaacatggtcatacccctcactatgtgccaatggaagatccacttgtgcaaaccttgttgaatgtctatgaaaaacaaacaggcctacaaggtcatgaacaagtcatcggtggtggaacctttggtcgcttgttagagcgcggagttgcctatggtgctatgttcccagactcaattgataccatgcaccaagccaatgaatttattgccttggacgatctcttccgagcagcagcaatttatgccgaagctatttacgaattgatcaaataa

SEQ ID NO: 37673 - DNA, 1038 bp, Streptococcus pneumoniae
atgaatcaaacagtagaatatatcaaagaactgacagccattgcgtcgccaacaggctttactcgtgagattgcggactatttagtcaagactctagaaggttttggttaccagccggttcgcacatccaagggcggtgtcaatgtaactattaaaggtcaaaatgatgagcaacatcgctatgtgactgcccatgtagatacgcttggtgctattgtccgtgctgtcaaaccagacggccgtctcaaaatggaccgtatcggtggctttccttggaacatgattgaaggagaaaactgtaccattcatgtggctagcacaggtgaaaaagtatcaggaaccatcctcatccaccaaacttcttgccatgtctataaggatgcaggaactgcagaacgcacgcaagacaatatggaagtgcgtttggacgccaaagtaactagtgaaaaagaaactcgtgctcttggcattgaggtcggtgattttatcagttttgacccacgaactgtcgtgacagagacaggttttatcaagtctcgccatttggatgacaaggtcagtgcggcgattttgctcaatctccttcgcatttataaggaagagaagattgaattgcccgtaacaactcattttgctttttcagtctttgaagaagtgggacacggtgcaaactctaacattcctgctcaggtagtagaatatctggctgtggatatgggagccatgggagatgaccagcaaacagacgaatatacagtgtctatctgtgtcaaggatgcttctggaccttatcactatgacttccgtcaacatttggtggctttggcgaaagagcaagatattccatttaagctggatatctatccattttatggttcggacgcttcagcggctatgtctgcaggggcagaagtcaaacacgcccttctcggtgctggtatagagtctagccattcctatgagcgtacccatattgactcggtgatcgcaacagaacgaatggtcgatgcttatcttaagagcacgttggtggactaa

SEQ ID NO: 37674 - DNA, 426 bp, Streptococcus pneumoniae
atggctaaaaaagtcgaaaaacttgtaaaattgcaaatccctgctggtaaagctacaccagctccaccggttggacctgctcttggtcaagctggtatcaacatcatgggattcacaaaagagttcaacgctcgtacagctgaccaagctggtatgatcattccagttgttatctcagtttacgaagataaatcatttactttcgttacgaaaacaccaccagctgctgttcttttgaaaaaagctgcaggtgttgaaaaaggatcaggtacacctaataaaactaaagttgctacagttactcgtgcacaagtacaagaaattgcagaaactaagatgccagatttgaacgcagcaaacgtagagtctgcaatgcgtatgatcgaaggtactgctcgttctatgggattcactgttgttgactaa

SEQ ID NO: 37675 - DNA, 690 bp, Streptococcus pneumoniae
atggctaaaaaaagcaaacaacttcgtgctgctcttgagaaaatcgacagcacaaaagcatacagtgtagaagaagctgtagcacttgcaaaagaaactaactttgcaaaatttgatgcaactgtagaagttgcttacaacttgaacatcgacgttaaaaaagctgaccaacaaatccgtggagcaatggtattgccaaacggtactggtaaaacttcacgtgttcttgttttcgcacgtggtgcaaaagctgaagaagcaaaagctgctggtgcagactttgttggtgaagatgaccttgttgctaaaatcaacgacggttggttggacttcgacgtagttatcgctacacctgatatgatggctcttgttggacgtcttggacgtgtccttggaccacgtaacttgatgccaaaccctaaaactggtactgtaacaatggatgttgctaaagcagttgaagagtctaaaggtggtaaaatcacttaccgtgctgaccgtgcaggtaacgttcaagcaatcatcggtaaagtatcatttgaagctgaaaaattggttgaaaactttaaagctttcaacgaaacaatccaaaaagcaaaaccagctacagctaaaggaacttacgtaacaaacttgactatcacaactactcaaggtgttggtatcaaagttgacgtaaactcactttaa

SEQ ID NO: 37676 - DNA, 2055 bp, Streptococcus pneumoniae
gtggaattactgatttacctcatcctatttttactggttttgattgtctcaagtacaaccaataagctcctgccctttttgcctctccctttggtgcaaattcttttgggaattgtgattggtctctttttacccaataccgactttcacctcaatacggagttgtttttggccctggttatcggacccttgcttttccgagaggctgaagaagcagatgttacggctattttaaaacactggcgaatcattgtttatctcatatttccagtgatttttatctcgaccctgagtttgggtggcttggcccatcttctttggttcagccttcccttggcagcttgcttggctgttggggcagcccttggtcctacggacttggtggcctttgcctctctttcggagcgttttagctttcctaagcgcgtgtccaatattcttaagggcgaaggactcttgaatgatgcttctggtttggtggcttttcaggtagctttgacagcttggacaactggagctttttctctggggcaagctagcagttcgctcatcttttcaatcctaggcggttttttaattggatttttaacagccatgaccaaccgcttcctccataccttcttgctaagtgtgcgcgcaacggatattgccagtgaacttttattagaattaagtttgcctctagtgaccttctttctggcagaagaagttcatgtttcagggattattgccgtcgtagttgctggaattttaaaggcaagtcgtttcaagaaaatcacgctcctcgaagcccaagtggatacggtgaccgagacggtctggcatacagtgacctttatgctcaacggttctgtctttgtgattttagggatggagttggaaatgatagcagaacctatcttgaccaatccaatctataatcctctacttttattgctatctctcatcgcccttacctttgtcctctttgtcattcgttttattatgatctatggctattatgcctatagaacccgacgcctcaagaaaaagctaaataagtatatgaaggacatgtttctcttgaccttttcaggtgttaagggaacggtgtcgattgctacgattctcttgataccaagtaatctagaacaagagtatcctcttttgcttttccttgttgcaggtgtgacgcttgtcagctttttaacaggtctcttgatcttgcctcatctttctgatgaagaggaagaaagcaaggattatctcatgcatatcgccattttgaatgaagtaacgctagagttggaaaaagagttggaagacaccagaaataaacttcccctctatgcggctattgacaattatcatggacgtattgaaaatctcattttaagccaagaaaaccaggatgatcaagaagactgggctgctttgaaactcttgattcttagtattgaaagtgatggtttggaacaggcctatgaagaggggaacattagcaatcgtgcttaccgagtttaccaacgttatctgaaaaatatagaacaaggaatcaatcgtaaacttgcctcaagactgacctattattttcttgtttccttgaggattttacgttttctccttcatgaagtttttactcttggaaagaccttccgtagctggaaggacaaggagcaaagccgtctccgtgctcttgattatgaccaaattgcagagctctatcttgccaatacggagatgattattgaaagtttggaaaacctgaagggagtctacagacgctctttgattagttttatgcaggagtctcgtcttcgagaaacaactattatcagcagtggtgcctttgtcgaacgggttatcaatcgtgtcaaacccaacaatatcaatgaaatgctgagaggctattatctggagcgcaagttgattttcgaatacgaagaaaaacgattaattacaactaagtatgccaagaaattacgacaaaatgtaaataacttagagaactattccttgaaggaagctgccaataccctgccgtatgatatggtggaattggtaagaagaaattag

SEQ ID NO: 37677 - DNA, 5631 bp, Streptococcus pneumoniae
gtgtttaaaaaagaccgtttttcaattcgtaagattaagggagttgtaggctctgtatttcttggaagccttttgatggctccttctgtagtggacgcagccacctatcactatgtaaataaagagattatttcacaagaagctaaagatttaattcagacaggaaagcctgacaggaatgaagttgtatatggtttggtgtatcaaaaagatcagttgcctcaaacagggacagaagcatctgttttgacagcttttggtttgctgactgttgggagcttgcttttaatctacaagagaaagaaaattgctagcgtctttctagttggaactatgggattggtagttcttcctagtgcaggggctgtagacccagttgcgaccctagcactggctagtcgagagggtgttgttgaaatggagggctatcgctatgttggttatctatcaggtgacatcctcaaaacgcttggcttggacactgttttagaagaaacctcagcaaaacctggagaggtgactgtagtcgaagttgagactcctcaatcaacaacaaatcaggagcaagctaggacagaaaaccaagtagtagagacagaggaagctccaaaagaagaagcacctaaaacagaagaaagtccaaaggaagaaccaaaatcggaggtaaaacctactgacgacacccttcctaaagtagaagaggggaaagaagattcagcagaaccagctccagttgaagaagtaggtggagaagttgagtcaaaaccagaggaaaaagtagcagttaagccagaaagtcaaccatcagacaaaccagctgaggaatcaaaagttgaacaagcaggtgaaccagtcgcgccaagaaaagacgaacaggcaccagtcgagccagaaaatcaaccagaagctcctgaagaagagaaggctgtagaggaaacaccgaaacaagaagagtcaactccagataccaaggctgaagaaactgtagaaccaaaagaggagactaaaacagctaaggggacgcaagaagaaggcaaagaaggtcaagcaccagtacaagaagtaaacccagaatataaagtaacaacaggtacagttgagaagtctaccgaaagtgaattagatttcacaacagaagtagttccggatgacacaaaatatgtagatgaagaagttgttgaacgtcaaggatctaaaggagttcaagttacgaaaacaacttacgaaacagtggaagttgtagagacagacaaagtcctttctacaactacagaagtgaaaactcctgttgttcctaaagtcgttaaaaaaggaacaaaaccagttgaaacaagagaagaagtcattccttttgctacaaaagaacaagaagatgacactttaaaacgcggaacaagacaagtagctcaagaaggtgtaaacggtaagaaacaaattactgaaacctataaaacaattcgcggagaaaaaacaaacgaagctccaacagtagaagaaacagttctccaagcacctcaagatgagattatcaaaaaaggtacaaaagggttagaaaaaccaacactacaatgggctaatactgaaaaagatgtcttgaagaagagtgctacagctagttatacattgactaaaccagctggtgtagaaattaaatcaattaaattagcgctaaaagataaagatggacaacttgttaaagaagtaacggtagctgaaaataatttaaatgctactttagataaattgaaatattatcaaggttacaccctatctactacaatggtttatgatcgtggagaaggtgaagaaactgagaaattagaagataaacaaattcaattagaccttaaaaaagttgaaatcaaaaacattaaagaaacaagcttaatgaatgttgatgctgagggtaacgaaactgataagagcttattatctgaaaaaccgacagatgtttcccaattgtatttacgtgtgacaactcatgacaacaaagtgacaagacttgcggtaagttcagttgaagaagttgttgttgatggaaaaacattgtacaaagttgtagccaaagctccagacttagttcaacgtagagctgatgatacactgagtgaagaatatgttcattattttgaaaaacaattaccaaaagtaaataatgtatactacaacttcaatgaacttgtaaaagatatgcaagctaatccaatgggtgagtttaaacttggtgcagatttgaatgcagttaacgttaagccagcaggtaaagcttatgttatggctaaatttagaggtactttatcaagtgtagagaatcatcagtacacgattcataacttagaaagacctttgtttaatgaggctgaaggtgctacactcaaaaactttaacttaggtaatgtaaatataaacatgccttgggctgataaagttgcacctattggtaatatgtttaagaagtctacacttgagaatatcaaagtagtgggttcagtaacaggaaataacgatgtaaccggtgctgttaataagttagacgaagctaatatgcgcaatgtagcttttattggcaagattaacagtcttggagataaaggctggtggtctggtggacttgtcagcgaaagttggcgaagtaacacggatagtgtttattttgacggtgatattgtaggtaacaattctaagtttggtggtttagtagctaaagtcaatcacggaagtaatcagtgggatgttaaacaaaaaggtcgtttgacaaattctgttgttaaaggtactatgactctgaaaaatcatggtcaaagtggtggtttagttcacgaaaactatgactggggttgggttgagaataatattagtatgatgaaagtcaataacggtgaaattatgtatggttcaggttctattgacggtgacccatactttggttttgactacttcaaaaataattattatgtaaaagatgttgctactggagaaagtacctacaagcgttcgaaacagattcagtctatctctcaagccgaagcagacgccaaaatcgctaatatggggattactgcgaataccttcgctattcaagatccagttgtaaacaagttaaatcgtatcattgatagagattctgaatataaagcgattcaggactaccaagaaacaagaaacctagcttatcgaaacttggaaaaacttcaaccgttctataataaagagtggattgtaaaccaagggaataagttaacagatgagtccaatcttgttaagaaaaccgttctgtctgtaacgggtatgaaatcagggcaatttgttactgatttatcaagtgtggataaaatcatgattcactatgccgatggaaccaaagaagaatttggggtatctgcgatttcggactctagggtaaaacaagtcaaagaatataatgtagatgatttaggtgtagtttacactcctaatatggttgataagaacagagattctttgattacgaaagttaaagagaagttgagttctgttgctttagactctgctgaggttaaatctattacaaataaccctgcatctctatacctagaagaaagtttcgctgaggttagagagacgttagataagttagtgaagtccttgttagaaaatgaagatcatcaactgaacagtgatgaagtggctgagaaggcgcttctcaagaaagttgaagataataaagctaagattatattagccttgacttatctaaatcgttattatggtatcgactatgatggcttgaactttaagcatttgatgatgtttaaaccagacttttatggtaaaacaccaagtattttagatttcttgattcgtataggttcagcagaaaagaatttaaaaggagatagaagtttagaagcttatcgtgaagttattggtggtactattggaaaaggggaattaaatggcttgttaggttataacatgcgtttattcactaagtacactgacttaaatgattggtttattcatgctgcaaagaacgtttatgtttctgagcctgagacgactacagaggatttcaaagacaagcgccatcgtatctatgacggtttgaataatgatgttcacggtcgtatgattttaccgttattgaatttgaaaaaagcgcatatttttgtgatttcgacttacaatacaatagcctttagttcctttgaaaaatatggtaagaatacagaagaagagcggaacgcttataaagctgagattgatagggttgcaaaagcacaacaacgttacttagacttctggtctcgtttagctttaccgaaagttcgcaatcaacttttgaagagtcaaaactctgtaccaactcctgtttgggataatcaagtttatgtaggtttaggtggtgcaaaccgtatgggttacggtgatgggggtcgagtagtaactccagttcgtgaattattcggcccgactgatcgttggcaccaaataaactggaatatgggagcgatggcgaagatttatgaacgtccttggaaagatgatcaagtttatttcatggttacaaatatgatggagccgttcggtatctcagcctttacccatgaaactactcacgtcaatgatagaatggcttactacggtggagattggcaccgtgaaggtacggatttagaagcctttgctcaaggcatgttgcaaacacctgataagtcaacaaccaatggtgaatacggtgctctcggtatcaatatggcttatgagcgtaaaaatgatggtgaacagctttacaattatgaccctgagaagttagatagtagagagaaaattgatagttacatgaagaactacaatgagtctatgatgatgcttgactacttagaagctagtgcagttattcgtcaaaatttgtctgataattctaagtggttcaagaagatggataaagagtggcgcactaatgcagatagaaaccgtttaattggagaaccgcatcagtgggataaattacgtgatttaacagaagaagagaagaagttacctattgacagtattgacaagttggtagagaataactttgtaactcttcatggtatgccgaagaacggtcgttaccgcacagaaggttttgatagctcttatcaacctgtaaacatgatggcaggtgtctttggagggaatacaagtaaaagcaccgtagggtctatttcatttaaacataatgctttccgtatgtggggatactatggatatgaaaatggctttattccttatgtttctaacaagttaaaaggtgctgcaaataaagagaataaagggcttttaggtgatgatttcattatcaagaaagtttctaagaatcaattccaaaatctcgaagagtggaagaagcattggtatcatgaagtttatgataaagcacaaaaaggctttgttgagattgaggtagacggagtgaaaatttcaacgtatgctcagttacaatccttatttgaagaagctgttagcaaagatcttgcaggtatggatgataagaacattaagaatcattaccaatatacagagaatctcaagtggaaaatatacaaacaactccttaaaaacacagacggtttctctagtgatctatttactgcaccacaagcatag

SEQ ID NO: 37678 - DNA, 840 bp, Streptococcus pneumoniae
atgacaaaagcagatacgatttttaaagagaatattgaacgcattctaaaggaaggtgttttctcagagcaggctcgtcctaagtacaaggatgggactgttgctaattccaagtatgtaactggtgccttttccgagtacgacttatctaaaggagaatttcctatcacaactttgcgtcccattgcaatcaaatccgccatcaaagaagttctctggatttaccaagaccagtcaaatagcttagaagtgcttaatgacaagtacaatgttcactactggaatgactgggaagttggagacacgggaaccattggtgagcgctatggtgccgttgttaagaaacacgacattatcaataagcttctcaaacagttggaaaccaatccttggaaccgccgcaatattatttcgctctgggattaccaagctttcgaagaaacagatgggctgctcccgtgcgcctttcagaccatgtttgatgttcggcgtgttgatggggaaatctatctggatgcgaccttgacccagcgctccaatgatatgctggtggcccaccacatcaacgctatgcagtatgtggctttgcagatgatgattgccaaacattttggctggaaggttgggaagttcttctacttcatcaacaacctccatatctatgataatcaatttgaacaagctcaggaattgctccgtcgggagccgtcaaactgccaaccacgcttggttttaaatgttcctgatgggactaatttctttgatatcaaagcagaagattttgagttggtggattatgaccctgttaagccacagttgaagtttgacctagctatttaa

SEQ ID NO: 37679 - DNA, 381 bp, Streptococcus pneumoniae
atggttacttggattttgtgggcacttatactagcaatgttggcgtggatgggctttaactatcttcgtattcgccgtgcggctaaaattgtggacaatgaggagtttgaagccttgattcgtacgggtcaattgattgatttgcgcgacccagcagaattccacagaaaacatatccttggtgcacgcaatattccttcaagtcagttgaaaactagtcttgcagcccttcgtaaagataaacctgtccttctctacgaaaaccaacgtgcgcaacgagttacaaatgcagctctttacttgaaaaaacaaggtttttctgagatttatatcctttcttatggcttggattcttggaaagggaaagtgaagactagctaa

SEQ ID NO: 37680 - DNA, 1863 bp, Streptococcus pneumoniae
ttgaatattatagaggaaatcatgacaaaattaagagaagatatccgtaacattgcgattatcgcccacgttgaccacggtaaaacaaccctggttgacgaattattgaaacaatcagaaacgcttgatgcacgtactgaattggcagagcgtgctatggactcaaacgatatcgaaaaagagcgtggaatcaccatccttgctaaaaatactgccgttgcttacaacggaactcgtatcaacattatggacacaccaggacacgcggacttcggtggagaagttgagcgtatcatgaaaatggttgacggtgttgtcttggtcgtagatgcctatgaaggaaccatgccacaaactcgtttcgtattgaaaaaagccttggaacaagaccttgtcccaatcgtggttgttaacaaaatcgataagccatcagctcgtccagcagaagtagtggatgaagtcttggaacttttcatcgagcttggtgcagatgacgaccagcttgatttcccagtggtttatgcttcagcgatcaacggaacttcttcattgtcagatgatccagctgaccaagaagcgactatggcaccaatctttgacacgattatcgaccatatcccagctccagtagataactcagatgagcctttgcagttccaagtgtcacttttggactacaatgacttcgttggacgtatcggtatcggtcgtgtcttccgtggtacagttaaggttggggaccaagttaccctttctaaacttgacggtacaactaaaaacttccgtgttacaaaactcttcggtttctttggtttggaacgtcgtgaaatccaagaagccaaagcgggtgacttgattgccgtttcaggtatggaagacatctttgtcggtgaaaccatcactccgacagatgcagtagaagctcttccaatcctacacatcgatgagccaactcttcaaatgactttcttggtcaacaactcaccatttgctggtaaagaaggtaaatgggtaacttctcgtaaggtggaagaacgcttgcaggcagaattgcaaacagacgtttcccttcgtgttgacccaactgattcaccagataaatggactgtttcaggacgtggagaattgcacttgtcaatccttatcgaaacaatgcgtcgtgagggctatgaacttcaagtatctcgtccagaagttatcgtaaaagaaatcgacggtgttaaatgtgaaccatttgaacgtgtacaaatcgacactccagaagaataccaagggtctgttatccaaagcctttctgaacgtaaaggtgaaatgttggatatgatttcaactggtaatggtcaaactcgtttggtcttccttgttccagcgcgtggtttgattggatactcaactgagttcttgtcaatgactcgtggttacggtatcatgaaccataccttcgaccaatacttgccattgattccaggggaaattggtggacgtcaccgtggtgcccttgtttctatcgatgctggtaaggctacaacttactcaatcatgtctatcgaagaacgtggtacgatctttgtcaacccaggtactgaggtttatgaaggaatgatcatcggtgaaaactctcgtgaaaatgacttgacagttaacatcacgaaggcaaaacaaatgaccaacgttcgttcagctactaaggaccaaacagctgttatcaagacgcctcgtatcttgacacttgaagagtctcttgagttcttgaacgacgatgagtacatggaagtaacgcctgagtctatccgtttgcgtaaacaaatccttaacaaagcagagcgtgagaaagctaacaagaagaaaaaatcagctgaataa

SEQ ID NO: 37681 - DNA, 1353 bp, Streptococcus pneumoniae
atgaaagtaatagatcaatttaaaaataagaaagttcttgttttaggtttggccaagtctggtgaatctgcagctcgtttgttggacaagctaggtgccattgtgacagtaaatgatgggaaacctttcgaggacaatccagctgcccaaagtttgctggaagaagggatcaaggtcattacaggtggccatcctttggaactcttggatgaagagtttgcccttatggtgaaaaatccaggtatcccctacaacaatcccatgattgaaaaggctttggccaagagaattccagtcttgactgaggtggaattggcttatttgatttcagaagcaccgattattggtatcacaggatcgaacggtaagacaaccacaacgactatgattggggaagttttgactgctgctgggcaacatggtcttttatcagggaatatcggctatcctgccagtcaggttgctcaaatagcatcagataaggacacgcttgttatggaactttcttctttccaactcatgggtgttcaagaattccatccagagattgcggttattaccaacctcatgccaactcatatcgactaccatgggtcattttctgaatatgtagcagccaagtggaatatccagaacaagatgacagcagctgatttccttgtcttgaactttaatcaagacttggcaaaagacttgacttccaagacagaagccactgttgtaccattttcaacacttgaaaaggttgatggagcttatctggaagatggtcaactctacttccgtggtgaagtagtcatggcagcgaatgaaatcggtgttccaggtagccacaatgtggaaaatgcccttgcgactattgctgtagccaagcttcgtgatgtggacaatcaaaccatcaaggaaactctttcagccttcggtggtgtcaaacaccgtctccagtttgtggatgacatcaagggtgttaaattctataacgacagtaaatcaactaatatcttggctactcaaaaagccttatcaggatttgacaacagcaaggtcgtcttgattgcaggtggtttggaccgtggcaatgagtttgacgaattggtgccagacattactggactcaagaagatggtcatcctgggtcaatctgcagaacgtgtcaaacgggcagcagacaaggctggtgtcgcttatgtggaggcgacagatattgcagatgcgacccgcaaggcctatgagcttgcgactcaaggagatgtggttcttcttagtcctgccaatgccagctgggatatgtatgctaactttgaagtacgtggcgacctctttatcgacacagtagcggagttaaaagaataa

SEQ ID NO: 37682 - DNA, 1059 bp, Streptococcus pneumoniae
atgaaaaaaattgtctttacaggtggggggacggttggacacgttaccctcaatcttttgttaatgcccaagttcatcgaagatggttgggaagtccactatatcggggacaagcgtggtatcgaacaccaagaaatccttaagtcaggtttggatgtcactttccactccattgcgactgggaaattgcgtcgctatttctcttggcaaaatatgctggacgtcttcaaagttggctggggaatcgtccaatcgctctttatcatgttgcgacttcgtccacagacccttttttcaaaggggggctttgtctcagtaccgcctgttatcgcagcgcgtgtgtcaggagtgcctgtctttattcacgaatctgacctgtctatgggcttggccaataaaatcgcctataaatttgcgactaagatgtattcaacctttgagcaagcttcgagtttgtctaaggttgagcatgtgggagcagtgaccaaggtttcagatcaaaaaaatccagaaccagatgaattggtggatattcaaacccactttaatcataaattgccgactgtattgtttgttggcggttctgcaggtgctcgtgtctttaaccaattggtgacagaccataagaaagaactaacagagcgctacaatattatcaatctaactggagattctagtctgaacgagttgagccaaaatctttttcgtgttgactatgtgaccgatctctatcaacccttgatggaattggctgatattgttgtgacacgaggtggtgccaatacgatttttgagctcttggcgatagcaaaattgcatgtcattgtgccgcttggtcgtgaagctagtcgtggtgaccagattgaaaatgcagcttactttgtaaaaaaaggctatgcagaagaccttcaagaaagcgatttgaccttggatagtttggaagagaagctttctcacttactaagtcacaaggaagattaccaagctaagatgaaagcttctaaggaattgaaatctctagcagatttttatcaattgttgaaaaaagatttatcataa

SEQ ID NO: 37683 - DNA, 1191 bp, Streptococcus pneumoniae
atgtcaaaagataagaaaaatgaggacaaagaaaccctcgaagaattgaaagagttatcagaatggcagaaacgaaaccaagaatatctaaaaaagaaggctgaagaagaggtggctctagctgaggagaaggaaaaggaaagacaagctcgaatgggagaagaatctgagaagtcagaggacaaacaggaccaggagagtgaaacagaccaggaagattcagaatcagctaaggaagagtctgaagaaaaagtagcatcctcagaggctgacaaagagaaagaagaaccagagtctaaagagaaggaggaacaggataaaaagcttgctaaaaaggctacaaaggaaaaaccagccaaagcaaagattcctggtatccatatcttgcgagccttcacgattttatttccaagtctgcttttattgattgtctctgcctacttgctcagtccttatgcgaccatgaaagatattcgtgttgagggaacggtgcaaactacagctgatgatattcgacaggcttcaggcattcaggattcggattatacgattaaccttctgctagacaaggcaaaatatgaaaagcagattaagtctaactattgggttgaatcagctcaacttgtctatcaatttccaactaagttcactattaaggtcaaggaatatgatattgtggcctactatatttctggtgaaaatcattatcctattctttccagtggtcagcttgagactagttctgtgagtctgaacagtttaccagaaacttatttatcagttctctttaatgatagtgaacaaatcaaggtttttgtctcagaacttgctcaaattagcccagaactcaaggcggctatccaaaaggtggaattagccccaagcaaggtgacatccgatttaattcgattgaccatgaatgattcggacgaagtcttggttcctctatctgaaatgagtaagaaactgccatattacagtaagattaagccacaattgtcagaaccgagtgtggtcgacatggaagctggaatttacagttacactgtggcggataaattaattatggaggctgaggaaaaagccaaacaagaggccaaggaagctgagaaaaaacaagaagaagaacagaaaaaacaagaggaagagagcaatcgaaatcaaacaaatcagcgttcatcgcgtcgctag

SEQ ID NO: 37684 - DNA, 1014 bp, Streptococcus pneumoniae
atgtatggagtgaggaaacttattgtcgctgattacgatataatagaaccatcaaatttaaataggcaaattctttatacagagtcgaatgttggtaaggagaagattaatgttctttctgaaaaaatacacaagtataattcagatgttcaggtagtacctatttctattaaagtttcttcagtagaagaattagaaaaaattgttgcggaatatgggagtatagattttatcgttaaagcaattgatacgcccattgatattataaaaattgtcaatcaatttgctgtatcgcataagatatcctacatatcaggagggtttaatggatgctatcttattattgataatatatatatccctaccatcggttcttgctttggttgtcggaatataaacaaagatataaataagtacactttatctgataagacaaagtggccgactacaccagagatgcctgctattttgggagggataatgactaatttaataattaaaatatttctgggatgttataatgaaatcctaatagataacgcttacgtttataatatgagaaatcatgctctaagtcaagaaaaatatgttctggaaaacggagaatgtccaatttgtaaaaaaaataataaagtgaaagataacaatattagagcgaaaacatttattcgttcagtttgtttttgcttattatcaggaggagtagcttttttatctgctattgggcagttcactgttataggaacacaattaatagtattgttcttgggtattatttttgctatatattatgcttactacaataaaaatattcaaacatcattggaaaatatagtatggcttttttcatcgtttgagattttatttttgcttgttaattttagaacatttattcagttaccagtggatatttttatttgtatgataatatttttaatgctgtggatatttattatgttaggtatagtgtgtcttagttattatataactttattatttggcaaggaggcttag

SEQ ID NO: 37685 - DNA, 633 bp, Streptococcus pneumoniae
atgacacttgctaaagatatcgctagccacctcttgaaaatccaagccgtttacctcaaaccagaggaacccttcacttgggcatctggtatcaagtcaccgatttacactgataatcgtgtgacactagcctatccagaaactcgtaccctaattgaaaatggttttgtggaagctatcaaagaagcctttcctgaagtagaagtgattgcaggaactgcaacagcagggattccacacggagccattattgctgataagatggacttgccttttgcctacatccgtagcaaaccaaaagaccacggagctggtaatcaaatcgaaggtcgcgtagctcaaggtcaaaaaatggtagtggttgaagaccttatttcaacgggtggttcagttcttgaagctgtagcagcagccaagcgagaaggagcagatgtgcttggagttgtagcgattttcagctaccaattgccaaaagcagataagaactttgcagatgctggtgttaaacttgtgacgctttcaaactatagcgatcttatccatctagcccaagaagaaggttacatcacgccagagggcctttatcttctaaaacgctttaaagaagaccaagaaaattggcaagaaggttag

SEQ ID NO: 37686 - DNA, 1491 bp, Streptococcus pneumoniae
atgtctacagaacatatggaagaactaaatgaccagcagatcgttcgccgtgaaaaaatggctgcgctccgcgaacaaggaatcgatcctttcggaaaacgttttgaacgtactgcaaattcacaagaattaaaagataaatatgccaacctcgataaagaacaattacacgataaaaacgaaacagctactatcgcaggacgcttggtaaccaaacgtggtaaaggaaaagttggttttgcccaccttcaagaccgcgaaggccagattcagatctatgttcgtaaggatgctgtcggtgaagaaaactacgaaatcttcaaaaaagcagaccttggtgacttccttggtgtcgaaggtgaagtgatgcgtacggatatgggagaactctctatcaaggcaacccacatcacacacttgtctaaggctcttcgtcctcttcctgagaaattccatggtttgacagacgttgaaacaatttaccgtaaacgttaccttgacttgatttctaatcgtgaaagctttgaacgctttgtcactcgttcaaaaatcatctctgaaatccgtcgttaccttgaccaaaaaggattccttgaagtggaaacacctgttcttcataatgaagccggtggagctgctgcccgtccatttatcacccaccacaatgcccaaaacattgacatggtgcttcgtatcgcgactgagcttcacttaaaacgccttatcgtgggtggtatggaacgtgtctatgaaattggccgtatcttccgtaacgaaggaatggatgctactcataaccctgagttcacttctatcgaagtttaccaagcctatgcagacttccaagatatcatggacttgacggaaggcattatccaacatgctgctaaatcagtcaaaggtgatggcccagtcaactaccaaggtactgaaatcaagattaacgaaccatttaagcgtgttcatatggtggatgctatcagagaaattactggtgtcgatttctggcaagacatgactttggaagaagctaaagctatcgctgctgagaagaaagttccagttgagaaacactacactgaggttggtcacatcatcaatgccttctttgaagagtttgttgaagaaactttaatccaaccaacctttgtctatggacatccagtagctgtatctccactcgctaagaaaaatcctgaagaccaacgctttactgaccgtttcgagctctttatcatgactaaggagtacggtaatgcctttactgagctcaacgacccaatcgaccaacttagccgttttgaagcccaagctaaagccaaagaacttggtgatgatgaagcgacaggaatcgactatgactacattgaagcccttgaatacggtatgccaccaacaggtggtttgggaatcggtatcgaccgtctctgcatgctcctcactgatacaacaactatccgtgatgtattgctcttcccaacaatgaaataa

SEQ ID NO: 37687 - DNA, 1137 bp, Streptococcus pneumoniae
atgtcatacaaaacaagcaatgcagaaggccatgtagatttcatcaatacctatgatttggagccaatggcgcaacaagttattcctaaagcagcatttggctatatcgctagtggggcggaagatactttcactttaagagagaatatccgcgcctttaaccacaaactcatcgttcctcatacactttgcgatgttgaaaatccaagtacagagattgaatttgcaggtgaaaaactatcttcaccaatcattatggcgcctgttgcggcccataaattagcgaatgaacagggggaagtggcgactgcgcgtggtgtgcatgagtttggttctctttatacaaccagttcttactctactgttgaccttccagagatttctgaagcccttcaagggacacctcattggtttcaattttactttagtaaggatgacggtatcaaccgccacatcatggaccgtgtgaaggctgaaggttataaagcgattgtcttgacggcagatgctactgtaggggggaatcgtgaagtggataagcgtaatggttttgtcttcccagttggcatgccgattgttgaagaatacctgccagaaggtgctggtaaatcaatggactttgtttataaatcagctaaacaacgcttgtctccacgcgatgtagaatttatcgctgaatactctggtcttcctgtgtatgtcaagggaccacaatgccgtgaggacgttgaacgttcgcttgctgcaggagcttctggtatctgggtaaccaaccacggtggtcgtcaaatcgacggtggaccagctgcctttgactcgcttcaagaagtggcagaagcagttgatagacgtgtgccgattgtctttgactctggtgttcgtcgtggtcaacacgtctttaaagccttggcttcaggagcagacttggtagctattggtcgccctgttatctatggcttggctctcggtggtagtgtcggtgtgcgtcaagtctttgaacacttgaatgcggaattgaagacagttatgcaattgtctggagctcagaccattgaagatgtcaaacactttaagctccgtcacaatccatacaacccaaccttcccagttgaccctcgtgacttaaaattgtattga

SEQ ID NO: 37688 - DNA, 804 bp, Streptococcus pneumoniae
gtgaaaaggaaggatttcaatatgacaagtttaaaattattaaaagaaaaagcaccattggtcatttgtataaccaatgatgtagtaaaaaatttcacagcaaatggattagtagcactgggcgcctcaccagccatgagtgagtttccagcagatttagaggatttgttaaagtatgctggtggtttattaataaacataggaacattgacagatgaaaattggaaattataccaagctgctctgaaaattgcggagaaatataatgtcccagcagttttagatcctgtagcctgtggagcaggagaatatagaaaaaaagtagcagatgatctaatcaacaattataaactagcagcgattagaggaaatgctggcgagattgcctctttagtaggaatagatgtggcatctaaaggagtagatagtgcgggcgtagataatattgacgaaattgctctagcagcaaatgagaagttcaatattccaatagtagtaacaggtgaagtggatgccattgctgttaatggagaagtggtaacgattcataatggtagtgctatgatgccgaaagtcattgggacaggatgcttattaggagctgtagtagcaagttttatcggactggaaaaaggtcaagaattaaaatcattagaaacagcaatgttagtttacaatatcgctggagaaatggcagaaaaacgtccaaatggacatcttcctgggacatttaaagttgaatttataaatgccttatacgagattacagatgaagatgtaaaggaattcaaaagagtgaagtaa

SEQ ID NO: 37689 - DNA, 630 bp, Streptococcus pneumoniae
atgtttcataaagaattactaaaactatattttatttgtggaacgactacttgccaaggaaaaaatctatatacagtcgttgaggaagccttaaaaggtggtataaccttatttcaatttcgagaaaaaggtgagagtgctttagaaggcttagaaaaacttgagctagctatccaaattaaagaactttgtaaaaaatacaatgttccatttatcgttaatgacgatatagatttagcaatggaaattgacgccgatggcgtacatgtaggtcaagatgatattggtgttgatgaaattagaaaattgatgccagataaaataattggtctttctataagaaacgaagaagaatttcaacaatcaaaagttgaatatgtagattatgtaggtgttgggcctgtatttgatacccagtcaaaagatgatgctggtggtgctataggttatgaaggtcttgaattgatgagaaaactattgccacaaatgcctttagttgcaattggtgggatacagacgaaacatattaaagacattataaagaccaatatggatggcgtttcaatcatttcggcaatatcgtatgcaaaaaatatagaaaaaactgttcgggaaatgagtgaacaatag

SEQ ID NO: 37690 - DNA, 693 bp, Streptococcus pneumoniae
atggaatttacagatattgcgatggaattatccaagaaagcttggcaggcttcctttcatcatccctttattttacaattacaagaggggaatttagaacctgccattttccgctattacctgattcaggatgcctactatctgaaggccttctcagaaatctatcatcttttggctgataagacttcaaaccaagagatgaaaagactcttgaaacaaaatgctcagggtttagtggagggtgagttatttattcgccaacaatttttcaaggaattggaaatcagcgaccaggaaatggagcaacatccaatcgctccaacctgttatcattacatttctcatatttataggcaatttgcagaaccgaacttagccatcgcttttgcaagcttgcttccttgtccttggttataccatgatataggcaaatcacttaatcttaaaccatcaccaaatcctctctatcaacaatggattgaaacttatattacggatgagttagagcaacagatcagagaggagggagcactggtcaatcagctctatcgagaaagtgacgagacagacaagcaaaaaatgctagataccttccacatcagtgttcatatggaagccaagttttgggaaatggcctaccaacaccagacatggaagagcgatttacagtctttagaaaaaggagaagaatag

SEQ ID NO: 37691 - DNA, 2253 bp, Streptococcus pneumoniae
gtggagactatgacagaaattgtgaaagcaagcttagaaaatggcattcaaaaaatccgtatccaagctgaaaaaggctatcatccagcccatatccagcttcaaaagggaattccagctgagattacctttcatcgtgctactccttcaaactgttataaggaaattctgtttgaagaagaaggtatcttggaaccaatcggcgtagatgaggagaaagtcattcgttttacacctcaagaattagggcgacatgaattttcttgtggcatgaagatgcaaaagggaagctatacagtcgttgagaagactcgaaaatctctatctctcctgcaacgtttttggattactagtatctttactgtgcctcttgtgattctcatgattgggatgttgacaggtagcattagtcatcaagtcatgcattggggaacctttctagcaacaacgcctattatgttagttgcaggtaagccatatatccagagtgcttgggccagttttaaaaagcacaatgccaacatggataccttggttgcgctgggaactctagtggcttatttctatagcctagttgctctctttgctggtctccctgtttacttcgaaagtgctggatttatcctctttttcgttcttttgggagcagtttttgaggaaaaaatgagaaaaaatacgtcccaagctgtggagaaattactggacttgcaagctaaaaccgcagaagtcttgagtgatgatagttatgtccaagttcctttggaacaagtcaaggtaggcgacctgattcgagtgcgtcccggtgaaaagattgctgttgatggtgtcgtagtagaaggtgtctctagtattgacgaatccatggtgacaggtgagagtctgcctgtggacaagacagttggagatactgtcattggctcaaccatcaatcatagtggaacgcttgtctttagagcagaaaaagttggctcagagactgttttggctcagattgtggattttgtgaagaaagctcagacaagtcgtgcgccgattcaggacttgacggataagatttcagggatttttgtcccagtagttgtcattttaggaatcatgaccttttgggtttggttcgtcttgctcagggatagtgtggtcgtgcttggagctagctttgtgtcctctcttctctacggagtggcggttttgattatcgcctgtccttgtgccttgggacttgcaacaccgacagcccttatggtggggacaggacgtagtgccaagatgggggttctcctcaaaaatggaactgtcttacaggaaatccagaaagttcaaactcttgtctttgataagaccgggactttgacggaagggaaacctgtggtaacagatatcatcggcgacgaagtagaagtgtttggattggcagcctccttggaagatgcttctcaacacccactggctgaggctatcgttaagcgagcgagtgaagctggacttgagtttcaaactgttgaaaattttcaggccttgcacgggaaaggtgtttcagggcgaatcaatggaaaacaagttttacttggaaatgctaaaatgctggatggcatggatatttctaatacttatcaagataaactagaagaactagaaaaagaagctaagacagttgtgtttttagctgttgacaatgaaatcaaaggcttgcttgctttgcaagatattcctaaggaaaatgctaagctagccatcagtcagctaaaaaaacgtggtctccgaacagtcatgctgacaggagacaatgctggtgtggcgcgtgctattgcagatcaaatcggaattgaagaggtcattgcaggcgtcttgccagaagaaaaagcccatgaaatccataaactgcaagcggctggcaaagtagcctttgttggggacggtatcaatgacgctcctgcccttagtgtagcagatgtgggaattgctatgggtgctggaacagatatcgccatcgagtcagcagatttggtgttgacaaccaataatcttttaggagtggttcgtgcctttgatatgagtaagaaaacctttcatcgaattctactcaatcttttctgggcttttatctacaatgttgtcggaattccgattgcagcaggagtcttttcaggtgttggactggctctcaacccagaattggcaggtctagccatggcctttagttctgtatctgttctgaccagttcccttctgttaaattttagtaaaatagactaa

SEQ ID NO: 37692 - DNA, 1776 bp, Streptococcus pneumoniae
atgactcaagggaaaattactgcatctgcagcaatgcttaacgtattgaaaacatggggcgtagatacaatctacggtatcccatcaggaacactcagctcattgatggacgctttggctgaagacaaagatatccgcttcttacaagttcgccacgaagagacaggtgctcttgcagcggttatgcaagctaaattcggcggctcaatcggggttgcagttggttcaggtggtccaggtgcgactcacttgattaacggtgtttacgatgcagctatggatgacactccattcctagcgatccttggatcacgtccagttaacgaattgaacatggatgctttccaagagcttaaccaaaacccaatgtacaacggtatcgctgtttacaacaaacgtgtagcttacgctgagcaattgccaaaagtaattgacgaagcctgccgtgctgcaatttctaaaaaaggtccagctgttgttgaaattccagtaaacttcggtttccaagaaatcgacgaaaactcatactacggttcaggttcatacgaacgctcattcatcgctcctgctttgaacgaagttgaaatcgacaaagctgttgaaatcttgaacaatgctgaacgcccagttatctatgctggatttggtggtgttaaagctggtgaagtgattactgaattgtcacgtaaaatcaaagcaccaatcatcacaactggtaaaaactttgaagctttcgaatggaactatgaaggtttgacaggttctgcttaccgtgttggttggaaaccagccaacgaagtggtctttgaagcagacacagttcttttccttggttcaaacttcgcatttgctgaagtttacgaagcattcaagaacactgaaaaattcatacaagtcgatatcgacccttacaaacttggtaaacgtcatgcccttgacgcttcaatccttggtgatgctggtcaagcagctaaagctatccttgacaaagtaaacccagttgaatcaactccatggtggcgtgcaaacgttaagaacaaccaaaactggcgtgattacatgaacaaactcgaaggtaaaactgagggtgaattgcaattgtatcaagtttacaatgcaatcaacaaacatgctgatcaagacgctatctactcaatcgacgtaggtaacactactcaaacatctactcgtcaccttcacatgacacctaagaatatgtggcgtacatctccgctctttgcgacaatgggtattgcccttcctggtggtatcgctgctaagaaagacaatccagatcgccaagtatggaacatcatgggtgatggagcattcaacatgtgctacccagacgttatcacaaacgttcaatacgaccttccagttatcaaccttgtcttctcaaatgctgagtacggcttcatcaagaacaaatacgaagatacaaacaaacacttgtttggtgtagacttcacaaacgctgactacgctaaaattgcggaagctcaaggagctgttggattcacagttgaccgtatcgaagacatcgatgcagttgttgcagaagctgttaaattgaacaaagaaggtaaaactgttgtcatcgatgctcgcatcactcaacaccgtccacttccagtagaagtacttgaattggatccaaaacttcactcagaagaagctatcaaagccttcaaggaaaaatacgaagcagaagaactcgtaccattccgtctcttcttggaagaagaaggattgcaatcacgcgcaattaaataa

SEQ ID NO: 37693 - DNA, 945 bp, Streptococcus pneumoniae
atgtcagaaccattatttttacaatcagttatgcaagaaaaaatctggggtggtaccaagctacgtgatgagtttggctacgacatcccaagtgaaaaagtcggagagtactgggctatctcagctcatctaaatggtgtttctaaagttgccaatggtcgttacgagggaacagatcttgctactttgtatgcggaacaccgtgaattatttggcaatcgtccagaacctgtatttccacttttgaccaagatcctcgatgccaacgactggctcagtgtccaagttcacccagacgatgcttatggactcgagcatgaaggcgaacttggaaaaacagaatgttggtacatcattgcagcagatgaaggttcagagattatctacggtcacaatgccaagtcaaaagaagaactccgccagcaaatcgaggataagaactgggatgcgctgttgacaaaagtgccagttaaagcaggagatttcttctatgtaccaagcggtaccatgcacgctatcggggcgggtatcttgattcttgaaacccagcagtctagcgataccacttaccgtgtctatgactttgaccgtaaggatgacaagggcaatttacgtgaacttcaccttgaaaaatctatcgatgtcttgaacattggtgaacccgcaaatagccgtccagtgacaatcaaagcagatgatctacgttccactctccttgtatccaatgatttcttcgcagtttacaaatgggaaattactggaaaagttaactttgaaaagacagctgactacagcttgttgagtgtcttggctggtcaaggtcaactaactgttgacgggaaaaactatccaatccaaaaagggagacactttatcctaccaagtgatgttgaatcttggactctagaagggcaagatttagaattaattgttagtcatccataa

SEQ ID NO: 37694 - DNA, 663 bp, Streptococcus pneumoniae
ttggtccccttaaagtcggaaaacggctatcgaacctatagtcaagaggatttggaacgccttcaggtcattctttactacaaatatctaggcttttctttagagaaaatagcagagctgttaaaggaagaaaggacagatttattgccccatttaactaggcagttggactatctaactcgcgaaaggcaacatctggataccttgatttccaccttgcaaaaaactattcaagaacaaaaaggagaaagaaaaatgaccattgaggaaaaattcacgggatttagctatcaagacaatcaaaaataccaccaagaagcggtagagaaatatggtcaagaagtcatgggacaagcgctcgaacgccaaaaaggtcacgaagacgaggctacggccgcctttaaccaagtctttcaaactttggcacaaaatcttcaagttggtttacctgcaacagcaaccgaaaaccaagagcaagcagccaagctcttgcaagctattcgcacttatggatttgactgctctattgaggtattcggtcatatcggtaaaggttacgtctacaacccagagtttaaggaaaatattgacaagtttggttctgaaacagcccagtacacgtcagatgccattgcggcttacgttcagacaaatgcagaataa

SEQ ID NO: 37695 - DNA, 1194 bp, Streptococcus pneumoniae
ttgtggtacaatagagctatgaaacattttgatactattgtcatcggtgggggacctgctggtatgatggctacgatttccagtagcttttatggacagaaaaccctcctcatcgaaaaaaatcggaaacttggaaaaaaattagctgggactggtgggggacgttgcaatgtgaccaacaatggtagcttagacaacctgctagctggaattcctggaaacggacgctttctttacagtgttttctcccagttcgataatcatgacatcatcaacttttttacagaaaatggtgttaaacttaaggtcgaagaccacggacgcgtctttccagccagtgacaagtctcggactattatcgaagctttggaaaagaaaatcactgaactaggtggtcaagttgctactcaaatagaaatcgtttctgttaaaaaagtagatgaccagtttgtccttaagtcagcggatcaaaccttcacttgtgagaaactcattgtcacaacaggtggtaagtcttatccttcgactggttcgactggctttggtcacgagattgctcgccattttaagcataccatcaccgatcttgaggctgctgaaagtcctttattaacagattttccacataaagccttacaagggatttctctggacgatgtgaccctaagttatggtaagcatgtcatcactcatgatttactctttacccactttggtttgtcaggtcctgctgccctacgcatgtctagctttgtcaaaggtggggaggttctctcactcgatgttttgcctcaactttctgagaaggacttggttacatttctagaagaaaatcgggaaaaatccttgaaaaacgctttaaaaaccttgttaccagaacgcttggccgaattttttgtacaaggatatcctgaaaaagtcaaacagctgactgaaaaggaacgagaacaacttgtccagtccattaaagaacttaaaattcctgtaactggaaaaatgtcccttgcaaagtcctttgttaccaagggtggagtcagtctcaaggaaatcaatcctaaaacccttgaaagtaagctggtacctggcctccactttgcaggcgaagttatggatatcaatgcccacacgggtggctttaacatcacttctgccctctgtaccggctgggtggcgggaagtctgcattatgattaa

SEQ ID NO: 37696 - DNA, 651 bp, Streptococcus pneumoniae
ttgaaagaaggaattccaaaaatgggaaaaattgaagttattaatcacccactgattcaacacaaattgtcaatcttgcgtcgtacagatacttctacaaaagcttttcgtgagctagtagatgagattgcaatgttgatggggtatgaagtacttcgtgatcttccactagaagatgtggaaatcgaaacaccaattacaaaaacagttcaaaaacaattggcaggtaagaaattggccatcgtcccaatcttgcgtgcaggtatcgggatggttgatggtctcttgagcttggttccagctgctaaagttggccacatcggtatgtaccgtgatgaagaaacacttcaaccagttgaatacttggtgaaattgcctgaggacattgaccaacgtcaaatttttgtagtagacccaatgttggcaacaggtggctcagcaatcttggctgttgattctcttaaaaaacgtggcgcatcaaatatcaaatttgtctgccttgtatctgctccagagggtgtaaaagcccttcaagaagctcatccagatgtagaaatctttacagcagccttggatgaacgtttgaacgaacacggttatatcgttccaggtcttggagatgctggagaccgcttgttcggtacaaaataa

SEQ ID NO: 37697 - DNA, 957 bp, Streptococcus pneumoniae
atgaaggaaaatttaaaagttaatattctatggttactccttttgttagctggctatagcttgattagtgtactggtttcagtcggagtacttaatctattctatgtacagattttacaacaaattggaattaatattattttggctgttggtctcaacttaatcgttggtttttcaggacaattttcacttggtcatgctggtttcatggcgattggtgcctatgccgcagctattattggttctaaatcaccaacctacggtgccttctttggagctatgcttgtaggggctttgctttcaggagcagttgccttacttgtcggcattccaaccttgcgcttgaagggggactatcttgcggtagcaactctgggtgtttctgaaattatccgtatctttatcatcaatggtggaagtcttacaaatggtgcggcaggtatcttagggattcctaactttacaacttggcaaatggtttacttctttgtcgtgattacaaccattgcaaccttgaacttcttgcgtagcccaattggccgttcaaccctctctgttcgtgaagatgaaatcgctgctgagtcagttggggttaatacgactaaaattaaaatcatcgcttttgtctttggtgccattactgcaagtattgctgggtcacttcaggcaggatttatcgggtctgttgtaccgaaagattacaccttcatcaactcaatcaacgttttgattattgttgtatttggtggactcggttccattacaggtgcgattgtttcggctattgttctgggaattttgaatatgcttctccaagatgttgctagtgtgcgtatgattatttacgctttggccttggtattggtaatgattttcagaccaggtggactccttggaacgtgggaactgagcctatcacgtttctttaaaaaatctaagaaggaggaacaaaactaa

SEQ ID NO: 37698 - DNA, 990 bp, Streptococcus pneumoniae
ttggaaaacaagatgacagaacctgatttttggaacgataatattgcggcccaaaaaatgtcgcaagaattaaatgaattaaaaaacacttacaataccttccataagatggaagagttgcaggatgaagtcgaaattttattggattttttggctgaagacgagtcagtgcatgatgaactggtagcgcagttagccgaacttgataagataatgaccagctacgagatgactctactcttgtcagaaccttatgaccacaacaatgccatcttggaaatccatccaggttctggtggtactgaggcgcaggactggggtgatatgttgcttcgtatgtatactcgttatggtaatgctaaaggctttaaagtggaagtgttggattaccaagcaggtgatgaggctggtattaagtcggtaactttatcatttgaagggcctaatgcctatggtctcctcaagtcagaaatgggtgttcaccgcttagtgcgaatctcaccatttgactctgccaaacgtcgccatacctctttcacatctgtagaagtgatgccagaattggatgatactattgaagtggaaatccgtgaagatgatatcaagatggataccttccgttcaggtggtgccggtggacaaaacgtcaataaggtttcaacaggtgtacgtttaacctacattccaactggaattgttgtccaatcaacagtggatcgtacccagtatggaaatagagatcgcgccatgaagatgttgcaggctaagctctatcaaatggagcaagagaagaaggctgcggaggtagattctctcaaaggtgagaaaaaggagatcacttggggaagccaaatccgttcttatgtcttcacgccttatactatggtaaaagatcaccgaactagctttgaggttgctcaggtagataaggttatggatggggacctagatggttttatcgatgcttatctcaagtggcgaattagctaa

SEQ ID NO: 37699 - DNA, 1344 bp, Streptococcus pneumoniae
atgtcatttacgaaatttcaatttaaaaactatattagagaagccttgaaggagttaaaatttacaactccaacagaggtgcaagacaagttgattcctattgttttggcaggtcgtgacctagtaggagaatcaaaaacaggttcaggtaagactcacactttcttgttaccgattttccagcaattagatgaagctagcgatagtgtacaagcagtgattactgcaccgagtcgtgagttggctactcaaatttaccaagtagcgcgtcagatttcagctcactcagatgtcgaagttcgtgtggttaattatgtgggtggtacggataaggctcgccagattgagaaattggaaagcaatcagcctcatattgttattggaacaccaggccgtatctacgacttggttaaatctggtgatttagctattcataaagccaagacatttgttgttgatgaagcagatatgaccttggatatgggattcttggaaactgttgataagattgctggcagtcttccaaaagacttgcaattcatggtcttctcagcgactatcccacaaaaactgcaaccattcttgaaaaaatacttatcaaatcctgttatggagaaaattaagactaaaacggttatttctgacaccattgataattggttgatttcgaccaagggacatgataagaatgctcaaatttaccagttgactcagttgatgcagccgtatttggcaatgatttttgttaacactaaaacgcgtgctgatgaattgcattcatatctgactgctcaaggcttgaaggttgcaaaaatccatggcgatattgcccctcgtgaacgcaagcgaatcatgaatcaggtgcaaaatctggattttgagtatattgtcgcaacagatttagcagcgcgtgggattgacattgaaggtgtcagccatgtcatcaatgatgccattccgcaagacttatctttttttgttcaccgtgttggtcgtactggacgaaatggcctaccaggtacagctattaccctttatcagccaagtgatgactcggatatccgtgagttggagaaattgggaatcaagtttagtcctaagatggtcaaagatggggaatttcaagatacctatgaccgtgatcgtcgtgccaaccgtgagaaaaaacaagataaacttgatatcgaaatgattggtttggttaaaaagaaaaagaaaaaagtcaaaccgggttataagaagaaaattcaatgggcggttgatgaaaagcgccgtaaaactaagcgtgctgaaaatcgcgctcgcggtcgtgcagagcgtaaagctaaacgccaaacattttaa

SEQ ID NO: 37700 - DNA, 1191 bp, Streptococcus pneumoniae
atgtcagaacgtaaattattcacgtctgaatctgtatctgaggggcatccggataagattgcagaccaaatttcagatgcgattttggatgctattttagcaaaggatccagaggcgcacgttgctgctgaaacagctgtatatactggttctgtccacgtttttggtgaaatttctacaaatgcctatgtggatattaaccgtgtggttcgtgataccattgcagagattggttataccaatacagaatatggattttctgctgagacggtgggagtacacccatctttggtggaacaatctcctgacatcgctcaaggtgttaacgaagccttggaggttcgcggaaatgctgatcaagatccactggacttgattggagcaggtgaccaagggctcatgtttggatttgcagtagatgaaacagaagagcttatgccattgccaattgcactcagtcataaattggttcgtcgtctggcagaacttcgtaagtctggagaaattagctatctccgtccagatgcaaaatcacaagttacagttgagtacgatgaaaatgaccgtccggtacgtgtagatacagtcgttatttctactcagcatgatccagaggccactaatgaacaaatccatcaagatgtgattgacaaggtcatcaaagaagttattccatcttcttatcttgatgataagacaaaattctttatcaatccgacaggtcgttttgtaatcggtggtcctcaaggggactcaggtttgactggtcgtaagattattgtagatacttatggtggctactctcgtcatggtggtggtgccttctctggtaaagatgcgactaaggtggatcgttcagcctcttatgcggctcgctatattgccaagaatatcgttgcagcaggccttgctaagaaggcagaagtgcagttggcctatgctatcggtgttgcgcaacctgtttctgttcgtatcgatactttcggtacaggaacagtagctgaaagtcaacttgaaaaagcggctcgtcaaatctttgaccttcgccctgcagggattatccaaatgctggacctcaagcgtccaatttaccgtcaaacatcggcttacggtcacatgggacgtacagatattgatcttccatgggaacgtttggataaggtagatgctttgaaagaagcagtaaaataa

SEQ ID NO: 37701 - DNA, 531 bp, Streptococcus pneumoniae
atgcgaaaagaaattgcacctgaattatacaactataacaagtttcctggtccggagttccatttacacggggacaaggtcgaaacggaagggatagctttttccttggttgaaaatatcaaggatgcctttgatgtgacgacttttaatcagcgtttttcagaagtattaaccaagtttgattatatcgtgggggactggagcaacgaacagcttcgcctacgaggtttttacaaggatgaccgaacagaagaaaaacttgaaaaaatcagtcgtttacaagactaccttttagagtattgtagttatggttgtgcctattttgtcttagaaaatgaagcccctaagcgagcatcatttgacaagaaaatgcgtaagacggaagaagaaacaccttctagaaaaggaaagaaaccgactcaaactaaacgaaagtcgaatgcagataagaaaaatagacgtcgtcagaaagaccagcattctcagaaagaggacaaggaacaacgtcattttgtcattcgtcagaagtga

SEQ ID NO: 37702 - DNA, 1086 bp, Streptococcus pneumoniae
atgaaaccctcaattcatagtttggcacatcaaaccatgcaggaatgggtattggagcagggagaaaagaaattccgtgcagatcaaatctgggaatggctctaccgtaaacgtgtgcagtcatttgaagaaatgaccaacctttccaaggatttgattgctaagctcaatgaccagtttgtggtcaatcccttgaaacaacgtattgtgcaagagtctgctgatggtacagtcaaatatctctttgaattgcctgacggtatgttaattgaaactgtactcatgcgtcaacactatggtttatctgtctgtgtgaccactcaggtcgactgtaatatcggttgtaccttctgtgcctctgatttgattaagaagcaacgtgacctcaataacggtgaaatcgtagcgcaaatcatgctggttcagaaatactttgctgagcgtggtcaggatgaacgcgtcagccatatcgttgtcatgggaatcggtgagccctttgataattacaacaatgtcttgaatttcgtttgtactatcaatgatgataaaggaatggctatcggtgctcgtcacatcacggtttcaacctcaggtttggctcataaaattcgtaactttgctgatgaaggggttcaggtcaatcttgccgtgtctcttcacgcacccaacaatgaacttcgttcaagtatcatgaagattaaccgtgcctttccgattgaaaaactctttgctgctattgaatactacattgagacaacaaaccgtcgtgtaacctttgaatatatcatgcttaatgaagtcaacgacagtgtagaacaagccttggaattggctgaattgctcaagaacatcaagaaattgtcttatgtaaacttgattccttataacccagttagtgagcatgaccaatatagccgtagtcccaaagagcgcgtgttggctttctatgatacgcttaagaaaaaagggggcaactgtgtggttcgtcaagagtatggtacagatattgacgcagcttgtggacaattgcgctctaacacaatgaaacgtgaccgccagaaggcagtcgcagaggtaaatccgtaa

SEQ ID NO: 37703 - DNA, 273 bp, Streptococcus pneumoniae
atggcagttaaaatccgtttgactcgtatgggttctaagaaaaaacctttctaccgtatcaacgtagcagattcacgttcaccacgtgacggacgtttcatcgaaacagttggaacttacaacccacttgttgctgaaaaccaagtaactttgaaagaagaccgcgttcttgcatggttggctaatggagctcaaccttcagacacagtacgtaacatcctttcaaaagaaggcgtattgaaaaaattccacgattctaaattttcaaaataa

SEQ ID NO: 37704 - DNA, 240 bp, Streptococcus pneumoniae
atggatacgattgaaaatctcattattgcgattgtgaaacccttaatttcacaaccagatgccttaactatcaagattgaggatacaccagaatttttggaatatcatttgaatcttgatcaaagcgatgtgggtcgtgtaatcggtcgtaagggtcgcactatttctgcgataagaacgattgtctactctgtcccaactgaatacaaaaaagtaagaatcgttattgacgaaaaataa

SEQ ID NO: 37705 - DNA, 519 bp, Streptococcus pneumoniae
atgaactactttaatgttgggaaaatcgttaatacgcagggattacagggtgagatgcgagtcttgtctgtgacggattttgcagaagaacggtttaaaaaaggagctgagctggctttgtttgatgaaaaagatcagtttgtccaaacagtgaccatcgctagccaccgtaaacagaagaactttgacattattaaattcaaagatatgtaccatatcaatactatcgaaaagtacaagggatacagtctcaaggtcgctgaggaagatttgaatgacctagacgatggtgaattttactatcacgagattatcggtttggaagtctatgagggtgatagcttggttggaaccatcaaggaaatcctgcaaccaggtgctaatgatgtctgggtggtcaaacgaaaaggcaaacgtgatttgcttttaccttatatcccaccagtggttctcaatgttgatattccaaataaacgggtcgatgtggaaatcttagaagggttagacgatgaagattga

SEQ ID NO: 37706 - DNA, 720 bp, Streptococcus pneumoniae
atgaagattgatattttaaccctctttccagagatgttttctccactggagcactcaatcgttggaaaggctcgagaaaaagggctcttggatatccagtatcataattttcgagaaaatgctgaaaaggcccgtcatgtagatgatgagccctacggaggcggtcagggcatgttgctcagagtacaacctattttcgattcctttgatgctattgaaaagaaaaatccgcgcgttattctcctcgatcctgctggaaagcagtttgatcaggcttatgctgaagatttggctcaagaggaagagctaatctttatctgtgggcactatgagggttatgatgagcgcattaagaccttggtaacagatgagatttccctaggcgactatgttctcactggtggagaattggcagctatgaccatgattgatgctacagttcgcctgattccagaagtgattggcaaggagtctagccaccaagatgatagtttttcttcaggtcttttagaatatcctcagtacacacgtccctatgattatcgaggcatggtcgtgccagatgtattgatgagtggccaccatgaaaagattcgtcagtggcgattgtacgagagtttaaagaaaacctacgagcgcagaccggatttacttgaacattatcaactgacagtagaagaagaaaaaatgctggcagaaatcaaagaaaacaaagaataa

SEQ ID NO: 37707 - DNA, 1347 bp, Streptococcus pneumoniae
atgagagaatatgatatcattgctatcggtggaggtagcggaggaatcgctaccatgaaccgtgctggtgaacatggagcccaagcagccgttattgaggaaaagaaattaggtggaacctgtgtcaacgtcggttgtgttcctaaaaaaatcatgtggtacggggcacaaatcgctgagactttccatcaatttggagaagactacggctttaagactactgatcttaactttgactttgcaaccctacgtcgcaatcgtgaatcctacattgatcgcgctcgttcttcttatgatggcagttttaaacgcaacggtgtagacttgattgaaggtcatgctgaatttgtagattctcatactgtaagcgtaaatggtgaactgattcgtgctaaacatatcgtgattgctacaggtgcccatccaagtattcctaatattcctggtgctgagctaggtggctcttctgatgatgtatttgcctgggaagaacttccagagtcagttgccattctaggcgctggttatatcgccgttgaattagctggcgtactccacacttttggtgtcaagacagatctctttgttcgccgcgatcgtcctttacgtggttttgattcctacatcgttgaaggtttggtcaaggaaatggaaagaacaaacttaccacttcacactcacaaagtccctgtcaagttagaaaaaactactgacggcattaccattcatttcgaagatggtactagtcacacagctagccaagttatctgggctacaggccgccgtccaaacgttaagggcttgcaacttgaaaaagctggagtgactctgaacgaacgtggctttatccaagtggatgaataccaaaatactgttgttgagggaatctatgctctaggtgatgtaacgggcgagaaagaactgactccagttgcaatcaaggccggacgtaccctatctgaacgtctctttaacggaaaaactactgcaaaaatggattactcaactattccaactgttgtcttttcacaccctgctatcggaactgttggtttgacagaagagcaagctattaaagaatacggtcaagaccaaatcaaggtttacaaatcaagctttgcatctatgtactctgcttgcactcgcaaccgtcaagaatcccgtttcaaactcataacagctggttcagaagaaaaagttgtcggacttcatggaattggctacggcgttgatgaaatgattcagggatttgccgttgctatcaaaatgggagcaaccaaggctgactttgacgcaactgtagcgattcacccaacttcatctgaagaatttgtaaccatgcgttaa

SEQ ID NO: 37708 - DNA, 1200 bp, Streptococcus pneumoniae
atgaagaaaaagaatggtaaagctaaaaagtggcaactgtatgcagcaatcggtgctgcgagtgtagttgtattgggtgctggggggattttactctttagacaaccttctcagactgctctaaaagatgagcctactcatcttgttgttgccaaggaaggaagcgtggcctcctctgttttattgtcagggacagtaacagcaaaaaatgaacaatatgtttattttgatgctagtaagggtgatttagatgaaatccttgtttctgtgggcgataaggtcagcgaagggcaggctttagtcaagtacagtagttcagaagcgcaggcggcctatgattcagctagtcgagcagtagctagggcagatcgtcatatcaatgaactcaatcaagcacgaaatgaagccgcttcagctccggctccacagttaccagcgccagtaggaggagaagatgcaacggtgcaaagcccaactccagtggctggaaattctgttgcttctattgacgctcaattgggtgatgcccgtgatgcgcgtgcagatgctgcggcgcaattaagcaaggctcaaagtcaattggatgcaacaactgttctcagtaccctagagggaactgtggtcgaagtcaatagcaatgtttctaaatctccaacaggggcgagtcaagttatggttcatattgtcagcaatgaaaatttacaagtcaagggagaattgtctgagtacaatctagccaacctttctgtaggtcaagaagtaagctttacttctaaagtgtatcctgataaaaaatggactgggaaattaagctatatttctgactatcctaaaaacaatggtgaagcagctagtccagcagccgggaataatacaggttctaaatacccttatactattgatgtgacaggcgaggttggtgatttgaaacagggtttttctgtcaacattgaggttaaaagcaaaactaaggctattcttgttcctgttagcagtctagtaatggatgatagtaaaaattatgtctggattgtggatgaacaacaaaaggctaaaaaagttgaggtttcattgggaaatgctgacgcagaaaatcaagaaatcacttctggtttaacgaatggtgctaaggtcatcagtaatccaacatcttccttggaagaaggaaaagaggtgaagactgatgaagcaactaattag

SEQ ID NO: 37709 - DNA, 2040 bp, Streptococcus pneumoniae
gtgttagaaaaacaggtttcatttgcctggaaaggaaaaattatgtctgaaaaaaatttttatattacaacgccgatttactatccatctgggaaacttcatatcggttctgcctacacaactatcgcatgtgatgtcctagcacgttacaaacgcctgatgggctacgatgtattttatctgacaggtcttgatgaacatggtcagaaaatccagcagaaagcggaagaagctggtattacacctcaagcctatgttgatggaatggcggttggagttaaagaactctggcaattactagatatctcatacgataaatttatccgtacaactgatgactaccatgaaaaagttgtcgcacaagtctttgaacgcttacttgctcaagatgatatctacttgggtgaatactctggttggtattcagtatcagacgaagaattctttacagaaagccagctggcagaagttttccgtgatgaagctggaaatgtgactggtggtattgctccatcaggtcatgaggttgaatgggtttctgaagaatcatacttccttcgccttagcaaataccaagaccgtttggtcgaatttttcaaagctcatcctgaatttatcacgccagatggtcgccttaatgaaatgctacgcaacttcatcgagccaggcttggaagatttggcggtatctcgtacaacctttacatggggagtgcctgtcccatcaaatccaaaacacgttgtctacgtttggattgatgcccttcttaactatgcgacagctcttggctacgctcaagacgaacatggtaactttgacaagttctggaatggaacagtcttccatatggtaggaaaagatatccttcgcttccactctatctactggccaatccttcttatgatgttggatgttaaattacctgatcgtttgattgcccatggttggtttgtcatgaaagacggaaaaatgtctaagtcaaaagggaatgtcgtttaccctgaaatgttggtagagcgttatggactagatccacttcgttactacctcatgcgtaaccttccagttggttcagacggaacctttactcctgaagactatgtcggccgtatcaactatgaattggctaatgaccttgggaacctccttaaccgtacggtttccatgattaataagtactttgatggacaaatccctgcctatgtagaaggtgtgactgaatttgatcatgttcttgctgaggttgcagaacaatcaatcgcagacttccatacacacatggaagcagttgactatccacgtgcgcttgaagcagtctggactctgatctctcgtaccaataaatacatcgatgagaccgcaccatgggtcttggccaaggatgaagctcttcgtgaccaattggcaagtgtcatgagccacttggcagccagcattcgtgtagttgctcacttgattgaaccatttatgatggaaactagtcgtgcagttttgactcaacttggtttggaagaagtttctagtcttgaaaacttgagtttggctgacttcccagcagatgtgactgtagttgccaaaggaacacctatctttccacgtctaaatatggaagaagaaatcgcctatatcaaggaacaaatggaaggcaataaaccagcagtcgaaaaagaatggaatccggacgaagttgagctcaaactaaacaaggatgaaatcaagtttgaagactttgacaaggttgaaatccgtgtcgcagaagtcaaagaagtgtctaaagtagaaggttcagataagttgcttcaattccgcttggatgctggtgatggagaagatcgtcagattctttcaggaattgcaaaatactatccaaatgaacaagaattggtcggcaagaaagttcaaatcgttgctaacctcaaaccacgtaaaatgatgaaaaaatatgtcagccagggtatgattctctcagctgaacatgatggcaaattaacccttctcacagttgatccagctgtaccaaatggaagtgtgattgggtaa

SEQ ID NO: 37710 - DNA, 2547 bp, Streptococcus pneumoniae
atgcaagcagttgaacattttattaagcaatttgttcctgaacattatgatttatttttagatttgagtcgtgagaccaagactttttctgggaaagtgaccatcactggtcaagcacagagtgaccgcatctccctccaccaaaaagacttggaaatcacctctgtagaagttgcaggtcaagctcgtccatttacagttgaccatgacaatgaagcccttcatatcgaattggctgaggctggtcaagttgaattggttcttgccttttctggtaaaattacagacaacatgacagggatttacccttcttattatacagttgatggagtcaagaaggaggtcttgtctactcagttcgagagccattttgcgcgcgaagctttcccatgtgtggatgagcctgaagccaaagcaacttttgacctctctcttcgctttgaccaagcagaaggtgaattggccttgtcaaacatgccagaaatcgatgttgaaaaccgtaaggaaacaggtatctggaagtttgagacaacacctcgcatgtcttcttacttgttggcctttgttgctggtgatttgcaaggggtgaccgctaaaactaaaaatggtaccctggtaggtgtctactcaaccaaagcacatccactttcaaatcttgatttctcactggatatcgctgttcgctctatcgagttttacgaagattactatggagttaagtacccaattcctcaatctctccacatcgcccttcctgacttctcagctggtgctatggaaaactggggtcttgtgacctaccgtgaagtttacttggttgtcgatgagaactctacatttgctagccgtcaacaagttgcccttgttgtggcccatgaattggctcaccaatggtttgggaacctcgtgactatgaaatggtgggatgacctttggctcaatgaaagtttcgctaatatgatggaatacgtctgtgtggataccatcgaaccaagctggaatatctttgaagatttccaaacaggtggagtacctcttgctcttgaacgtgacgctactgatggcgttcagtctgtccacgtcgaagttaaacatccagatgaaatcaatacactctttgacggcgctatcgtctatgccaaaggaagccgtctcatgcacatgcttcgccgttggctaggagatgctgattttgctaaaggtttgcacgcctactttgaaaaacaccaatacagcaacaccattggtagtgacctttgggatgcccttggtcaagcgtcaggacgtgatgtcgcagccttcatggattcttggttggaacagcctggttacccagttcttactgtcaaagttgaaaatgatgtcttgaagatttcacaaaaacaattcttcatcggtgagaacgaagacaagaaccgtctctgggtggtgcccctcaatagcaactggaaaggcttgcctgatacactcgaaactgaaagtatcgaaatccctggctacgcagctcttcttgctgaaaatgaaggagctcttcgtctcaacactgaaaatactgcccactatattaccgactatcaaggagacttgttagaagctgttcttgctgagctagagacacttgataacacaagcaaactgcaaattgttcaagaacgtcgtttgttggctgaggcagggcacatttcttatgcagacttgcttccagttcttgataaacttgctaaggaagagtcttatctggtggtttcagctgtttctcaagtgatttcagcccttgagcgctttattgatgaaggaacggatgctgaaacagccttcaaaggactggttgctaaattggctcgtcataactatgaccgtcttggttttgaagctaaagacggagaatcagatgaggatgaattggttcgtcagctggctgtttcgatgatgattcgctcaaatgatgcagaagctagtcaagtcgctagccaaatcttcgcaacacacaaggagaatcttgcaggactcccagcagctattcgctcacaagttctgattaatgagatgaaacatcatgagactaaagacttgttagcactttatcttgatacttatactcacgcaacagatgctgtctttaaacgccagttggcagcagctcttgcatacagtacagatgcggataatatccaaaacctgattacttcttggaaggacaaatttgtggtcaaaccacaggacttgtctgcttggtattaccaattcctagctcatcaagcaactcagaaaacagcttggtcttgggcgcgtgaaaactgggcttggattaaggcagcccttggaggagatatgagctttgatagctttgttatccttcctgctcatgtatttaagactcagcaacgcttggcggaatacaaggagttctttgagccgcaactttctgaccttgctcttagccgtaacatcggtatgggaatcaaggaaattgcagcacgtgttgacttgattagccgtgaaaaagctgcagtcgaagcagttgttcttcaatacggaaatgcataa

SEQ ID NO: 37711 - DNA, 1947 bp, Streptococcus pneumoniae
atgacagaagaaatcaaaaatctgcaggcacaggattatgatgccagtcaaattcaagttttagagggcttagaggctgttcgtatgcgtccagggatgtacattggatcaacctcaaaagaaggtcttcaccatctagtctgggaaattgttgataactcaattgacgaggccttggcaggatttgccagccatattcaagtttttattgagccagatgattcgattactgttgtggatgatgggcgtggtatcccagtcgatattcaggaaaaaacaggtcgtcctgctgttgagaccgtctttacagtccttcacgctggaggaaagttcggcggtggtggatacaaggtttcaggtggtcttcacggggtggggtcgtcagttgttaatgccctttccactcaattagacgttcatgtccataaaaacggtaagattcattaccaagaataccgtcgtggtcatgttgtcgcagatcttgaaatagttggagatacggataaaacaggaacaactgttcacttcacaccggacccaaaaatcttcactgaaacaacaatctttgattttgataaattaaataaacggattcaagagttggcctttctaaatcgcggtcttcaaatttctatcactgataagcgccaaggtttggaacaaaccaagcattatcattatgaaggtgggattgctagttacgttgaatatatcaacgagaacaaggatgtaatctttgatacaccaatctatacagacggtgagatggatgatatcacagttgaggtagccatgcagtacacaacgggttaccatgaaaatgtcatgagtttcgccaataatattcatacacatgaaggtggaacgcatgaacaaggtttccgtacagccttgacacgtgttatcaacgattatgctcgtaagaataagttactgaaagacaatgaagacaatctaacaggggaagatgttcgcgaaggcttaactgcagttatctcagttaaacacccaaatccacagtttgaaggacaaacgaagaccaaattgggaaatagcgaagtggtcaagattaccaatcgcctcttcagtgaagccttctccgatttcctcatggaaaatccacagattgccaaacgtatcgtagaaaaaggaattttggctgccaaggctcgtgtggctgccaagcgtgcgcgtgaagtcacacgtaaaaaatctggtttggaaatttccaaccttccagggaaactagcagactgttcttctaataaccctgctgaaacagaactcttcatcgtcgaaggagactcagctggtggatcagccaaatctggtcgtaaccgtgagtttcaggctatccttccaattcgcggtaagattttgaacgttgaaaaagcaagtatggataagattctagctaacgaagaaattcgtagtcttttcacagccatgggaacaggatttggcgcagaatttgatgtttcgaaagcccgttaccaaaaactcgttttgatgaccgatgccgatgtcgatggagcccacattcgtacccttcttttaaccttgatttatcgttatatgaaaccaatcctagaagctggctatgtttatattgcccaaccaccaatctatggtgtcaaggttggaagcgagattaaagaatatatccagccgggtgcagatcaagaaatcaaactccaagaagctttagcccgttatagtgaaggtcgtaccaaaccgactattcagcgttataaggggctaggtgaaatggacgatcatcagctgtgggaaacaaccatggatcccgaacatcgcttgatggctagagtttctgtagatgatgctgcagaagcagataaaatctttgatatgttgatgggggatcgagtagagcctcgtcgtgagtttatcgaagaaaatgctgtctatagtacacttgatgtctaa

SEQ ID NO: 37712 - DNA, 735 bp, Streptococcus pneumoniae
atgacagaaaccttgataaaaattgaaaatttacataaatcttttggaaagaatgaagtattgaagggcatcaacctcgagattaaaagaggagaagttgtcgttatcatcggtccttcagggagtgggaaatctaccttgcttcgctctatgaatttgttggaggaagcaaccaaggggaaggttatctttgagggagtcgatattacggacaagaagaatgacctgtttgccatgcgtgagaagatgggcatggttttccaacaatttaacctctttcctaatatgactgtgatggaaaatattaccttgtcacctatcaagactaaaggtgaaagcagggaagttgctgagaagagagcccaagagcttttggaaaaagttggtttgccagataaggcagacgcttatccacagagtctgtcgggtgggcaacaacaacggattgccatcgcgcgtgggttggctatggaaccagatgttttgctctttgacgaaccaacttcagccttggatcctgaaatggtaggtgaggtattggctgttatgcaagaccttgccaagtcagggatgactatggttatcgtaacacatgagatgggatttgcccgtgaggtggcagatcgtgttatctttatggcagacggtgtggttgttgaagatgggacacctgagcagatttttgaacaaacccaagaacaacggactaaagatttcttgagaaaggttttataa

SEQ ID NO: 37713 - DNA, 252 bp, Streptococcus pneumoniae
atggaggtaagaacattggcaaacattaaatcagctatcaaacgcgctgaattgaacgttaaacaaaacgaaaagaactcagctcaaaaatcagctatgcgtactgctataaaagctttcgaagcaaacccatctgaagaacttttccgtgctgctagctcagctatcgataaagcagaaactaaaggtttgattcacaaaaacaaagcaagccgcgataaagctcgtctttcagctaaacttgctaaataa

SEQ ID NO: 37714 - DNA, 591 bp, Streptococcus pneumoniae
atgagtaaaatgtattatgcagaaaatcctgacgctgctcacgacattcatgagttgagagtagagttgttgggacaaaaaatgacctttttaacggatgcgggtgtttttagcaagaaaatagttgactttggaagtcaactattgctcaagtgtcttgaggtcaaccaaggagaaactgtccttgatgtaggctgtggttacggacctttgggtttgtccttagctaaggcttatggagttcaggctactatggttgatatcaacactcgtgccttagatttagctcggagaaatgctgaaaaaaataatgcaaaagcgacgattttccagtccaacatctatgaacaagttgaaggacattttgatcatgtcatttccaatcctcctatccgtgcgggcaagcaagtcgttcatgaaatcattgagaaaagtaaagatttcttggaaactagtggggatttgacaatcgtcatccagaaaaaacaaggggctccaagtgctaagtccaagatggaggatgtgtttggtaattgtgaaatccttaaaaaagacaagggatactatatccttagaagtgtgaaagaatga

SEQ ID NO: 37715 - DNA, 663 bp, Streptococcus pneumoniae
atgaaattaaataaatatatagatcatacgcttttaaaacaagatgcaaagaaaaaacaaattgatagtttgttgtctgaggctagagagtatggctttgccagtgtttgcgttaatccgacctgggttgaacatgctaaaaaaggacttgaaggcacagatgttaaggtttgcacagtagtaggtttccctttgggagcaacaacttcagccgtgaaagcatttgagacaaaagaagctatccaaaatggtgcagatgagattgatatggtgatcaatgttggagctctcaaatcaggtaatttagccttggttgagtcagatattcgcgcagtagtggaagcaagtggtgataagttagtgaaagtcattattgaagcttgccttctgacagaccaagaaaaaattgttgtttgccaattggcccaaaaagctggggctgactttgttaaaacatctactggtttttcaactggtggtgctacgatagcagatgttacattaatgcgtgaaacagttggatctgatatgggagtcaaggctgctggtggagctcgttcttatgcagatgctcttgcctttgtcgaagcaggtgcgacccgtatcggaacgtcagctggggtagctattttaaaaggagaattggcagatggcgactactga

SEQ ID NO: 37716 - DNA, 489 bp, Streptococcus pneumoniae
atggaacagtgctacacagatgtgactgaatttgccattccagtaagtactcaaaagctttacttatcaccagttttagatggctttaatagcgaaattatcgcctataatctttcaacttcacccaacttagaacaagtacaaacaatgttggaacaggcattcacagagaagcactacgagaatacgattctccatagtgaccaaggctggcaatatcaacacgattcttatcatcggttcctagagagtaagggaattcaagcatctatgtcacgcaagggaaacagccaagacaacggtatgatggaatctttctttggcattttaaaatccgaaatgttttatggctatgagaaaacatttaaatcacttaaccaattggaacaagccattatagactatattgattactacaacaacaaacgaattaaggtaaaactaaaaggacttagccctgtgcaatacagaactaaatcctttggataa

SEQ ID NO: 37717 - DNA, 642 bp, Streptococcus pneumoniae
atgattacaatagttttattaatcctagcctatctgctgggttcgattccatctggtctctggattggacaagtattctttcaaatcaatctacgcgagcatggttctggtaacactggaacgaccaacaccttccgcattttaggtaagaaagctggtatggcaacctttgtgattgactttttcaaaggaaccctagcaacgctgcttccgattatttttcatctacaaggcgtttctcctctcatctttggacttttggctgttatcggccataccttccctatctttgcaggatttaaaggtggtaaggctgtcgcaaccagtgctggagtgattttcggatttgcgcctatcttctgtctctaccttgcgattatcttctttggagctctctatcttggcagtatgatttcactgtctagtgtcacagcatcgatcgcggctgttatcggggttctgctctttccactttttggttttatcctgagtaactatgactctctcttcatcgctattatcttagcacttgctagtttgattatcattcgtcataaggacaatatagctcgtatcaaaaataaaactgaaaatttggtcccttggggattgaacctaacccatcaagatcctaaaaaataa

SEQ ID NO: 37718 - DNA, 1944 bp, Streptococcus pneumoniae
gtgtcaaaaaaggaaatcaatattaacaattataatgatgatgctattcaggtgctagaagggttggatgcggtccgaaaacgtccagggatgtatattggatcgaccgatggcgctggtcttcatcacctagtttgggaaatcgttgataatgcagtcgatgaagccttgtctgggtttggtgatcgtattgatgtaactatcaataaagacggtagtctaacggttcaagaccatggacgtgggatgccgacaggtatgcacgctatgggaattccaactgttgaggttatctttaccattcttcatgccggagggaaattcggtcaaggtggctataagacatcaggtggacttcacggagtgggttcttccgttgttaacgccctttctagctggttagaagttgaaattacccgtgatggcgcagtttacaagcaacgttttgaaaatggtggaaaacctgtcacgactttgaagaaaatcggtacagcactcaagtctaaaacaggcaccaaagttacttttatgcctgacgcgactatcttttctacgacagatttcaagtacaataccatttcagagcgccttaatgaatcagcctttctcttgaaaaatgtgaccttgtctttaacggacaagcgaacagatgaagcgattgagttccactatgagaatggagtacaagattttgtttcttatctcaacgaagataaggaaatcttgacgccagttctttactttgaaggggaagacaatggttttcaagtggaagtagccctccagtacaatgacggattctcagataacattctatcctttgtcaataacgttcgcaccaaggacggtggaacgcacgagacaggactcaagtctgccattaccaaggtcatgaatgactatgcacgtaaaacaggtcttctcaaggaaaaagataaaaaccttgaaggttcagactatcgtgagggactagcggccgttctttctatcttagttcctgaagaacacttgcagtttgaaggacagaccaaggataaactaggaagccccctagctcgcccagttgtggatggaatagtggctgataagttgacctttttccttatggaaaatggggaattagcttctaacctcatccgcaaggctatcaaggcccgtgatgctcgtgaagcagcacgtaaggcgcgtgatgagagccgaaatgggaagaaaaacaagaaagataagggcttgttgtctgggaaattgaccccagcccaatctaagaatcctgctaagaatgaactctatctagttgagggggactctgccggtggttctgccaaacaaggtcgtgaccgcaagttccaggctattctacctcttcgtggtaaggttatcaatacagccaaggccaagatggcggatatcctcaaaaatgaagagatcaataccatgatttataccattggtgcgggtgttggagcagacttctctattgaagatgccaactatgataagatcattatcatgaccgatgcggataccgacggtgcccatatccagaccttgctcttgacatttttctaccgttacatgcgtccgctagtcgaggcaggtcatgtctatattgccctcccacctctttacaagatgtccaaaggtaaaggcaagaaagaagaagtggcctacgcttggacggacggagaactagaagaactccgtaaacagttcggtaaaggcgctaccctccaacgatacaaaggacttggtgagatgaatgcggaccagctctgggaaacaaccatgaacccagaaacacgtaccctcatccgtgtcacaattgaagatttagcgcgcgccgaacgccgcgtcaatgttctcatgggagataaggtagaaccacgccgtaaatggattgaagataatgtcaagtttacgctagaagaagcgacagtgttttaa

SEQ ID NO: 37719 - DNA, 2481 bp, Streptococcus pneumoniae
ttgtatcttatgtctaacattcaaaacatgtccctggaggacatcatgggagagcgctttggtcgctactccaagtacattattcaagaccgggctttgccagatattcgtgatgggttgaagccggttcaacgccgtattctttattctatgaataaggatagcaatacttttgacaagagctaccgtaagtcggccaagtcagtcgggaacatcatggggaatttccacccacacggggattcttctatctatgatgccatggttcgtatgtcacagaactggaaaaatcgtgagattctagttgaaatgcacggtaataacggttctatggacggagatcctcctgcggctatgcgttatactgaggcacgtttgtctgaaattgcaggctaccttcttcaggatatcgagaaaaagacagttccttttgcatggaactttgacgatacggagaaagaaccaacggtcttgccagcagcctttccaaacctcttggtcaatggttcgactgggatttcggctggttatgccacagacattcctccccataatttagctgaggtcatagatgctgcagtttacatgattgaccacccaactgcaaagattgataaactcatggaattcttacctggaccagacttccctacaggggctattattcagggtcgtgatgaaatcaagaaagcctatgagactgggaaagggcgcgtggttgttcgttccaagactgaaattgaaaagctaaaaggtggtaaggaacaaatcgttattactgagattccttatgaaatcaataaggccaatctagtcaagaaaatcgatgatgttcgtgttaataacaaggtagctgggattgctgaggttcgtgatgagtctgaccgtgatggtcttcgtatcgctattgaacttaagaaagacgctaatactgagcttgttctcaactacttatttaagtacaccgacctacaaatcaactacaactttaatatggtggcgattgacaatttcacacctcgtcaggttgggattgttccaatcctgtctagctacatcgctcaccgtcgagaagtgattttggcgcgttcacgctttgacaaagaaaaggctgagaaacgtctccgtatcgtcgaaggtttgattcgtgtgatttcgattttggatgaagtcattgctcttatccgtgcttctgagaataaggcggacgccaaggaaaacctcaaagttagctatgattttacggaagaacaggctgaggctatcgtaactttgcaactgtaccgtttgaccaataccgatgtggttgtcttgcaggaagaagaagcagagcttcgtgagaagattgctatgctggcggctattatcggtgatgaaaggactatgtacaatctcatgaagaaagaacttcgtgaggtcaagaagaactttgcaactcctcgtttgagttctttagaagacactgcgaaagcaattgagattgatacagctagtcttatcgctgaggaagatacctacgtcagcgtgaccaaggcaggttacatcaagcgtaccagtccacgttcctttgcggcttccaccttggaagaaattggcaagcgtgatgatgaccgtttgatttttgttcaatctgccaagacaacccagcacctcttgatgttcacaagtcttggaaatgtcatctacagaccaatccatgagttggcagatattcgttggaaggacatcggagagcatctgagccaaaccatcacaaactttgaaacgaatgaagcaatcctttatgtggaagtactggatcagtttgacgatgcgacaacctactttgcagcgactcgccttggtcaaatcaaacgggtagagcgaaaagaattcactccatggcggacctatagatctaagtctgtcaagtatgctaagctcaaagacgatacagatcagattgtagcagtggctccgattaaactagatgatgttgtcttggttagtcaaaatggttatgccctgcgtttcaatatcgaagaggttccggttgtcggtgctaaggcagcaggtgtcaaggctatgaatttgaaagaagatgatgtcctccaatctggctttatctgtaatacttcgtccttctacctcttgacccagcgtggaagcttgaaacgtgtttccattgaggaaattctagcaaccagccgtgccaaacgaggattacaagtcttgcgtgagttgaaaaacaaaccgcatcgtgtcttcttggcaggagcagttgcagagcaaggatttgttggcgatttcttcagtacggaagtggatgtgaacgaccaaactctgcttgtccaatccaataaaggaacaatctatgaaagccgattgcaagacttgaacttgtcagaacgcactagcaatggaagcttcatttctgacacgatttcagatgaagaagtttttgacgcttatcttcaggaagtagttactgaagataaataa

SEQ ID NO: 37720 - DNA, 1023 bp, Streptococcus pneumoniae
atgacagtaacgattgattgggaaaacctcggtttttcctatatgaaattaccttatcgctatcttgctcatttcaaaaatggacaatgggatcaaggagagcttacagaggatgcaactttgcatatttcagagtcttctccaagtcttcactatggacaacaagcatttgaaggtttgaaagcttatcgtactaaggatggcagtgttcaactgttccgtcctgatgaaaatgctaaacgcctgcaacgtacatgtgaccgtctcttgatgccacaagttccgacagacatgtttgtagaagcttgtaaagcagttgtccgtgcgaatgaagaatacgtaccactatacggaataggtggaaccttatatcttcgccctcttttgattggtgtcggagatattatcggggtaaaaccggcagaagagtacattttcaccatctttgctatgccagttggaaattactttaaaggtggtttggtcccaaccaacttcttgattcaggatgagtacgaccgtgcagcaccaaatggtacaggtgcggctaaggttggtggaaactatgctgcaagtctcttaccaggaaaaatggccaagtcacgccatttctcagatgttatctatctggacccatcaactcatacaaagattgaagaagtcggatcagctaatttctttggaattacagctgataatgaatttgtaacaccattgagtccatctatcttgccatctattaccaagtattccttgctttatttggcagaacatcgcttgggattaactcctattgagggtgatgttccaattgataatcttgaccgttttgtagaggcaggtgcctgtggtacagcagcggttatttctccaattggaggtattcaacatggtgatgatttccatgtattctatagtgaaacagaagtaggtcctgtgacgcgtaaattatataatgaattgacgggtattcagtttggcgatattgaagcgccagaaggttggattgtaaaagtagattaa

SEQ ID NO: 37721 - DNA, 1203 bp, Streptococcus pneumoniae
atgaacgaatttgaagatttgctaaatagcgttagtcaagttgagactggtgatgttgttagtgctgaagtattgacagttgatgcgactcaagctaacgttgcaatctctggaactggtgttgaaggtgtcttgactcttcgcgaattgacaaacgatcgtgatgcagatatcaatgactttgttaaagtaggagaagtattggatgttcttgtacttcgtcaagtagttggtaaagatactgatacagttacataccttgtatctaaaaaacgccttgaagctcgcaaagcatgggacaaacttgttggtcgcgaagaagaagttgttactgttaaaggaacgcgtgccgttaaaggtggactttcagtagaatttgaaggtgttcgtggatttatcccagcttcaatgttggatactcgtttcgtacgtaacgctgagcgttttgtaggtcaagaatttgatactaaaatcaaagaagttaacgctaaagaaaaccgcttcatcctttcacgtcgtgaagttgttgaagcagctactgcagcagctcgcgctgaagtattcggtaaattggctgttggtgatgttgtaactggtaaagttgctcgtatcacaagcttcggcgctttcatcgaccttggtggtgttgacggattggttcacttgactgaattgtcacatgaacgtaacgtatcaccaaaatcagttgtaactgttggtgaagaaattgaagtgaaaatccttgatcttaacgaagaagaaggacgtgtatcactttcacttaaagcaacagtaccaggaccatgggatggcgttgagcaaaaattggctaaaggtgatgtagtagaaggaacagttaaacgtttgactgacttcggtgcatttgttgaagtattgccaggtatcgatggacttgttcacgtatcacaaatttcacacaaacggattgaaaatccaaaagaagctcttaaagttggtcaagaagttcaagttaaagttcttgaagttaacgcagatgcagaacgcgtgtcactttctattaaagctcttgaagaacgtccagcccaagaagaaggacaaaaagaagaaaaacgtgctgctcgtccacgtcgtccaagacgtcaagaaaagcgtgatttcgaacttccagaaacacaaacaggattttcaatggctgatttgtttggtgacatcgaactttaa

SEQ ID NO: 37722 - DNA, 1656 bp, Streptococcus pneumoniae
atgtatcaagcactttatcgaaaatatagaagtcaaaacttctcccagttagttggtcaagaagttgtggctaagactcttaaacaagcggtggagcaagagaaaataagtcacgcttatcttttttctggtcctcgtggaacgggaaaaaccagtgttgctaaaatctttgccaaggctatgaactgtcccaatcaagtgggtggcgaaccttgcaataactgctatatttgtcaagcagtgacggacggtagtttagaagatgtcattgaaatggatgcagcttctaataatggggtagatgaaattcgcgaaattcgtgataaatctacctatgcgcctagccttgctcgttataaggtttatatcatagatgaggttcacatgctgtctacaggggcttttaatgccctcttaaagacgctggaagaaccaacacagaatgtagtctttattttggccactactgaattgcacaagattcctgctactattctatcccgtgtgcaacgttttgagtttaaatcaattaagacacaggatattaaggaacatattcactatatcttagaaaaagaaaatatcagttctgaaccagaggctgtggaaatcattgccagacgggcggaaggtggaatgcgggacgccttgtctattttggatcaagccctgagtttgacacagggaaatgagctgacgactgctatctctgaagaaattactggcaccattagcctaccagccttggatgattatgtggcggccttgtctcaacaggatgttcccaaagctttgtcttgcttgaatcttctttttgacaatggtaagagcatgactcgttttgtgaccgatcttttgcactatttaagagacttgttaattgttcaaacagggggagaaaatactcatcatagttcagtctttgtagaaaatttggcacttcctcaaaaaaatctgtttgaaatgattcgcttagcaacagtgagtttagcagatattaagtctagtttgcagcccaagatttatgctgaaatgatgaccgtccgtttggcggaaatcaagtccgaaccagctctatcaggagcggttgaaaatgaaattgctacgctgagacaggaagttgcccgtctcaaacaagagctttctaatgtaggtgcggttcctaaacaagttgcaccagctcctagtcgaccagctacgggcaaaacagtctatcgtgtcgatcgcaataaagtgcaatctatcttacaagaggccgtcgaaaatcctgatttagcacgtcaaaatttaattcgtttgcagaatgcctggggagaggtaattgaaagtctaggtgggccggacaaggctctgctagctggttctcaaccggttgctgccaatgaacaccatgctattcttgcttttgagtctaacttcaatgctggtcaaactatgaaacgagacaatctcaataccatgtttggtaatatcctcagtcaggcggcaggtttttcacctgagattttagctatttccatggaggaatggaaagaagttcgcgcagccttttcagccaaagccaaatcttctcaaactgaaaaagaagtagaagaaagcctgattccagaaggatttgaatttttggctgataaagtgaaggtagaggaagactaa

SEQ ID NO: 37723 - DNA, 792 bp, Streptococcus pneumoniae
ttgaaaaagaaaggaactatcatgtcagtattagagatcaaagatcttcacgttgagattgaaggaaaagaaattttaaaaggggttaacctgaccctgaaaacaggagaaattgccgctatcatgggaccaaatggtacaggtaaatcgactctttctgccgctatcatgggaaatccaaactatgaagtaactaaaggtgaagttttgtttgatggcgtaaacatccttgagttggaagtggatgagcgtgcgcgtatgggacttttccttgctatgcaatacccatcagaaatccctggaattaccaatgctgagtttcttcgtgccgctatgaatgcgggtaaagaagatgatgagaagatttcagttcgtgagtttattactaagctagatgaaaaaatggaattgcttaacatgaaagaagaaatggcagagcgttacctcaacgaaggcttctctggtggtgagaaaaaacgcaatgaaattctccaacttttgatgttggagccaacatttgctcttttggacgagattgactcaggtcttgatattgacgctcttaaagttgtgtctaaaggtgtcaatgccatgcgtggtgaaggttttggtgctatgatcatcactcactaccaacgtcttttgaactatatcacacctgatgtggtacacgtgatgatggaaggtcgtgttgtcctttctggtggtccagaattggctgcgcgtttggaacgtgaaggatacgcaaaattagctgaagaacttggctacgactacaaggaagaattgtaa

SEQ ID NO: 37724 - DNA, 441 bp, Streptococcus pneumoniae
atggcactttctaaactagatagcctttatatggcagtggtagcagaccattcgaaaaatccacatcaccaagggaagttagaagacgctgagcaaatcagtctcaacaatccgacttgtggggatgtcatcaacctctctgtcaagtttgatgcagaggaccgtttggaagatattgcttttctaaattcaggatgcacgatttcaactgcttctgctagtatgatgacagatgccgttttaggaaaaaccaaacaagaaattttagaactggcgactattttttctgaaatggttcaagggcaaaaagatgagcgtcaagaccaacttggagacgcggcattcttgtcaggtgttgccaaattccctcaaagaatcaagtgtgcaaccctaacttggaatgcccttaagaaaacaattgaaaatcaagaaaaacagtaa

SEQ ID NO: 37725 - DNA, 912 bp, Streptococcus pneumoniae
atgatttatacagtcacactcaatccatccattgactatatcgttcgtttggaccaagtcaaagttggtagtgtaaatcgtatggacagtgatgataagtttgctggtgggaaaggaatcaatgtcagccgtgtcttgaaacgtttgaatataccaaatacagcgacgggatttatcggtggctttactggtaaatttatcacagatactttagcagaggaagaaatcgagacacgttttgtccaggtggcagaagatactcgtatcaatgttaaaatcaaagcagaccaagaaacagaaatcaacggaacgggtccaactgttgaaccggttcagctagaagaattgaaagctattttatctagtctgacagcagaagatacagttgtctttgcaggttcaagtgctaaaaatctaggcaatgttatctataaggatttgatttccttgacgcgccagactggtgcgcaagtggtctgtgactttgaaggacagaccttaattgatagtttggactaccagcctcttcttgtaaaaccaaacaatcatgaacttggagcgatttttggggttaaactcgaaagtttagatgaaattgagaaatacgctcgtgagttactggctaagggtgctcaaaatgttattatctctatggctggtgatggcgcccttcttgtcacatctgagggagcttacttcgctaaaccaatcaaaggaacagtcaaaaattcagttggagctggtgattctatggttgctggattcacaggtgaatttgtcaaatcaaaagacgcagtagaagccttcaaatggggagtggcttgcggaacggcaactaccttctcagatgacttggcaacggcggaatttattaaagaaacatatggaaaagttgaggtagaaaaaagatga

SEQ ID NO: 37726 - DNA, 1953 bp, Streptococcus pneumoniae
atgaaaattcaagacctattgagaaaagatgtcatgttgctagatttgcaggcaactgaaaaaacagctgtcatcgacgagatgattaaaaatttgacagagcacggttatgtaacagattttgaaacatttaaagaaggaattttggcgcgtgaagctttgacttctactggtttgggtgatggaatcgcaatgcctcacagcaaaaacgctgctgtcaaagaagcgacagttctatttgctaagtcaaataagggtgttgactacgagagcttggatggacaagcaactgacctcttcttcatgattgcagctccagaaggtgccaatgatactcacttggcagccttggcagaattgtctcaatacttgatgaaagacggttttgcagacaaacttcgtcaagcaacatctgcagaccaagttatcgaactttttgaccaagcttcagaaaaaactgaggaacttgttcaagcacctgctaatgactctggtgactttatcgtagctgttacagcttgtacaacaggtattgcccacacttacatggcccaagaagcccttcaaaaagtagctgctgaaatgggggttggtatcaaggtcgaaaccaacggtgctagcggtgttggaaatcaactaactgcagaagatatccgtaaggctaaagctattatcattgcagcagacaaggccgttgaaatggatcgatttgatggaaaaccattgatcaatcgtccagttgctgacggtatccgtaagacagaagagctaattaacttggctctttcaggagatactgaagtctaccgtgccgctaatggtgccaaagctgcaacagcctctaacgaaaaacaaagccttggtggtgccttgtacaaacacttgatgagtggtgtatctcaaatgttaccattcgttatcggtggtggtatcatgattgcccttgccttcttgattgacggtgctttgggtgttccaaatgaaaaccttggcaatcttggttcttaccatgagttagcttctatgttcatgaaaattggtggagctgcctttggtttgatgcttccagtctttgcgggttatgttgcctactctattgctgaaaaaccgggtttggtagcaggtttcgtggctggtgctattgccaaagaaggttttgcctttggtaaaattccttatgccgcaggtggtgaagcaacttcaactcttgcaggtgtctcatctggtttcctaggtgcccttgttggtggatttatcgcaggtgccttggttcttgccatcaagaaatacgttaaagttcctcgttcactcgaaggtgctaaatcaatccttctattgccacttcttggaacaatcttgacaggatttgttatgctagctgtgaatatcccaatggctgcaatcaacactgctatgaatgacttcctaggcggtcttggaggaggttcagctgtccttcttggtatcgtccttggtggaatgatggctgttgacatgggtggaccagttaataaagcagcttatgtctttggtacaggtacgcttgcagcaactgtttcttcaggtggttctgtagccatggcagcagttatggctggaggaatggtgccaccacttgcaatctttgtcgcaactcttcttttcaaagataaatttactaaggaagaacgtaactctggtttgacaaacatcatcatgggcttgtcatttatcactgagggagcgattccatttggtgccgctgacccagctcgtgcgattccaagcttcatccttggttcagcagtagcaggtggactcgttggtcttactggtatcaaactcatggcgccacacggaggaatcttcgttatcgcccttacttcaaatgctctcctttacctcgtttctgtcttggtaggagcaatcgtaagtggtgtggtttatggttacctacgcaaaccacaagcataa

SEQ ID NO: 37727 - DNA, 2304 bp, Streptococcus pneumoniae
atggcaaacaagaatacaagtacaacaagacggagaccgtctaaagcagaactggaaagaaaagaagcgattcaacgaatgttgatttcgttaggaattgcgattttattgattttcgcagccttcaaattaggggctgcaggtataaccctttataatttaattcgcttgctagtgggtagcctagcttatctggcgatattcggcctattaatctatctcttctttttcaagtggatacgaaaacaggaaggactcttatctggctttttcaccatatttgctggcttactcttgatttttgaggcctacttggtttggaaatatggtttggacaagtccgttctaaaagggaccatggctcaggttgtgacagatctgactggttttcgaacgactagctttgctggagggggcttgatcggggtcgctctttatattccaacagcctttctcttttcaaatatcggaacttactttattggttctatcttgattttagtgggttctctcctagtcagcccttggtctgtttacgatattgctgaatttttcagtagaggctttgccaaatggtgggaagggcacgagcgtcgaaaagaggaacgctttgtcaaacaagaagaaaaagctcgccaaaaggctgagaaagaggctagattagaacaagaagagactgaaaaagccttactcgatttgcctcctgttgatatggaaacgggtgaaattctgacagaggaagctgttcaaaatcttccacctattccagaagaaaagtgggtggaaccagaaatcatcctgcctcaagctgaacttaaattccctgaacaggaagatgactcagatgacgaagatgttcaggtcgatttttcagccaaagaagcccttgaatacaaacttccaagcttacaactctttgcaccagataaaccaaaagatcagtctaaagagaagaaaattgtcagagaaaatatcaaaatcttagaagcaacctttgctagctttggtattaaggtaacagttgaacgggccgaaattgggccatcagtgaccaagtatgaagtcaagccggctgttggtgtaagggtcaaccgcatttccaatctatcagatgacctcgctctagccttggctgccaaagatgtccggattgaagcaccaatccctgggaaatccctaatcggaattgaagtgcccaactccgatattgccactgtatctttccgagaactatgggaacaatcgcaaacgaaagcagaaaatttcttggaaattcctttagggaaggctgttaatggaaccgcaagagcttttgacctttctaaaatgccccacttgctagttgcaggttcaacgggttcagggaagtcagtagcagttaacggcattattgctagcattctcatgaaggcgagaccagatcaagttaaatttatgatggtcgatcccaagatggttgagttatctgtttacaatgatattccccacctcttgattccagtcgtgaccaatccacgcaaagccagcaaggctctgcaaaaggttgtggatgaaatggaaaaccgttatgaactctttgccaaggtgggagttcggaatattgcaggttttaatgccaaggtagaagagttcaattcccagtctgagtacaagcaaattccgctaccattcattgtcgtgattgtggatgagttggctgacctcatgatggtggccagcaaggaagtggaagatgctatcatccgtcttgggcagaaggcgcgtgctgcaggtatccacatgattcttgcaactcagcgtccatctgttgatgtcatctctggtttgattaaggccaatgttccatctcgtgtagcatttgcggtttcatcaggaacagactcccgtacgattttggatgaaaatggagcagaaaaacttcttggtcgaggagacatgctctttaaaccgattgatgaaaatcatccagttcgtctccaaggctcctttatctcggatgacgatgttgagcgcattgtgaacttcatcaagactcaggcagatgcagactacgatgagagttttgatccaggtgaggtttctgaaaatgaaggagaattttcggatggagatgctggtggtgatccgctttttgaagaagctaagtctttggttatcgaaacacagaaagccagtgcgtctatgattcagcgtcgtttatcagttggatttaaccgtgcgacccgtctcatggaagaactggagatagcaggtgtcatcggtccagctgaaggtaccaaacctcgaaaagtgttacaacaataa

SEQ ID NO: 37728 - DNA, 1494 bp, Streptococcus pneumoniae
atgattacaggcgaattaaaaaataaaatcgatcagctgtgggaaattctttggacagaaggaaacgcaaatcctttaacaaatattgaacagttgacttatctcttatttatgaaagatttggatagtgtcgagcttggacgtgaaagtgatgctgaatttctagggattccttatgagggagtttttccaaaagataaacctgaataccgttggtcaacttttaaaaatataggagatgctcaggaagtttatcgtttaatgactcaggagatttttccgtttattaaaaatctcaagggggatacagatgatacagccttttcacgatatatgcgagaagctatttttcaaataaataaacctgctacgcttcaaaaggcaatttctatcttagatgtttttccaactaggggattagatgtagattttgataatgacaaacaaagtattactgatatcggagatatctatgaatatctgttatcaaaattgtcgaccgcaggtaaaaatggacagttccgtacacctcgtcacatcatcgatatgatggttgagttgatgcaaccgactatcaaagatatcatctcagatcccgctatgggttctgctggcttcttagtatctgctagccgttacttaaagcgtaagaaagatgaatgggaaaccaatacagataatatcaatcattttcataatcagatgtttcatggaaatgatacggatacgactatgttgagacttggggcgatgaacatgatgctacatggagtagaaaatccacaaatcagttaccttgactcgctgtctcaagataatgaagaagccgataaatatactttggttttagcaaatcctccttttaagggctcacttgactacaattcaacctctaatgaccttcttgcaaccgtaaaaaccaaaaaaacagaattactctttctttctcttttcttgcgaactttaaaaccaggtggacgagcagcagttatcgtacctgatggtgtcctttttggttcgtctaaagctcataaaggaattcgtcaggaaattgtagagaatcataagcttgatgctgtaatctcaatgcctagtggtgtgttcaagccttatgctggagtttcaactgccattctcatctttacaaaaactggtaatggtggtactgacaaagtctggttttacgatatgaaagcggatggtttaagtttggatgataagcgacaaccgattagcgacaatgatattccagatattatcgaacgctttcatcatcttgaaaaagaagcagaacgtcagagaacggatcaatctttctttgttccagttgctgagataaaggaaaatgattatgatttgtctatcaataaatataaagagattgagtatgaaaaagttgagtatgaaccaacagaggtcatcttaaagaaaatcaatgatttagaaaaagaaattcaagctggcttggctgaattagaaaaattactcaagtag

SEQ ID NO: 37729 - DNA, 3129 bp, Streptococcus pneumoniae
gtgagaaggatagaggagaagtgtaaattgatcgcacaactagatacaaaaacagtctatagttttatggaaagcgtcatttcgatcgaaaagtatgtgagagcagctaaagaatacggctacactcatttggctatgatggatattgacaatctttatggcgctttcgactttctagagattacaaaaaaatacggcattcatcctttgctagggcttgaaatgacagtgtttgtagatgatcaggaagtgaatttgcgctttttagctctatctagtgtgggctatcagcagttgatgaagctttcgacagccaagatgcagggggagaaaacttggtcagtcctgtcccagtacctggaggatatcgcggtcattgtgccttattttgatagagttgagtcgttagaactaggctgtgattactatataggggtttatccagaaacactagcaagcgaatttcatcatcctatcttacctctttatcgggtcaacgcttttgaaagcagggatagagaagttcttcaagttttaacagcgattaaagaaaatctaccgctcagagaagttcccttgcgttcgagacaagatgtctttatatcagcaagttctttagagaaactattccaagagtgttttccgcaagctttggacaatttagaaaagcttatttcaggcatttcttacgacttggatactagtctgaaactgcctcgttttaatccagctagaccagcagtagaggagttgagagagcgtgctgaactggggcttgttcagaaggggttgactagtaaagaatatcaagatagactagaccaagaattgtctgttattcatgatatgggctttgatgattatttcttggttgtttgggatttgttgcgttttggacgatcgaatggctattatatgggaatgggaaggggttctgcagtaggcagtttggtttcttatgccttagacatcacggggattgacccagtagagaaaaatctgatttttgaacgctttcttaatcgtgaacgctataccatgcctgatattgatattgatatcccagatatttatcgtccagattttatcagatatgttggtaataaatatggtagtaaacatgcggcacaaatcgttactttttcaacctttggagccaagcaagctcttcgagatgtcttgaaacgctttggtgtgccagagtatgaattatctgcaattactaagaaaatcagttttcgtgacaatcttaagtcggcctatgagggcaatctccagtttcgtcagcaaatcaatagtaagttagaataccaaaaagcttttgagattgcttgcaagatagagggctatccaagacaaacctctgtccatgcggctggtgttgtaattagtgaccaagatttaaccaactatattcctctaaagtatggtgatgaaattccactgactcagtatgatgctcatggagttgaggctagcggacttttgaagatggactttctgggactacgaaatttgacctttgttcagaagatgcaagagttgcttgctgaaatagaaggtattcaccttaaaattgaagaaatagatttggaagacaaagaaacgttagctttatttgcctctggaaatacaaaaggtatctttcaatttgagcaaccaggtgccattcgtctgcttaagcgtgtgcaaccagtctgttttgaagatgtcgtcgcgactacttctctaaatcgaccgggtgctagtgactatatcaataattttgtggcaagaaagcatgggcaggaagaagtgactgttctggatccagtactggaggatattttggctccaacctacggcataatgctctatcaggagcaggttatgcaggttgcccagcgatttgccggatttagtcttgggaaagccgatattttgcgtcgggctatggggaaaaaggatgcctctgccatgcatgagatgagggcttcctttattcaaggttcattagaagctggtcatactgtggaaaaagcagagcaggtctttgatgttatggagaagtttgcaggttatggttttaacaggtcacacgcctatgcctactcagccttggccttccagttggcttattttaaaacacattatccagccattttttatcaggtcatgttaaattcttccaacagtgattacttaatagatgcacttgaagcaggttttgaagtagcctctctatccatcaacaccattccctatcacgataaaattgccaacaaggccatctatctaggtttgaaatccattaaaggagtcagtaatgatttagctctctggattattgaaaatagaccttattctaacattgaagattttatagctaaattacctgagaattatctgaaacttcctctgctagaacctttggtaaaagttggtcttttcgattcatttgaaaaaaatcgtcaaaaagtatttaataatttagctaatctatttgaatttgtgaaagagttgggaagtttgtttggagatgctatttatagttggcaggaatcggaagattggacggaacaagaaaaattttatatggaacaagagcttttagggataggtgtcagcaaacatccactacaagctattgcaagtaaggctatttacccgattaccccaatcggaaatttgtcagaaaatagctatgctattatcttggttgaagttcagaaaataaaagtgattcgtaccaaaaagggtgaaaatatggccttcttacaggcagatgatagtaagaaaaaattggatgtcactctcttttcagacttatatcgtcaggttggacaggaaataaaagagggagccttctactatgtaaaaggaaaaatacaatcacgtgatggccgtctgcaaatgattgcacaagaaataagagaagcagttgctgaacgcttttggatacaggtgaaaaatcatgaatcggatcaagaaatttcacgcattttagaacaatttaaaggcccaatcccagtcatcatccggtatgaagaggaacagaaaaccatcgtttctccccatcattttgtagctaaatccaatgaattagaggagaaattgaatgaaatcgttatgaaaacgatttatcgctaa

SEQ ID NO: 37730 - DNA, 1008 bp, Streptococcus pneumoniae
atgaaacgtattgctgttttgactagtggcggagacgcacctggtatgaacgctgccatccgtgcagttgttcgtcaagcaatttcagaaggaatggaagtgtttggtatctatgacggatatgctggtatggttgccggtgaaattcatcccctagatgcagcttcagtaggggacatcatttctcgtggtggtacttttcttcactcagctcgttatccagagttcgctcaacttgaagggcaacttaaagggattgagcaattgaaaaaacacggaattgaaggtgtagttgttatcggtggtgacggatcttaccacggcgctatgcgtttgactgaacatggcttcccagctattggtcttccaggtacaatcgataacgatatcgttggtactgactttacaatcggttttgacacagcggttactactgccatggacgctatcgataagattcgtgatacatcatcaagtcaccgtcgtacttttgtaatcgaagttatgggacgtaacgctggtgatatcgctctttgggctggtattgcaactggtgctgatgaaatcatcatccctgaagcaggcttcaagatggaagatatcgtagcaagcatcaaagctggttatgaatgtggtaaaaaacacaatatcatcgtcttagctgaaggtgtgatgtcagcggctgaatttggtcaaaaacttaaagaagctggagatataagcgaccttcgtgtaacagaacttggacatattcaacgtggtggttctccaactccgcgtgaccgtgttttggcgtcacgtatgggtgcacatgctgttaaacttcttaaagaaggtatcggtggtgttgcggttggtattcgtaacgaaaaaatggttgaaaatccaattcttggtactgcagaagaaggggcattgtttagccttactgcagaaggtaagattgtggttaacaacccacacgaagccgatattgagctatctagcttgaataagagcttgtcataa

SEQ ID NO: 37731 - DNA, 1506 bp, Streptococcus pneumoniae
atgaacaaacgtgtaaaaatcgttgcaactttgggtcctgcggtagaaatccgtggtggtaaaaaattcggtgaggacggatactggggtgaaaaacttgatgttgaagcttcagctaaaaacattgctaaattgattgaagctggtgctaacacattccgattcaacttctcacacggcgaccaccaagaacaaggtgagcgtatggcaactgttaaacttgcggaaaaaattgcaggtaaaaaagttggtttccttcttgatacaaaaggacctgaaatccgtacagaattgttcgaaggtgaagctaaagaatattcatacaaaactggtgaaaaaattcgtgttgcaactaaacaaggaatcaaatcaactcgtgaagtgattgcgttgaacgttgctggtgctcttgatatctatgatgatgttgaagttggtcgtcaagttttggttgacgatggtaaacttggtcttcgtgtggttgctaaagatgatgcaactcgtgaatttgaagttgaagttgaaaacgatggtatcatcgctaaacaaaaaggtgtgaacatccctaacactaaaattcctttcccagctcttgctgaacgcgataacgacgatatccgtttcggtcttgaacaaggtatcaacttcatcgcaatttcattcgtacgtactgcaaaagatgtgaacgaagttcgtgcaatctgtgaagaaactggaaacggacatgttcaattgttcgctaaaatcgaaaaccaacaaggtatcgataacttagacgaaatcatcgaagcagctgatggtattatgattgctcgtggtgatatgggtatcgaagtaccgttcgaaatggttccagtttatcaaaaaatgattatcaagaaagtcaatgctgcaggtaaagttgttatcactgcaacaaacatgcttgaaacaatgactgaaaaaccacgtgcaactcgttcagaagtatcagacgtattcaacgctgttatcgacggaactgacgctacaatgctgtcaggcgagtctgcaaacggtaaatacccactcgagtcagtaactacaatggctacaatcgacaagaacgctcaagctcttcttaatgaatacggacgtcttgattcagattcatttgagcgtaactctaagacagaagtaatggcttctgctgttaaagatgctactagctcaatggatatcaaattggttgtaactcttactaagacaggtcatactgcacgtttgatttctaaataccgtccaaatgctgacatcttagcattgacatttgacgaattgacagaacgtggcttgatgttgaactggggtgttatcccaatgttgacagatgctccatcttcaactgacgatatgttcgaaatcgctgaacgtaaagcggtagaagcaggtctcgttgagtcaggcgatgatatcgttatcgttgctggtgtgccagtaggagaagctgttcgcacaaacacaatgcgtatccgcacagtacgttaa

SEQ ID NO: 37732 - DNA, 2148 bp, Streptococcus pneumoniae
ttgtggtataatagatttatggataaaaaatatgaaaaaatctctcaggatttgggagtgacgttaaagcaaattgataccgttctaagtttgacagctgaaggggcgactattccctttatcgcgcgttatcgcaaggacatgactggtagtctggatgaggtggcgattaaggctattattgatttggataaaagtctgacaaatctcaatgaccgtaaggaagctgtcttagctaagattcaagaacaaggtaagttgaccaaggaattggaagaagctatcttagttgccgaaaaattagcagacgttgaagaactctatcttccttataaggaaaagcgtcgtaccaaggcaaccattgcccgtgaagctggactctttcctcttgctcgtttgattttgcagaatatagttgacttagagaaagaagctgaaaagttcgtctgtgaaggatttgcgactggcaaggaagccttgaccggtgcagttgatattttggtcgaagccttatcggaagatgtgaccttgcgttctatgacttatcaggaagtgctgagacactctaaactcacttctcaagccaaggatgaaagtcttgatgaaaagcaggtttttcagatttattatgatttttcagagacagttggaactatgcaaggctatcgtaccttggctctcaatcgtggggagaaacttggtgtcttgaagatcggttttgaacatgcgacggaccgtattcttgccttctttgctactcgtttcaaggtgaaaaatgcttatattgatgaagttgttcagcaatccgttaagaaaaaggtcttgcctgctattgagcgtcgtattcggacagaattaactgagaaagctgaagagggagctatccaacttttttctgacaatctgcgcaatctcctcttggttgctccactgaaagggcgcgtggttcttggatttgacccagcctttcgtacaggtgccaagttagctgtcgtggatgcaacaggaaaaatgctgacaactcaggttatttatcctgttaaaccagcatcagctcgtcaaatcgaagaagccaagaaagatttagcagatttaattggtcaatacggtgtagagattattgccattggaaatggaacggccagtcgtgaaagtgaagcttttgtagcggaagttctgaaagatttccctgaagtcagctatgttatcgttaatgaaagtggtgcttctgtctattctgccagcgaacttgctcgtcaggagtttccagacttgaccgttgaaaaacgctctgccatttctatcgcccgtcgtttgcaagatcctcttgcggaattggtcaaaatcgatcctaagtcaattggtgtcggtcaataccaacacgatgtcagtcagaagaaactatctgagagtctggactttgttgtcgatacagtggttaaccaagttggtgtcaatgtcaatacagctagcccagctcttctttcacacgtagctggactcaacaaaactatctctgaaaatattgtcaaataccgcgaggaagaaggaaaaatcacttcacgcgcccaaatcaagaaagttcctcgtctgggagccaaggcctttgagcaggctgctggtttccttcgtatccctgaaagtagcaatatccttgataatacaggagttcacccagagaattacactgcagttaaggaactcttcaaacgtttagatattaaagacctaaacgaagaagcccaaagcaaactcaagtccctttcagtcaaggaaatggctcaagagctagacctcggtccagaaacccttaaagatatcattgcagatcttctcaaaccaggtcgagatttccgtgattcctttgacgcacctgtgcttcgccaagatgtcctagatatcaaagacctagtggtaggtcagaagctagaaggtgttgtgcgtaacgttgttgacttcggtgccttcgttgatatcgggattcacgaggacggcttgattcatatttctcatatgagtcgcaagtttatcaaacaccctagtcaagtggtgtcagttggagatttggtgaccgtttgggtcaagaaaattgatactgaacgtgaaaaagttaatctgtcgctcctcgctccaaatgaaactgactga

SEQ ID NO: 37733 - DNA, 909 bp, Streptococcus pneumoniae
atgaacattcaacaattacgctatgttgtggctattgccaatagtggtacttttcgtgaagctgctgaaaagatgtatgttagtcagccgagtctgtctatttctgttcgtgatttggaaaaagagttgggctttaagattttccgtcggaccagctcagggactttcttgacccgtcgtgggatggaattttatgaaaaagcgcaagaattggttaaaggatttgatatttttcaaaatcagtatgccaatcctgaagaagaaaaagatgaattttccgttgctagccagcactatgacttcttaccaccaactattacggccttttcagagcgctatcctgactataagaacttccgtatttttgaatcaactactgttcaaatattagatgaagtggcgcaagggcatagtgagattgggattatctacctcaacaatcaaaataaaaaggggattatgcaacgggttgaaaagttaggtctggaggtcatcgaattgattcctttccatacccatatttatctctgtgagggtcatcctttagcccagaaagaggaattagtcatggaggatttagcggatttaccaacggttcgtttcactcaagagaaagacgagtacctttattattcagagaactttgtcgataccagcgctagctcacagatgtttaatgtgacagaccgtgccaccttgaatggtattttggagcggacggacgcctatgcgacaggttctggatttttagatagtgacagtgttaatggcattacagttattcgtctcaaggataacctagataaccgcatggtctatgttaaacgtgaagaagtggagcttagtcaagctgggactctcttcgtagaagtcatgcaagaatattttgatcaaaagaggaaatcatga

SEQ ID NO: 37734 - DNA, 1263 bp, Streptococcus pneumoniae
atggtgagtagacaagaacaatttgaacaggtacaggctgttaaaaaatcgattaacacagctagtgaagaagtgaaaaaccaagccttgctagccatggctgatcacttagtggctgctactgaggaaattttagcggctaatgccctcgatatggcagcggctaaggggaaaatctcagatgtgatgttggatcgtctttatttggatgcagatcgtatagaagcgatggcaagaggaattcgtgaagtggttgccttaccagatccaatcggtgaagttttagaaacaagtcagcttgaaaatggtttggttatcacaaaaaaacgtgtagctatgggtgtcatcggtattatctatgaaagccgtccaaatgtgacgtctgatgcggctgctttgactcttaagagtggaaatgcggttgttcttcgtagtggtaaggatgcctatcaaacaacccatgccattgtcacagccttgaagaagggcttggagacgactactattcatccaaatgtgattcaactggtggaggatactagccgtgaaagtagttatgctatgatgaaggccaagggctatctagaccttctcattcctcgtggaggagctggcttgatcaatgcagtagttgagaatgccattgtacctgttatcgagacagggactgggattgtccatgtctatgtggataaggatgcagacgaagacaaggcgctgtctatcatcaacaatgctaaaaccagtcgtccttctgtttgtaatgccatggaggttctgctggttcatgaaaacaaggcagcaagcatccttcctcgcttggatcaaatgctggttgcagagcgtaaggaagctggactggaaccaattcaattccgcttggatagcaaagcaagccagtttgtttcaggtcaagcagctgagacccaagactttgacaccgagtttttagactatgtccttgctgttaaggttgtgagcagtttagaagaagcggttgcgcacattgaatcccacagcacccatcattcggatgctattgtgacggaaaatgctgaagctgcagcatactttacagatcaagtggactctgcagcggtgtatgttaatgcctcaactcgtttcacagatggaggacaatttggtcttggttgtgaaatggggatttctactcagaaattgcacgcgcgtggtccaatgggcttgaaagagttgaccagctacaagtatgtggttgctggtgatgggcagataagggagtaa

SEQ ID NO: 37735 - DNA, 639 bp, Streptococcus pneumoniae
atgtcaaaaggatttttagtctctcttgagggaccagagggagcaggcaagaccagtgttttagaggctctgctaccaattttagaggaaaaaggagtagaggtgctgacgacccgtgaacctggcggagtcttgattggggagaagattcgggaagtgattttggatccaagtcatactcagatggatgctaaaacagagctacttctctatattgccagtcgcagacagcatttggtggaaaaagttcttccagcccttgaagctggcaagttggtcatcatggatcgttttatcgatagttctgttgcctatcagggatttggtcgtggcttagatattgaagccattgactggctcaatcagtttgcgacagatggcctcaaacccgatttgacactctattttgacatcgaggtggaagaagggctggctcgtattgctgctaatagtgaccgcgaggttaatcgtttggatttggaagggttggacttgcataaaaaagttcgtcaaggctacctttctcttctggataaagagggaaatcgcattgtcaagattgatgctagtctccctttggagcaagttgtggaaactaccaatgctgtcttgtttgacggaatgggcttggccaaatga

SEQ ID NO: 37736 - DNA, 891 bp, Streptococcus pneumoniae
atgaaacaagatcaactaaaggcttggcaaccagctcagtttgaccgttttgtccgtatcttagaacaagaccagctcaatcacgcctatctcttttcaggtttctttggaagcttggaaatggcgcaatttttagctaagagccttttttgtacggataaagttggcgtcttaccatgtgagaaatgccgaagttgcaagctgattgaacaggaagagtttccagatgtcaccttgattaagccagtcaatcaggtcatcaagacagaacgcattcgggaattggtgggacagttttctcaagcagggattgaaagccagcaacaggtctttatcatcgagcaagcggataaaatgcatcccaacgcagccaattctctgctcaaggtcatcgaagaaccccagagtgaagtttatattttcttcttgactagcgatgaggaaaagatgttaccgacaatccgaagtcggactcagatcttccactttaaaaagcaagaagaaaaacttatcttactcttagaacaaatgggacttgttaagaaaaaagcgactcttttagctaagtttagtcaatcgcgagctgaagcagaaaagttggcacatcaggcaagtttttggaccttggtcgatgaaagtgaacgcctgctgacttggttagtagctaagaaaaaagaaagttatctacaggttgccaaattagccaacttggcagatgataaggaaaaacaggatcaggttttacggattcttgaagttctctgtgggcaggacctcttgcaggtaagagtaagagtgattctacaagatttactagaagctagaaaaatgtggcaagctaatgtcagctttcaaaatgccatggaatatctggtcttgaaagaaatataa

SEQ ID NO: 37737 - DNA, 870 bp, Streptococcus pneumoniae
atgcagattcaaaaaagttttaaggggcagtctccctatggcaagctgtatctagtggcaacgccgattggcaatctagatgatatgacctttcgagctatccagaccttgaaagaagtagattggattgctgctgaggatacgcgcaatacaggtcttttgctcaagcattttgacatttccaccaagcagatcagttttcatgagcacaatgccaaggaaaaaattcctgatttgattggtttcttgaaagcagggcaaagtattgctcaggtctctgatgccggtttgcctagcatttcagaccctggtcatgatttagttaaggcagctattgaggaagaaattgcagttgtgacagttccaggtgcctctgcaggaatttctgccttgattgccagtggtttagcgccacagccacatatcttttacggttttttaccgagaaaatcaggtcagcagaagcaattttttggcttgaaaaaagattatcctgaaacacagattttttatgaatcacctcatcgtgtagcagacacgttggaaaatatgttagaagtctacggtgaccgctccgttgtcttggtcagggaattgaccaaaatctatgaagaataccaacgaggtactatctctgagttattagaaagcattgctgaaacgccactcaagggcgaatgtcttctcattgttgagggtgccagtcagggtgtggaggaaaaggacgaggaagacttgttcgtagaaattcaaacccgcatccagcaaggtgtgaagaaaaaccaagctatcaaggaagtcgctaagatttaccagtggaataaaagtcagctctacgctgcctaccacgactgggaagaaaaacaataa

SEQ ID NO: 37738 - DNA, 1335 bp, Streptococcus pneumoniae
gtgtctcaatcttatatcaatgttatcggtgctggtttggcaggttctgaagcagcctaccaaatcgcagagcgtggtattccagttaaactttatgaaatgcgtggtgtcaagtcaacacctcagcacaaaacagacaattttgctgagttggtttgttccaattccttgcgtggagatgctttgacaaatgctgttggcctccttaaggaagaaatgcgtcgcttgggttctgtgattttggaatctgctgaggctacacgtgttcctgcaggtggtgcccttgcagtggaccgtgatggtttctctcaaatggtgaccgaaaaagttgccaaccaccccttgattgaagtggttcgtgatgaaattacagaattgccgacagatgttattacggttatcgctactggtcctttgacaagtgatgccttggctgaaaagattcatgcccttaatgacggtgatggtttttatttctacgatgcggcagcgcctattatcgatgtcaacactatcgatatgagcaaggtctacctcaaatcacgttatgataagggagaagcggcctacctcaatgcccctatgaccaagcaagaatttatggatttccatgaagctttggtcaatgcagaagaagcaccgcttaattcttttgaaaaagaaaagtactttgaaggatgtatgcctatcgaagtcatggccaaacgtggcattaaaaccatgctttatggtcctatgaaaccagttggtcttgagtatccggacgactacacaggacctcgtgatggagaatttaaaacaccttatgcggttgtccagctccgtcaggataatgcagctggtagcctatacaatattgttggtttccagacccacctcaaatggggagaacaaaagcgtgtcttccaaatgattccgggtcttgaaaatgcggagtttgtccgttatggtgtcatgcatcgcaattcttacatggattcaccaaatcttcttgagcagacttaccgttccaagaaacaaccaaatctcttctttgctggtcagatgacgggggtggaaggctatgttgagtcggcggcttcgggcttagttgcgggaattaacgcagctcgtctcttcaaggaagaaagcgaggttattttccccgagacgacagcgattggaagcttagctcattacattacccatgccgacagcaaacatttccaaccaatgaatgtcaattttgggatcatcaaggagttggaaggcgagcgtatccgtgataagaaggctcgttatgaaaaaattgcagagcgtgcccttgccgacttagaggaatttttgactgtctaa

SEQ ID NO: 37739 - DNA, 744 bp, Streptococcus pneumoniae
gtgaaaatggcgaatcccaagtataaacgtattttaatcaagttatcaggtgaagcccttgccggtgaacgtggcgtagggattgatatccaaacagttcaaacaatcgcaaaagagattcaagaagttcatagcttaggtatcgaaattgcccttgttattggtggaggaaatctttggcgtggagaacctgcagcagaagcaggtatggaccgtgttcaggcagattacactggaatgcttgggactgttatgaatgctcttgtgatggcagattcattgcaacaagttggggttgatacgcgtgtacaaacagctattgctatgcaacaagtggcagagccttatgtccgtggacgtgcccttcgtcaccttgaaaaaggccgtatcgttatctttggtgctggaattggttcaccatacttctcgacagatacaacagcggcccttcgtgcagctgaaatcgaagcagatgccatcctcatggctaaaaatggcgtcgatggtgtgtacaatgccgatcctaagaaggacaagacagccgttaagtttgaagaattgacccaccgtgatgttatcaacaaaggtcttcgtatcatggactcaacagcctcaaccctctcaatggacaacgacattgacttggttgtcttcaacatgaaccaatcaggcaacatcaaacgtgtcgtatttggtgaaaatatcggaacaacagtttcaaataatatcgaagaaaaggaataa

SEQ ID NO: 37740 - DNA, 558 bp, Streptococcus pneumoniae
atggctaacgtaattattgaaaaagctaaagagagaatgacccaatctcaccaatcacttgctcgtgaatttggtggtatccgtgctggtcgtgccaatgcaagcttgcttgaccgtgtacatgtagaatactatggagtcgaaactcctcttaaccaaatcgcttcaattacgattccagaagcgcgtgttttgttggtaacaccatttgacaagtcttcattgaaagacatcgaccgtgccttgaacgcttctgatcttggtatcacaccggctaatgacggttctgtgattcgcttggttatcccagctcttacagaagaaactcgtcgtgaccttgctaaagaagtgaagaaggtcggcgaaaatgctaaagtggctgtccgcaatatccgtcgcgatgctatggacgaagctaagaaacaagaaaaagcaaaagaaatcactgaagacgaattgaagactcttgaaaaagatattcaaaaagtaacagacgatgctgttaaacacatcgacgacatgactgctaacaaagagaaagaacttttggaagtctaa

SEQ ID NO: 37741 - DNA, 426 bp, Streptococcus pneumoniae
atgttaatcggaatcccaaaagaaattaaaaataacgaaaactgtgtcgccctcacacctgcaggtgttcatagcttagttagtcgtggtcatcgtgtccttatcgaaacaaatgctggtctcggttctggctttactgatgctgactatcaaaagcaaggagctgagattgtcgctactgctggtgaagcttgggcagcagagttggttgtgaaagtaaaagaacctttaagttctgaatacggttacttgcgcgacgatcttcttctcttcacctacttgcacatggccgctgctccagaattagcagatgctatgttagcagcaaaaacaacaggaattgcctatgaaactgttcgtgacaatcaaggacaactaccgctcctcgttcctatgagtgaggttgcaggtcgtatggctgtttaa

SEQ ID NO: 37742 - DNA, 588 bp, Streptococcus pneumoniae
gtgcgggcttgtatatttacgagtccgctattgtttttctctaataaaacaaaagaggtgaaaaccatagcaaagcaagacttattcatcaatgatgagattcgtgtacgtgaagttcgcttgattggtcttgagggagaacagctaggcatcaagccactcagtgaagcgcaagctttggctgataacgctaatgttgacctagtattgattcaaccccaagccaaaccgcctgttgcaaaaattatggactacggtaagttcaaatttgagtaccagaagaagcaaaaagaacaacgtaaaaaacaaagcgttgttactgtgaaagaagttcgtctaagtccaactattgacaagggtgactttgatacaaaacttcgtaatgcacgtaagttccttgaaaaaggaaataaagttaaggtatctattcgctttaagggtcgtatgattacccataaagagattggtgcaaaagttttagccgagtttgctgaagcaactcaagatattgccatcatcgaacaacgtgctaaaatggatggacgtcaaatgttcatgcaattggcgccagcgactgacaaaaaataa

SEQ ID NO: 37743 - DNA, 201 bp, Streptococcus pneumoniae
atgccaaaacaaaaaacacaccgcgcatcagctaaacgtttcaaacgtacaggttctggtggacttaaacgtttccgtgcttacacttctcaccgtttccacggaaaaactaagaaacaacgtcgtcatcttcgtaaagcatctatggtgcattcaggagattacaaacgtatcaaagcaatgcttactcgcttgaaataa

SEQ ID NO: 37744 - DNA, 360 bp, Streptococcus pneumoniae
atggcacgtgttaaaggtggcgttgtatcacgcaaacgtcgtaaacgtattcttaaattagcaaaaggttactatggagctaaacacatcttgttccgtactgcaaaagaacaagtaatgaactcttactactatgcataccgtgaccgtcgtcagaaaaaacgtgacttccgcaaattgtggattactcgtatcaatgcggcagctcgtatgaacggactttcatactcacaattgatgcatggtttgaaattggctgagattgaagttaaccgtaaaatgcttgctgacttggctgttaacgatgcagtagctttcacagctcttgcagatgcagctaaagcaaaacttggtaaataa

SEQ ID NO: 37745 - DNA, 432 bp, Streptococcus pneumoniae
atgagactggaacaggattgtccagtctttttaaaaataaaggagaaagatatggcttcaaaaatgctacacacttgcttacgagtagaaaatcttgaaaaatcaatcgcattttatcaagatgcttttggttttaaagaattgcgtcgcagagattttccagaccatgccttcacgattgtctatctaggtcttgagggtgatgactatgagttggagttgacttataactacgatcacggtccgtatgtggttggtgatgggtttgcccatatcgccctcagtacacctgatcttgaggcacttcatcaagaacacagtgcaaaaggctatgaagtgactgagccaaatggtctaccaggaactacaccaaactattactttgtcaaagaccctgatggatataaggtcgaagtcattcgtgaaaaataa

SEQ ID NO: 37746 - DNA, 1683 bp, Streptococcus pneumoniae
atggaatacaatcacaaggagagaacgatgtcatttgacggattttttttacaccacatagttgaggaattgcgaagcgaattagtgaatggtcgcatccagaaaatcaatcagccttttgaacaagagttggtcttgcaaatccgcagcaatcgccaaagccatcgcctgctcctttctgcccatccagtttttggacgcattcagctgacccaaacgacttttgaaaatccagctcaaccttctacctttatcatggttttgagaaagtatttgcagggggccctgattgagtcgattgagcaagtggaaaatgaccgtattgtggaaatgacagtttccaataaaaacgagattggagaccatatccaggctaccttgattatcgaaattatggggaaacacagtaatattctactggtcgataaaagcagtcataaaatcctcgaagttatcaaacacgtcggtttttcacaaaatagctaccgcaccttacttccaggatcgacctatatcgctccgccaagtacagaatctctcaatccttttactatcaaggatgaaaagctctttgaaatcctgcaaacccaagaactaacagcaaaaaatcttcaaagcctctttcaaggtctgggacgcgatacggcaaatgaattggaaaggatactggttagtgaaaaactttccgctttccgaaattttttcaatcaagaaaccaagccatgcttgactgagacttccttcagtccagttccttttgcaaatcaggcgggagagccttttgcaaatctttctgatttgttggacacctactataagaataaggctgagcgcgaccgcgtcaaacaacaggccagtgaactgattcgtcgtgttgaaaatgaacttcagaaaaaccgacacaaactcaaaaaacaggaaagagagttactggcgacagacaacgctgaagaatttcgtcaaaaaggagaattgctgacaaccttcctccaccaagtgcctaacgaccaagaccaggttatcctagacaactactataccaaccaacctatcatgattgcgcttgataaggctctgactcccaaccagaatgcccaacgctattttaaacggtatcagaaactcaaagaagctgtcaaatacttgactgatttgattgaagaaaccaaagccactattctctatctggaaagtgtagaaaccgtcctcaaccaagctggactggaagaaatcgctgaaatccgtgaagaattgattcaaacaggttttatccgcagaagacaacgggagaaaatccagaaacgcaaaaaactagaacaatatctagcaagcgatggcaaaaccatcatctatgtcggacgaaacaatcttcaaaatgaggaattgacctttaaaatggcccgcaaggaggaactttggttccatgctaaggacattcctggaagccatgttgtcatctcaggaaatcttgacccatctgatgcagtcaagacagacgcagcagagttagctgcctacttctctcaagggcgcctgtcgaatctggtgcaggtagatatgattgaagtcaaaaaactcaataaaccaactggtggaaaacccggctttgtcacttacacaggacaaaagaccctccgcgtcacaccagactccaaaaaaattgcatccatgaaaaaatcctga

SEQ ID NO: 37747 - DNA, 396 bp, Streptococcus pneumoniae
atggactcacaagacaataaacgaaaatggaaaaatcgtgacctgatatccagtttagaatttgccatcacagggatttttactgctatcaaggaagaacgcaatatgcgaaaacatgcagtgacggctctagtggtcatccttgcaggttttggttttcaggtgtcacgaatcgaatggctctttctcctattgagcattttcttggtggtagcctttgaaattatcaattctgctatcgaaaatgtggtggatttggccagtcactatcacttttccatgctggctaaaaatgccaaggatatggcggctggcgcggtattagtggtttctctttttgcagccttaacaggcgcattgatttttctcccacgaatctgggatttattattttaa

SEQ ID NO: 37748 - DNA, 900 bp, Streptococcus pneumoniae
atgacttttaaatcaggctttgtagccattttaggacgtcccaatgttgggaagtcaacctttttaaatcacgttatggggcaaaagattgccatcatgagtgacaaggcgcagacaacgcgcaataaaatcatgggaatttacacgactgataaggagcaaattgtctttatcgacacaccagggattcacaaacctaaaacagctctcggagatttcatggttgagtctgcctacagtacccttcgcgaagtggacactgttcttttcatggtgcctgctgatgaagcgcgtggtaagggggacgatatgattatcgagcgtctcaaggctgccaaggttcctgtgattttggtggtgaataaaatcgataaggtccatccagaccagctcttgtctcagattgatgacttccgtaatcaaatggactttaaggaaattgttccaatctcagcccttcagggaaataacgtgtctcgtctagtggatattttgagtgaaaatctggatgaaggtttccaatatttcccgtctgatcaaatcacagatcatccagaacgtttcttagtttcagaaatggttcgcgagaaagtcttgcacctaactcgtgaagagattccgcattctgtagcagtagttgttgactctatgaaacgagacgaagagacagacaaggttcacatccgtgcaaccatcatggtcgagcgcgatagccaaaaagggattatcatcggtaaaggtggcgctatgcttaagaaaatcggtagtatggcccgtcgtgatatcgaactcatgctaggagacaaggtcttcctagaaacctgggtcaaggtcaagaaaaactggcgcgataaaaagctagatttggctgactttggctataatgaaagagaatactaa

SEQ ID NO: 37749 - DNA, 825 bp, Streptococcus pneumoniae
atgcctgaattacctgaggttgaaaccgtttgtcgtggcttagaaaaattgattataggaaagaagatttcgagtatagaaattcgctaccccaagatgattaagacggatttggaagagtttcaaagggaattgcctagtcagattatcgagtcaatgggacgtcgtggaaaatatttgcttttttatctgacagacaaggtcttgatttcccatttgcggatggagggcaagtatttttactatccagaccaaggacctgaacgcaagcatgcccatgttttctttcattttgaagatggtggcacgcttgtttatgaggatgttcgcaagtttggaaccatggaactcttggtgcctgaccttttagacgcctactttatttctaaaaaattaggtcctgaaccaagcgaacaagactttgatttacaggtctttcaagctgcccttgccaagtccaaaaagcctatcaaatcccatctcctagaccagaccttggtagctggacttggcaatatctatgtggatgaggttctctggcgagctcaggttcatccagctagaccttcccagactttgacagcagaagaagcgactgccattcatgaccagaccattgctgttttgggccaggctgttgaaaaaggcggttccaccattcggacttataccaatgcctttggggaagatggaagcatgcaggactttcatcaggtctatgataagactggtcaagaatgtgtacgctgtggtaccatcattgagaaaattcaactaggcggacgtggaacccacttttgtccaaactgtcaaaggagggactga

SEQ ID NO: 37750 - DNA, 1200 bp, Streptococcus pneumoniae
atgacagagattaactggaaggataatctgcgtattgcctggtttggtaattttctgacaggagccagtatttctttggttgtaccttttatgcccatcttcgtggaaaatctaggtgtagggagtcagcaagtcgctttttatgcaggcttagcaatttctgtctctgctatttccgcggcgctcttttctcctatttggggtattcttgctgacaaatacggccgaaaacccatgatgattcgggcaggtcttgctatgactatcactatgggaggcttggcctttgtcccaaatatctattggttaatctttcttcgtttactaaacggtgtatttgcaggttttgttcctaatgcaacggcactgatagccagtcaggttccaaaggagaaatcaggctctgccttaggtactttgtctacaggcgtagttgcaggtactctaaccggtccctttattggtggctttatcgcagaattatttggcattcgtacagttttcttactggttggtagttttctatttttagctgctattttgactatttgctttatcaaggaagattttcaaccagtagccaaggaaaaggctattccaacaaaggaattatttacctcggttaaatatccctatcttttgctcaatctctttttaaccagttttgtcatccaattttcagctcaatcgatcggccctattttggctctttatgtacgcgacttagggcagacagagaatcttctttttgtctctggtttgattgtgtccagtatgggcttttccagtatgatgagtgcaggagtcatgggcaagctaggtgacaaggtgggcaatcatcgtctcttggttgtcgcccagttttattcagtcatcatctatctcctctgtgccaatgcctctagcccccttcaactaggactctatcgtttcctctttggcttgggaaccggtgccttgattccaggggttaatgccctactcagcaaaatgactcccaaagccggcatttcgagggtctttgccttcaatcaggtattcttttatctgggaggtgttgttggtcccatggcaggttctgcagtagcaggtcaatttggctaccatgctgtcttttatgcgacaagcctttgtgttgcctttagttgtctctttaacctgattcaatttcgaacattattaaaagtaaaggaaatctag

SEQ ID NO: 37751 - DNA, 468 bp, Streptococcus pneumoniae
atggcaaagggcgagggaaaggtcgtcgcacaaaataaaaaggcacgccacgactatacaatcgtagatacgctagaggcagggatggtcctgactggaactgaaatcaagagtgtacgagctgctcgaattaatctcaaggatggctttgctcaagtgaaaaatggagaagtttggctgagtaatgttcatatcgcgccttacgaagagggcaatatctggaaccaggaaccagaacgtcgtcgtaaactcctgctccataaaaagcaaattcaaaaattggaacaagagaccaaagggacaggaatgaccttagttccccttaaggtctatataaaagatggctacgctaagcttcttttaggacttgccaaagggaagcatgactatgacaaacgggagtctatcaaacgtcgtgagcaaaatcgagatatcgcgcgtgtgatgaaagctgttaatcagcgataa

SEQ ID NO: 37752 - DNA, 243 bp, Streptococcus pneumoniae
atgttggaacaggcattcaaagagaagcactacgagaatacgattctccatagtgaccaaggctggcaataccaacacgattcttatcatcgcttcctagagagtaagggaattcaagcatctatgtcacgcaaaggaaacagccaagacaacggtaggatggaatctttctttggcattttaaaatccgaaatgttttatggctatgagcaaacatttaaatcacttaatcaattggaataa

SEQ ID NO: 37753 - DNA, 1440 bp, Streptococcus pneumoniae
gtgcggaatgatttgaaatatggtataataaaagggaatttctacagaaaagagaagattatgtcaaattttgccattattttagcagcgggtaaagggactcgcatgaaatctgatttgccaaaagttttgcacaaggttgcgggtatttctatgttggaacatgttttccgtagtgtgggagctatccaacctgaaaagacagtaacagttgtaggacacaaggcagaattggttgaggaggtcttggctgaacagacagaatttgtgactcaatctgaacagttgggaactggtcatgcagttatgatgacagagcctatcttagaaggtttgtcaggacacaccttggtcattgcaggagatactcctttaatcactggtgaaagcttgaaaaacttgattgatttccatatcaatcataaaaatgtggccactatcttgactgctgaaacggataatccttttggctatggacgaattgttcgtaatgacaatgctgaggttcttcgtattgttgagcagaaggatgctacagattttgaaaagcaaatcaaggaaatcaacactggaacatacgtctttgacaacgagcgtttgtttgaggctttgaaaaatatcaataccaataacgctcaaggcgaatactatattacagacgtcattggtattttccgtgaaactggtgaaaaagttggcgcttatactttgaaagattttgatgaaagtcttggggtaaatgaccgtgtggcgcttgcgacagctgagtcagttatgcgtcgtcgcatcaatcataaacacatggtcaacggtgttagctttgtcaatccagaagcaacttatatcgatattgatgttgagattgctccggaagttcaaatcgaagccaatgttatcttgaaagggcaaacgaaaattggtgctgagactgttttgacaaacggtacttatgtagtggacagcactatcggagcaggagcggtcattaccaattctatgattgaggaaagtagtgttgcagacggtgtgacagtcggtccttatgctcacattcgtccaaattcaagtctgggtgcccaagttcatattggtaactttgttgaggtgaaaggatcttcaatcggtgagaataccaaggctggtcatttgacttatatcggaaactgtgaagtgggaagcaacgttaatttcggtgctggaactattacagtcaactatgacggcaaaaacaaatacaagacagtcattggagacaatgtctttgttggttcaaattcaaccattattgcaccagtagaacttggtgacaattccctcgttggtgctggttcaactattactaaagacgtgccagcagatgctattgctattggtcgcggtcgtcagatcaataaagacgaatatgcaacacgtcttcctcatcatcctaagaaccagtag

SEQ ID NO: 37754 - DNA, 693 bp, Streptococcus pneumoniae
atgaaaataggaattattgctgctatgccagaagaactggcttatctggtccagcatttagataatacccaggagcaagttgttttggggaatacctatcatacaggaaccattgcttctcatgaagtcgttcttgtagaaagtggaattggtaaggtcatgtctgctatgagtgtggcgattttggctgatcatttccaggtggatgcccttattaatacgggttcagctggggcagtagcagaaggtatcgctgttggggatgtcgtgattgctgacaaattagcctatcatgacgtagatgtcacagcttttggctatgcttatggacaaatggcgcaacaaccgctttatttcgaatcagacaaaacctttgttgctcaaatccaagagagtttatctcaattggaccaaaactggcatcttggtttgattgctacaggagatagttttgttgcaggaaatgacaagatagaagcgattaagtcccatttcccagaagttttagccgtggagatggagggggcagctattgctcaagcagcgcataccctcaatctcccagtcttagtcatccgagctatgagtgacaatgccaaccatgaagcaaacatcttttttgatgagtttattatcgaagctggacgtcgctctgcccaagtcttgttggcctttttgaaggctttagattaa

SEQ ID NO: 37755 - DNA, 1770 bp, Streptococcus pneumoniae
gtgcctatgaaacctgaaaaacctaaaaaattgggtcttaaacagatttacctcaatcttgataaaatcctctttctatttttcttgatttttatgatagtggagtatttgtgggtaccattcaattcatggttggctagcttcttattagatcagacaggttatctttttatttcctataacaatgtcttagccatccttactcattctccattgattagtctagcttttttagccttgattgtaattaaccttctggttgcttattttcaaataggactcctctttattggtgctcgtcatctcctctataatgaaaagcgaaggctaattgagtatatccgcaaggttttccatgaaagttttggatttatgaaaaagctaacttgcgctaaagccttgtttatctttttctatatagctatgctgtttccttttatacggaaaatgctgaagatttattatcttaataaaatcgtcattccagagtttatccaagcttatttagaagatagatattggatgtggtggctgagcatcctacttctatctcttatctttctctatgtctctgtcagattgatgtttgcccttccgaagattgtatatgatcagctgactgttcgagaagcagtgatgtttagcttggagaaaaccaagaagagagttactttttatgcttggaatttattttacatcttgctcaaagcacatttattattttatcttcctttgatccctttattattggctcaaactttggtagatgatatcactcagagagagtctctgattcttggtattttgaattttgtcgtgattaaaaatctctattatatggctctgacttattttttggttaaatttgtttcatttttgacaggaaaggagctggatatgcttcctaggagagaaaaagatcacatcgtgcgatggggtgtcatgacttgtgccagtcttttctttgccttagaaggttatatttatctggaggctcccatggttcatctacctcaacttatttctcaccgaggggtttccaatgcaaatgggattcaaaatacagtagagtccttggaaactacagcacaactcaaaccagacttggtggagacggacgtgcaggaaacaaaagatgggcagtttgtcatgatgcatgatgctaacttgaaaaatctagcaggtatcaataaaagtcctcaagacttaaacttggaggagcttaaagggattgatatttttgaaaatggctaccagactaaaatttcaagctttgaagattatctcagtcgagccaacgaacttggtcaaaaattactaattgaaattaaaaccagtaaaaaagatagtccagacatgatgaaccgctttttagcccgttatgctgcaaagctcaagatttatggacatcaaatccagtctttagactaccatgttgtcgaaaaagtaaggcagtatgatgccgaactgccagtttatttcatcatgccctacaattctgtctttcctaaaacaagagcgacaggatatactatggagtactcaaccttggatgaatattttgtaagcaaactatggacaacggatcagaaactttatgtctggactgtcaatgattcagaagctatcagcaaatctcttcacttaggagtagatggagtgattacagatgatttggaaaaagttcagcgggaaatagaagtagcccaagaagatccagaatatacggatttgctcttgaaaaaagcattggaattctttgaattttag

SEQ ID NO: 37756 - DNA, 1404 bp, Streptococcus pneumoniae
ttggagtcaaagatgaatatatttagaacaaagaatgttagtttagataaaacagagatgcataggcatttgaagttatgggatttgattttgctgggtattggagccatggtagggacaggtgtttttacaatcacaggtactgcagctgctacacttgctggtccagcactagtgatttcaatcgttatttctgccttgtgtgtgggattatcagccctcttttttgcagaatttgcctcgcgagtacccgctacaggaggtgcctatagttacctctatgctatcttaggagaattccctgcctggttggctggttggttaaccatgatggagttcatgacagccatatcaggcgtagcttcgggttgggcagcttattttaaaggcttgctctctcaatacgggatagcccttcctcaggctttaaatggtacctttaatcctcaagcagggacatttgttgatttattgcctattcttgtcttggtcttggtgacttcgcttgttttactaaatgccaaggcagccttacgctttaattcgattctagttattttgaaattttccgctttagctctctttgttttagtaggaatttggaatattaagtttgataattggagcaattttgctccttacggttttggacaaatctatggagctagtactggtattatggctggtgcgtccttgatgttcttcggttttttgggatttgaatccatctctatggctgtagatgaagtcaagactcctcaaaaaaatattcctagagggattgtcttatcgctttctatcgtaaccattctctatgccttggtgacccttgttttgactggtgtggttcactatagtcatttaaatgtcgatgatgccgttgcctttgcccttcgtagtgttgggattagttgggcagccaactatgtgtcattagtggctatcttgaccttgattacagtttgtatttcgatgacctatgccctatcgcgtatgatttacagtttagcacgtgacggcttagtgcctgctgcctttaaggaactgacgaagactagcaaggtaccaaagaatgctactatcttgacaggtctagcttcagcagtagcagcaggaatgttcccactagccagtattgcagcctttttaaatatttgtaccttagcctacttgatcctgctggcttatggtctgattcgcttacggaaagaaaaaggaatgcccaaagctggggaatttaaaacaccattggtacctctgttaccaattttatcgatcatcatttgtttatccttcatgttacagtataatgtgaacacctggattgctttcctagttgcgttgttagtaggaagtattatttacttcacttatggctataagcattctaccatagaagaataa

SEQ ID NO: 37757 - DNA, 1221 bp, Streptococcus pneumoniae
atgacttatccaaatctcttggaccgcttcttaacctacgttaaggtcaacacgcgctctgatgaacactctactactactccaagtacacagagtcaggttgacttcgcaacaaatgtcctaattcctgaaatgaaacgtgttggactgcaaaatgtttactatctaccgaatggttttgctattggaaccttgccagccaacgatccgtctttaacacgtaagattggttttatatcgcacatggatactgctgattttaatgctgaaggagtcaatccacaggtaattgaaaactacgatggttgtgtgattgaactagggaattctggtttcaaactcgatccagctgacttcaagagtcttgaaaaatatccaggacaaacgctcatcacaacagatggaacaaccttgctaggtgctgatgacaagtcaggaattgctgaaattatgacagccattgaatatctaactgctcatcctgaaattaagcactgtgagattcgtgttggttttggtccagatgaagaaatcggtgttggtgccaataaatttgatgcagaagattttgatgtggattttgcctacactgttgatggtggtccactaggtgaacttcagtacgagactttctcagccgctggtgctgaattgcatttccaaggccgtaatgtccaccctggtactgccaaagggcagatggtcaatgcccttcagctagcaattgattttcataatcaacttccagaaaatgaccgacctgagttaactgaaggttaccaaggtttttaccatctaatggatgtgacaggtagtgttgaggaggcgcgtgcaagctacatcattcgtgattttgaaaaagatgcctttgaagcgcgtaaagcatccatgcaatctatcgctgataagatgaatgaagaacttgggagcaaccgtgtcactctcaacttgacagaccagtactacaatatgaaagaagtcattgaaaaagatatgactccaattaccattgctaaagccgttatggaagatctaggtatcacgcctattatcgaaccaatccgaggtggaacagacggctctaagatttcctttatgggaatcccaactccgaatatctttgcaggtggcgaaaatatgcacggacgttttgaatacgttagccttcagactatggaacgtgcagttgataccatcattggcatcgtacgtagcttataa

SEQ ID NO: 37758 - DNA, 1077 bp, Streptococcus pneumoniae
atgggatatacagttgctgtagtcggcgcgacaggtgctgtcggtgctcagatgataaaaatgttggaagaatcaacacttccaatcgataaaatccgttaccttgcttctgcacgttcagcaggtaagtcattgaaatttaaagatcaagatattacaattgaagaaacgactgaaacagcttttgaaggagttgatattgctctcttttcagcaggtagttctacatcagctaagtatgcaccatacgcagtaaaagctggcgtggtagtagtagataatacatcttatttccgtcaaaatccagatgttcctttggttgttccagaggtcaatgctcatgcacttgatgctcacaacggaatcattgcctgccctaattgttcaacaatccaaatgatggtggctcttgagccggttcgccaaaaatggggcttggaccgtatcattgtttcaacttatcaagccgtttcaggtgctggtatgggagcaattcttgagacacaacgtgaacttcgtgaagtcttgaatgatggtgtgaaaccatgtgatttgcatgcggaaattttgccttcaggtggtgacaagaaacattatcctatcgcctttaacgctcttccacaaattgatgttttcactgataatgattacacgtacgaagagatgaagatgaccaaggaaactaagaaaattatggaagatgatagcattgcagtatctgcaacatgtgtgcgtattccagtcttgtcagctcactctgagtctgtttatatcgaaacaaaagaagtggctccaatcgaagaagtaaaagcagctatcgcagccttcccaggtgctgttcttgaagatgatgtagctcatcaaatctatcctcaagctatcaatgcagttggttcacgtgatacctttgttggtcgtatccgtaaagacttggatgcagaaaaaggaattcacatgtgggttgtttcagataaccttctcaaaggtgctgcttggaactcagttcagattgctgaaactcttcatgaacgtggattggttcgtccaacagctgaattgaaatttgaattaaaatag

SEQ ID NO: 37759 - DNA, 1440 bp, Streptococcus pneumoniae
ttgttacaatttgaaaagaaacttggagaatttccaagaaaagagctattaattaaaggaaacattatgattacacgtgaatttgataccatcgctgctatctctactccactaggtgaaggggctattggtattgtccgcctgagcggaacagacagttttgctattgcgcaaaagatttttaaaggaaaagacttgaacaaggttgccagccacactctcaactacggtcacattattgatcctctgactggtaaagtcatggacgaggttatggttggggctatgaagtctccaaagaccttcactcgtgaggatattatcgagattaacacccacggtgggattgcggtgaccaatgaaattctccagctagctattcgtgaaggggctcggttggcagaacctggtgaatttaccaaacgtgcttttttaaacggtcgcgtagacttgacacaggcagaggctgtgatggatatcatccgtgccaagactgacaaggccatgaacattgcggtcaaacaattagacggctccctttctgacctcattaacaatacccgtcaagaaatcctcaatacacttgcccaagttgaggtcaatatcgactatcctgagtatgacgatgttgaggaagccactactgctgttgtccgagagaagacaatggagtttgagcaattactaaccaaactccttaggacagcacgtcgtggtaaaatccttcgtgaaggaatttcaacggctatcattggacgtcccaacgttgggaaatcaagccttctcaacaacctcttgcgtgaggacaaggctatcgtaacagatatcgctgggacaacacgagatgtcatcgaagagtacgtcaacatcaatggtgtacctctcaaattgattgatacagccggtattcgtgaaacagatgacatagtggaacaaatcggtgttgagcgttcgaaaaaagccctcaaggaagccgacttggttctactagtgctaaatgccagtgaaccactgactgcgcaagacagacaacttcttgaaattagccaagataccaatcgcattattctacttaataaaaccgacctgccagaaacgattgaaacttcgaaactacctgaagacgttatccgtatttcagtccttaaaaaccaaaacatcgacaagattgaagagcgaatcaacaacctcttctttgaaaatgctggcttggtcgagcaagatgctacttacttgtcaaacgcccgtcacatttccctgattgaaaaagcagttgaaagcctacaagccgttaatcaaggtcttgagctggggatgccagttgatttgcttcaagttgacttgactcgtacttgggaaatcctcggagaaatcactggggatgctactccagatgaactcatcacccaactctttagccaattctgtttaggaaaataa

SEQ ID NO: 37760 - DNA, 600 bp, Streptococcus pneumoniae
atggcacagttgtactatcgttatgggaccatgaactctggtaaaacgattgagattctcaaagtggcctataactacgaggagcaaggaaaaggtgttgtcattatgacctcggctctggatacgcgtgacggtgttggctatgtgtcgagtcgaattggcatgaaacgccctgcccttgcgattgaggaaacaacggatatctttggctatatccgagacctaccagaaaaaccttactgtgttttggtcgatgaagcccagtttcttaaacgccaccatgtttacgacctagctcgtgttgtggacgagttagacatacccgtcatggcttttggcttgaaaaatgactttcgcaatgaattgttcgaaggttccaaatatctcttgcttttagcggacaagattgacgaaatcaagaccatctgtcagtattgcaagaaaaaggcgaccatggtgttgcgaacacaggatggactgcccgtttacgatggagaacagatccagattggtggtaatgaaacctatatctcggtttgccgtaaacattattttgcgccaatgataacctctaacaaggagcaaaactatgacaattga

SEQ ID NO: 37761 - DNA, 1080 bp, Streptococcus pneumoniae
atgaacatctatgatcaactacaagctgtagaagaccgttatgaagaactaggagaattgctgagtgaccctgatgtcgtttcagacaccaagcgttttatggagctttcaaaagaagaagcttccaatcgtgacaccgtaatagcctaccgtgagtataaacaagtccttcaaaatatcgtcgatgccgaagagatgattaaggaatcaggcggagatgcggacttggaagaaatggccaagcaagaactcaaagatgccaaggctgaaaaagaagaatatgaagaaaaactgaaaattttgctccttccaaaggatccaaacgatgacaagaatatcatccttgaaatccgtggagcagctggtggagacgaagcggcacttttcgctggagatttgctaactatgtaccaaaagtatgcggaagcccaaggttggcgctttgaagtcatggaagcctctatgaatggtgtcggtggttttaaagaagtggttgctatggtttcaggtcagtctgtatactctaagcttaagtatgaatcaggtgcccaccgtgtgcaacgtgttcctgtgacagaaagccaaggccgtgttcatacttcgacagcgacagttcttgttatgccagaagttgaagaggttgaatacgacattgatccaaaagaccttcgtgtcgacatctatcacgcctctggtgctggtggacagaacgtcaataaggttgcgactgccgttcgtatcgttcacttgccaaccaatatcaaggttgagatgcaggaagaacgtacccagcagaagaaccgcgagaaggctatgaagattatccgtgcacgcgtcgctgaccactttgctcagattgctcaggatgaacaagacgctgagcgtaagtcgacaatcggtactggtgaccgttcagaacggatccgaacttataacttcccacaaaaccgtgtcacagaccaccgtatcggcttgaccctccaaaaactagatacgattttgtctggtaaattggacgaagttgtggatgccttggtgctttatgaccaaacacaaaaactagaagaattaaacaaataa

SEQ ID NO: 37762 - DNA, 840 bp, Streptococcus pneumoniae
atgaaattagctcaattattttcaaattttgaagaagagttgataagacaaggagaggaagcggaaagcctctcttttgtctatcgtagtctgaaaaatctatcttttacagactttatttttgccctccagcaggaggtgacaacagaggaagaaaaacaatttgtagaagatatttaccagcaactagcagctcacaagccagctcagtacatcattggacaggcagatttttatggaatgcatttaaaggtggatgaacgggttttgattcctcgtccagaaacagaggagttagtggagcttattctaactgaaaatcttgagacgaatctctcagttctggatattggaacaggtagtggagctattgctctcgctctagcaaaaaatagaccagattggtcagtgacagcagcagatatttctcaagaggccttagatttagctagagaaaatgctaaaaatcaaaatcttcaaatatttttaaaaaaatctgactgttttacagaaatttctgaaaaatatgatataattgtttccaatccaccctatatctctcgtgaagatgagtcagaggtaggcttgaatgtcttgtattcggagcctcatctagctctctttgcagacgaggatggcctagctatttaccgtagaattgcggaagatgcaacagactatctcaaagatagtggtaagatttaccttgaaattggatacaagcaaggtcaatgtgttcccgaactttttagaaaacatcttcctgaaaaaagagttcgaacactcaaagaccaatttggtcaaaataggatggttgtggttgatgatggacaggattag

SEQ ID NO: 37763 - DNA, 1257 bp, Streptococcus pneumoniae
atgatttttgacaaagatgattttaaagcatatgatgctgatctctggaatgctattgccaaagaagaagaacgccaacaaaataatatcgagttaattgcttcggaaaacgtagtttccaaggctgttatggcagctcaagggtctatcttgacaaataaatatgccgagggttacccaggacgccgttattatggtggaactgatgtagtagacgttgtagagactcttgctattgaacgcgcaaaagaaattttcggtgctaaatttgctaatgtccaaccacattcaggaagccaagctaactgtgcggcttacatgtccttgattgagccaggtgatacggttatgggaatggatttggcagcaggtggacacttgacccacggagctccagttagcttctctggtcaaacctacaactttctttcctatagtgtggatcctgaaacggaacttttggactttgatgctatcttgaaacaagcccaagaagtaaaaccaaaactgattgtagctggtgcttcagcatattctcaaattatcgatttttcaaaattccgtgaaatcgcagatgctgtcggtgcgaagctcatggtggacatggcccatatcgctggtttggttgcggctggccttcatccaagcccagttccatacgctcatatcacaacaacaacgacccacaaaacccttcgtggacctcgtggtggtttgattttgaccaatgacgaagaacttgctaaaaaaatcaattcagctattttcccaggtattcagggcggtcctttagagcatgttgtggcggctaaggcagtttccttcaaagaagttttggatccagccttcaaggaatatgctgccaatgtaattaagaacagcaaggctatggcagatgtcttcttgcaagaccctgatttccgtattatttcaggtggaactgaaaaccatctcttccttgttgatgtgactaaggttgtagaaaacggaaaagttgctcaaaacttgctggatgaagtcaatattaccctaaataaaaattcaatcccttacgaaaccttgtcgccattcaagacaagtgggattcgtatcggagcagcagctattactgcacgtggatttggtgaagaagaaagtcgcaaagtggctgaactcatcattaaaacccttaagaattcagaaaatgaggctgtattagaagaagtgagaagtgcagtcaaagaattgacagatgccttcccattatacgaggactaa

SEQ ID NO: 37764 - DNA, 1020 bp, Streptococcus pneumoniae
atgcatgcaaaaatgcgaaataaaaaacaaataaacctaggcataatttttgtaatctgcctaggtcttcttattacaatatttttgtcattaaagcttggaacaaaagaaattaatatcagagattttttagcagcttttggaatgggtaatacaaatgatgattttattaaatcaattatatataaaagaatacctagaactatttttgcaattttagcaggttctagtcttgccataagcggtgtattgatgcaatcagttactagaaacccaatagctgatccaggtatactcggtataaacacaggagcaagtcttagtgtagtaattggtctttcttttttaggaatttcatcaagcataagccatataagttttgcaatcattggtggcttagtaagtgcaatttttgtatacgcgattgctgtaagcggaaaagcaggccttacccctataaaacttgccttatcaggaacttgtgttagtatggctttaagcagttttgtaagttttttaattttaccgaataataacgtcttagacaaatttagattttggcaaataggtagccttggagcagctacattatcttctatatctacactactaccttttataattttaggtcacttgatagctatatttatttcatcagatttaaacgctttagctatgggtgatgaaatggctgttggtcttggagttaatgttaataggataagatcacttgcaataattgcaagtgtgcttttatgttcaagtattactgcaattggtggacctattggcttcgtaggtcttatagttcctcacttttgtggcttatttataagcaaagatatacgcacaatgaccatttcttcagcttttataggtgcagagctcttgcttatatgtgatataatcggccgtatgttaggtaaaccaggtgaaattgaagtggggataattactgcaataatcgggggtccagtacttatttatgtaactatgaaaaatagaggggttaataactaa

SEQ ID NO: 37765 - DNA, 795 bp, Streptococcus pneumoniae
atgaaaggtctgtggtcaaataatcttacctgcggttatgatgaaaaaataatcttggaaaatataaatataaaaatacctgaagaaaaaatatcagttattattgggtcaaatggttgtgggaaatcaacactcattaaaaccttgtctcgacttataaagccattagagggagaagtattgcttgataataaatcaattaattcttataaagaaaaagatttagcaaaacacatagctatattacctcaatctccaataatccctgaatcaataacagtagctgatcttgtaagccgtggtcgtttcccctacagaaagccttttaagagtcttggaaaagatgaccttgaaataataaacagatcaatggttaaggccaatgttgaagatctagcaaataacctagttgaagaactttctgggggtcaaaggcaaagagtatggatagctctagccctagcccaagatacaagtatcctacttttagatgagccaactacttacttggatatctcatatcaaatagaactattagacctcttgactgatctaaaccaaaaatataagacaaccatttgcatgattttgcacgatataaatctaacagcaagatacgctgattacctatttgcaattaaagaaggtaaacttgttgcagagggaaagcctgaagatatactaaatgataaactagttaaagatatctttaatcttgaagcaaaaattatacgtgaccctatttccaattcgcctctaatgattcctattggcaagcaccatgttaactcttaa

SEQ ID NO: 37766 - DNA, 612 bp, Streptococcus pneumoniae
gtgcttatttacattagcctgataatgaaaatggagagattatcgatggttatattggaattgtaccaaaatgattattctaaagatttagtagcatttgattccatagaagatgggaaagcctttgtagctcaaatcccgggatacactctggaaacagaagatggttttgaagtggagtattttaatcctaaaaacataccggattatatggaaattatttttaacggaaatattgttcctttatctaaatttatgttcgatcctggggaaaatgtaaacattatttggaaagagatttcaaatttatccctcaaaaatgatagagtgatcgaaggatattcaaaaattgatgcatatgtcgttaacaaccatgaagttaaagcctatgtcgaaacaagagaaacgaactatcgtaaagcaaaagacttcttagaaagccgcggatatgaaatcgacagaagctttttcggaagtgaagacggtgaagcgattctttacagaaaaaaagggatcgaagtttggcatttcttgtgtcacttagacccaatgtttgtagagattgaagatgtagaaggatatgttaaagaagaagttggagagattcaatag

SEQ ID NO: 37767 - DNA, 936 bp, Streptococcus pneumoniae
ttgcatgcgacgaaatgtaaacatttctgtttaaaattaaggataaaatcaatgaaaaaagcaatggtaattatcaaccctacttctggtggcgagaaggctttggattacaaagaaaagctggagaataaagcaaaagaatactttgaatatgttgaaaccaaaattaccgaaaaagtgctggatgcaacacattttgctgaagaagcttctcgtgagcagtatgatgcagtggttgtgtttggtggagatggaactgtcaatgaagtcatttcaggtattgatgagagagactacattcctaagttagggattatcccaggcggtacgggtaacctcattacaaaacttttggaaatcaatcaagacatcgatggcgcaattgacgaactagattttgatttaaccaataagattgatatcggtaaagcaaatgacaactattttggttatatctttagtatcggttctctgcctgaggcgattcacaatgttgaaatagaggacaaaacaaaattcggtattttaacctatgctgtaaataccatgaagtctgtcatgacagatcaggtctttaacattaaggttgagacagaaaatggaaattatgttggtgaagctagccatgttttggtccttttgacaaattacttcgctgataagaaaatctttgaagaaaacaaggacggctatgccaacattttgattctgaaagatgcctctatattctccaaattatccgtcattcctgatttattaaaaggggatgttgtcgcaaatgataatatcgagtatatcaaagcgcgtaatattaaaatctcttcagatagtgaattggagtcagatgttgacggagataaatcagataacctacctgtagaaatcaaagtcctagctcagcgagtagaagtattttcaaaaccgaaagaggattag

SEQ ID NO: 37768 - DNA, 1764 bp, Streptococcus pneumoniae
atgaatactttaggagacaaattgatggaattgagtgctatttaccatgggcctgagtcggagtatgcctatctttataaggataagaaactccatattcgaattcgaactaagaaaggggacattgaaagcatcaacttgcactatggggacccttttatctttatggaggagttttatcaggatacaaaagaaatggtcaagataacttctggtaccttatttgaccattggcaggttgaagtgtcagttgactttgcacgtatccagtatctctttgagctcagagatacagaaggtcaaaatattttgtatggcgataaagggtgtgtggaaaattctctagaaaatcttcatgcaattgggaatggatttaagttgccttatcttcatgagattgatgcctgcaaggttcctgactgggtttcaaatacggtatggtatcagatatttcctgaaagatttgccaatggcaatgctctattaaacccagaagggactttagactgggattcatctgtcacacctaagagcgatgatttctttggtggtgatttacaggggattattgatcatatggattacttgcaagacttgggtattactggactatatctttgtcccatctttgaatctacaagcaatcacaagtacaatacgacagattactttgaaattgaccgtcattttggagacaaggagacctttcgggaactggtggatcaagcgcatcatcgtggcatgaaagtcatgctggatgcggtatttaatcatattgcttcgcaatctcttcaatggaaaaatgtcgtcaaaaatggtgaacagtctgcttataaggattggttccatattcaacaattcccagtgacaactgaaaagctagttaataagagagacttaccctatcatgtttttggtttcgaggactatatgcctaagctaaatacagccaatccagaggtcaagaattatcttttaaaggttgcgacttattggattgaagagtttaatatcgatgcttggcgtttggatgtggctaatgagattgaccatcagttctggaaggattttcgtaaggcagttttagctaaaaatcctgatctttatatcctaggagaagtctggcatacatctcagccttggctaaatggagatgagttccatgccgtcatgaattatcctttatctgatagtatcaaggactatttcttacgaggaattaagaagacagaccagttcatcgatgaaatcaatggagagtctatgtattacaagcagcagatttcagaggtcatgtttaatctcttggattcacatgatacagagcgaatcctgtggacggccaatgaagatgttcaactggttaaatcagccttagcctttctctttttacaaaaaggaacaccgtgcatttattacgtaaccgagctagccttgactggaggaccagatccagattgtcgtcgttgtatgccttgggaacgtgtatcaagtgacaatgatatgctgaactttatgaagaggctgattaagattcggaaatacgcgtcagtaatcatttcgcatggcaagtatagccttcaagaaatcaactctgatctagtagctctggaatggaaatacgaaggacggatcctcaaagcaatattcaaccaatcaacagaagattatcttttagagaaagaagcagtagcactagcaagcaattgccaagaattggataatcagcttgtcatctctccagatggatttatgattttctaa

SEQ ID NO: 37769 - DNA, 1311 bp, Streptococcus pneumoniae
atggaattgtcggaaatgattaataatgtgtttgaaagttgtatacatcctgaatatcattttattgatttatcaaagataaaagagaataggatagcaattataggaggaaataaatctgagtatttaaatttaatcttaaatcttatgctacaaggtaaggttgttatccctattaatccgatccaaactaattctcaaatagaaacacttttgaatttgtctgatgttgaagcagtattaacagataatagctttcaatgtaaaagtgagaaaaaaacgtatctattttgtgaatttaaacatatttataataatcatgaaagagagatttcggacactcctttagtgtttttttcatcaggtacaacaggagtgcctaagccggtaatgattaataaattagcttttacagaattaattaatctgatgatagcacagttagaaatatctagtgatgatgtgttgtatctcccctcccacattgctttcattcaatctctctgggctgcgatgatagtaattttttcggggggaagagtaatttttaaagataggattacatataaaacattttttaaggaacttcaactaaacgatgcaacaataacggttatggtacctactacgatgaataaacttgttaatttatatacaaatactctccaagagtgtaaaaaattaagatgtattattgtaggtggagagattataaataaggatagtgcaaactttttattaaataaattgaaaaacacaaacatagcaaatgcatatggtatggtagagacaaccgcagtttgttgtctacaatatggacgtgatttaaaaaatattaactctgttggtacaactctaccgggggttgaagttgaagtaaagaatatagataatgatggtaatggcgatatctggataaagacaaatcgctttatgagcggatattacccgagtaaatacactggtgaatggttatatacaggagatagaggatataaaaataaggaaggacttttatttgtaacaggccgtgaaagtttgtcaattaataagggaggtataaaaattaatcctattgaaattgaacagattattcttcaattgccagatattcaactttgtaaagttgaaaaaattagtgataatatttacggagaaaattatatattagaagttatttctgaaattaaagataaaaatagaataacaggacagattttaaaaagcttaggtaaatattatttacctgattcaataaaatttgttgagtctatcgaaacaacttctagtggaaaattgaagagaaattag

SEQ ID NO: 37770 - DNA, 1230 bp, Streptococcus pneumoniae
atgaagattagtaagaggcacttattaaattattccatcttgattccctacttgcttttatctattttgggcttgattgtggtctattcgaccaccagtgctattttaattgaagaaggcaagagcgccttgcagttggttcgaaaccaaggaatcttttggattgttagtttgatactgattgccttaatttataaattgagactagattttttgagaaatgagcgactaatcattttagttatattaatagaaatgcttttattgttcttggctcgttttattggtatttcagtaaacggggcatacggttggatttcggttgcaggagtaactattcagccagctgagtacttaaaaatcattattatttggtatttagctcaccgattctccaaacagcaagaagaaatagctacttatgattttcaagttttgactcaaaatcaatggcttccccgtgcttttaatgattggcgattcgttctcctagttctgattggaagtttgggaattttccctgatttaggaaatgcgactattttagtcttggtttccttgattatgtatacagttagtggaatcgcttatcgctggttttcaaccattctggcgctcgtatctgccgcttctgtctttgtcttgaccactatcagcctaatcggtgttgagaccttttcaaaaattccagtatttggctatgtagccaaacgctttagtgccttttttaatccttttgccgatcgtgctgatgcaggtcaccagttagctaattcttattttgccatggtcaatggtggttggtttggtctaggtcttggaaactcgattgaaaaacgaggttatttgccagaagctcatacagactttgtcttttctatcgtgattgaagaatttggctttgttggtgccagtcttattttagctctcttgtttttcatgattttgcggattatcttggtcggtattcgagcggagaatcctttcaatgccatggttgcactcggtgtcggagggatgatgttggttcaggtatttgtcaatatcggagggatttcgggcttgattccatctacaggagtaaccttccccttcttatcccagggtggaaatagtcttctagtcttatcagtggcagtagcctttgtcttaaatattgatgccagtgaaaaacgcgctaagttgtaccgagaattggaaaatcaaccaatgaaccttctgttgaagtag

SEQ ID NO: 37771 - DNA, 1776 bp, Streptococcus pneumoniae
atggaggtattgtgtatggttgacaaacaagtcattgaagaaatcaaaaacaatgccaacattgtggaagtcataggagatgtgatttctttacaaaaggcaggacggaactatctagggctctgtccttttcatggtgaaaaaacaccttctttcagcgttgtagaggacaagcagttttaccactgttttggttgtggtcgctcaggtgatgtctttaaattcatcgaggagtaccaaggggttacctttatggaggctgtccaaatcttaggtcagcgtgtcgggattgaggttgaaaaaccgctttatagtgaacagaagccagcctcgcctcaccaagctctttatgatatgcacgaagatgcggctaaattttaccatgctattctcatgacaacgactatgggcgaagaggccagaaattacctttatcagcggggtttgacagatgaagtgcttaaacatttttggattggtttagcacctccagaacgaaactatctctatcaacgtttgtctgatcagtatcgtgaagaggatttactggattcaggcctgttttatctttcggatgccaatcaatttgtagacacctttcacaatcgcattatgtttcccctgacaaatgaccaaggaaaggtcattgccttctcaggtcgtatctggcaaaaaacggattcacaaacttctaagtataaaaacagccgatcgactgtaatttttaacaaaagttacgaattatatcatatggatagggcaaaaagatcttctggaaaagctagtgagatttacctgatggaaggattcatggatgttattgcagcctatcgggctggaatcgaaaatgctgtggcgtcgatgggaacggccttgagtcgagagcatgttgagcatctgaaaaggttaaccaagaaattggttcttgtttacgatggagataaggctgggcaagccgcgacattgaaagcattggatgaaattggtgatatgcctgtgcaaatcgtcagcatgcctgataacttggatcctgatgaatatctacaaaaaaatggtccagaagacttggcctatctattaacgaaaactcgtattagtccgattgagttctacattcatcagtacaaacctgaaaacggtgaaaatctgcaggctcagattgagtttcttgaaaaaatagctcccttgattgttcaagaaaagtccatcgctgctcaaaacagctatattcatattttagctgacagtctggcgtcctttgattatacccagattgagcagattgttaatgagagtcgtcaggtgcaaaggcagaatcgcatggaaagaatttccagaccgacgccaatcaccatgcctgtcaccaagcagttatcggctattatgagggcagaagcccatctactctatcggatgatggaatcccctcttgttttgaacgattaccgtttgcgagaagactttgcatttgctacacctgaatttcaggtcttacatgacttgcttggccagtatggaaatcttcctccagaagttttagcagagcagacagaggaagttgaaagagcttggtaccaagttttagctcaggatttgcctgctgagatatcgccgcaggaacttagtgaagtagagatgactcgaaacaaggctctcttgaatcaggacaatatgagaatcaaaaagaaggtgcaggaagctagccatgtaggagatacagatacagccctagaagaattggaacgtttaatttcccaaaagagaagaatggagtaa

SEQ ID NO: 37772 - DNA, 1110 bp, Streptococcus pneumoniae
atggcaacaaaacaaaaagaagtaacaacatttgacgtacaggtagcagaatttatccgtaatcataagcaaaaagggacagcaacagatgatgaaatcaatgcaagtctggttattccttttaccttggacgctgatgggattgaagatctcttgcaacggattcaggatgcagggatttctatcacagataacgaaggaaatccaagtgcgcgtgttcttagcaatgaagaagaaccagaactcagcgatgaggacttgattgggtcaacttctgctaaggtcaatgaccctgtccgtatgtacttgaaagaaataggggtcgttcctctcttgaccaatgaagaggagaaagagttggcactggctgttgaagctggtgatatcgaagccaaacaacgtcttgcggaagccaatcttcgtttggttgtttccattgccaaacgctatgtcggtcgtggtatgcagttccttgacttgattcaagaaggaaatatgggcttgatgaaggcggttgacaagtttgactattctaaagggttcaagttttcaacttatgcaacttggtggattcgtcaggctatcactcgtgctattgcggaccaagctcgtaccatccgtatcccagttcacatggttgaaactatcaataaattggttcgtgaacagcggaatctccttcaagaattggggcaagatccgacaccagaacagattgctgaacgaatggatatgacacctgataaggttcgtgaaatcttgaagattgcccaagaaccagtatctcttgaaactcctatcggtgaagaggacgatagccaccttggagactttatcgaagatgaagtgattgaaaatccagtggattatacgactcgtatcgtcttgcgtgagcaattggatgaaatcttagatactcttacagaccgtgaagaaaatgttctgcgtctacgttttggactagatgatggaaaaatgcgcacacttgaagatgtggggaaagtctttaacgtaactcgtgagcgtatccgtcagattgaagcaaaggctttgagaaaactacgccaaccaagtcgtagcaaaccgcttcgtgattttattgaagactaa

SEQ ID NO: 37773 - DNA, 1326 bp, Streptococcus pneumoniae
atgcgaattggtttatttacagatacctattttcctcaggtttctggtgttgcgaccagtattcgaaccttgaaaacagaacttgaaaagcagggacatgctgtttttatctttacgacgacagataaggatgtcaatcgctacgaagattggcaaattatccgcattccaagtgttcctttctttgcttttaaggatcgtcgctttgcctaccgaggttttagcaaggcacttgaaattgctaaacagtatcagctagatattatccatactcagacagaattttctcttggcctgttggggatttggattgcgcgtgaattgaaaattccagtcatccatacctatcacacccagtatgaagactatgtccattatattgctaaggggatgttgatccggccgagtatggtcaagtatctggttagaggtttcctgcatgatgtggatggggttatttgccctagtgagattgtccgtgacttgctatctgattataaggtcaaggttgaaaaacgggtcattcctactgggattgaattagccaagtttgagcgtccggaaatcaagcaggaaaatttgaaagaactgcgtagtaaactagggattcaagatggtgaaaagacgttgcttagtctttcgagaatctcctatgaaaaaaatattcaagcagttttagtagcctttgctgatgttctgaaagaggaagacaaggttaaactggtagtagctggggatggcccttatctgaatgacctcaaagagcaagcccagaacctagagattcaagactcagtcatctttacagggatgattgctcctagtgagacggctctttactataaagcggcggatttcttcatttcggcatcgacaagcgaaacgcaaggtttgacctacttggaaagcttagccagtggaacacctgtcattgctcacggaaatccttatttgaacaacctcatcagtgataaaatgtttggagccttgtactatggagaacatgatttggctggtgctattttggaagccctgattgcaacaccagacatgaatgagcataccttatcagagaaattgtatgagatttcagctgagaactttgggaaacgagtgcatgagttttatctggatgccattatttcaaataacttccagaaagatttggctaaagatgatacggtcagtcagcgtatctttaagacagttttgtatcttccgcaacaggtggttgctgtacctgtaaaaggatctagacgcatgttgaaggcttcaaaaacacagttgatcagtatgagagactattggaaagaccatgaagaatag

SEQ ID NO: 37774 - DNA, 1311 bp, Streptococcus pneumoniae
atgagtatgtttttagatacagctaagattaaggtcaaggctggtaatggtggcgatggtatggttgcctttcgtcgtgaaaaatatgtccctaatggaggcccttggggtggtgatggtggtcgtggaggcaatgtggtcttcgttgtagacgaaggactacgtaccttgatggatttccgctacaatcgtcatttcaaggctgattctggtgaaaaagggatgaccaaagggatgcatggtcgtggtgctgaggaccttagagttcgagtaccacaaggtacgactgttcgtgatgcggagactggcaaggttttaacagatttgattgaacatgggcaagaatttatcgttgcccacggtggtcgtggtggacgtggaaatattcgtttcgcgacaccaaaaaatcctgcaccggaaatctctgaaaatggagaaccaggtcaggaacgtgagttacaattggaactaaaaatcttggcagatgtcggtttagtaggattcccatctgtagggaagtcaacacttttaagtgttattacctcagctaagcctaaaattggtgcctaccactttaccactattgtaccaaatttaggtatggttcgcacccaatcaggtgaatcctttgcagtagccgacttgccaggtttgattgaaggggctagtcaaggtgttggtttgggaactcagttcctccgtcacatcgagcgtacacgtgttatccttcacatcattgatatgtcagctagcgaaggccgtgatccatatgaggattacctagctatcaataaagagctggagtcttacaatcttcgcctcatggagcgtccacagattattgtaactaataagatggacatgcctgagagtcaggaaaatcttgaagaatttaagaaaaaattggctgaaaattatgatgaatttgaagagttaccagctatcttcccaatttctggattgaccaagcaaggtctggcaacacttttagatgctacagctgaattgttagacaagacaccagaatttttgctctacgacgagtccgatatggaagaagaagtttactatggatttgacgaagaagaaaaagcctttgaaattagtcgtgatgacgatgcgacatgggtactttctggtgaaaaactcatgaaactctttaatatgaccaactttgatcgtgatgaatctgtcatgaaatttgcccgtcagcttcgtggtatgggggttgatgaagcccttcgtgcgcgtggagctaaagatggggatttggtccgcattggtaaatttgagtttgaatttgtagactag

SEQ ID NO: 37775 - DNA, 1260 bp, Streptococcus pneumoniae
atgagaaaaattgttatcaatggtggattaccactgcaaggtgaaatcactattagtggtgctaaaaatagtgtcgttgccttaattccagctattatcttggctgatgatgtggtgactttggattgcgttccagatatttcggatgtagccagtcttgtcgaaatcatggaattgatgggagctactgttaagcgttatgacgatgtattggagattgacccaagaggtgttcaaaatattccaatgccttatggtaaaattaacagtcttcgtgcatcttactatttttatgggagcctcttaggccgttttggtgaagcgacagttggtctaccgggaggatgtgatcttggtcctcgtccgattgacttacaccttaaggcgtttgaagctatgggtgccactgctagctacgagggagataacatgaagttatctgctaaagatacaggacttcatggtgcaagtatttacatggatacggttagtgtgggagcaacgattaatacgatgattgctgcggttaaagcaaatggtcgtactattattgaaaatgcagcccgtgaacctgagattattgatgtagctactctcttgaataatatgggtgcccatatccgtggggcaggaactaatatcatcattattgatggtgttgaaagattacatgggacacgtcatcaggtgattccagaccgcattgaagctggaacatatatatctttagctgctgcagttggtaaaggaattcgtataaataatgttctttacgaacacctggaagggtttgttgctaagttggaagaaatgggagtgagaatgactgtatctgaagacagcatttttgtcgaggaacagtctaatttgaaagcaatcaatattaagacagctccttacccaggctttgcaactgatttgcaacaaccgcttacccctcttttactaagagcgaatggtcgtggtacaattgtcgatacgatttacgaaaaacgtgtaaatcatgtttttgaactagcaaagatggatgcggatatttcgacaacaaatggtcatattttgtacacgggtggacgtgatttacgtggggccagtgttaaagcgaccgacttaagagctggggctgcactagtcattgctgggcttatggctgaaggcaaaactgaaattaccaatatcgagtttatcttacgtggttattctgatattatcgaaaaattacgtaatttaggagcggatattagacttgttgaggattaa

SEQ ID NO: 37776 - DNA, 2292 bp, Streptococcus pneumoniae
atgaacgcattattaaatggaatgaatgaccgtcaggctgaggcggtgcaaacgacagaaggtcccttgctaatcatggcaggggctggttctggaaagactcgtgttttaacccaccgtatcgcttatttgattgatgaaaagctggtcaatccttggaatatcttggccattacctttaccaacaaggctgcgcgtgagatgaaagagcgtgcttatagcctcaatccagctactcaggactgtctgattgcgaccttccactccatgtgtgtgcgtattttgcgtcgcgatgcggaccatattggctacaatcgtaattttacaattgtggatcctggtgaacagcgaacgctcatgaaacgtattctcaaacagttgaacttggatcctaaaaaatggaatgaacgaactattttggggaccatttccaatgctaagaatgatttgattgatgatgttgcttatgctgcccaagctggcgatatgtatacgcaaattgtggcccagtgttatacagcctatcaaaaagaacttcgtcagtctgaatccgttgactttgatgatttgattatgctgaccttgcgtctctttgatcaaaatcctgatgttttgacctactaccagcaaaaattccaatacatccacgttgatgagtaccaagataccaaccacgctcagtaccaattggtcaaactcttggcttcccgttttaaaaatatctgtgtggttggggatgcggaccagtctatctacggttggcgtggtgctgatatgcagaatatcttggactttgaaaaggattaccccaaagccaaggttgttttgctggaggaaaattaccgctcaaccaaaaccattcttcaagcggccaacgaggttattaaaaataataaaaatcgccgtcctaaaaatctctggactcaaaacgctgatggggagcaaatcgtttactatcgtgccgatgatgagctggatgaggctgtatttgtagccagaaccatcgatgaacttagtcgcagtcaaaacttccttcataaggattttgcagttctctatcggactaatgcccagtcccgtacaattgaggaagccctgctcaagtctaacattccttataccatggttggcggaaccaaattctacagccgtaaggaaattcgcgatattattgcttatctcaaccttattgctaatttgagtgacaatattagttttgagcgtattatcaacgagcctaaacgtggaattggtctaggtacagttgagaaaatccgtgattttgcaaatttgcaaaatatgtctatgctggatgcttctgctaatattatgttgtctggtatcaagggtaaggcagcccaatctatctgggattttgccaatatgatgcttgatttgcgggagcagctagaccacttaagcattacagagttggttgagtccgtcctagaaaaaacaggttatgtcgatattcttaacgcccaagcgactctagaaagcaaggcacgggttgaaaatatcgaagagtttctttctgttacgaagaactttgatgacaccacggatgtgacagaagaggaaactggtctggacaaactgagtcgtttcttaaatgacttggctttgattgccgacacagattcaggtagtcaggagacatcagaagtgaccttgatgaccctgcatgctgccaaaggtctcgaatttccagttgtctttttgattgggatggaagaaaatgtctttccacttagtcgtgcgactgaagatccagatgaattagaagaagagcgccgtctagcctatgtaggtatcacgcgtgcagagaaaattctctatctgaccaatgccaactcacgcttgctttttggtcgtaccaattataaccgtccgactcgttttattaacgaaatcagttcagatttgcttgagtatcaaggtctggctcgtcctgcaaatacaagctttaaggcatcatatagcagtggtagtatttcctttggtcaaggtatgagtttggctcaggctcttcaagaccgtaaacgcggtgctgccccaaaatcaatccagtcaagcggtcttccatttggtcaatttacagctggcgcaaaaccagcatctagcgaggcaaattggtccattggtgatattgctctccacaagaaatggggagagggaaccgttctggaagtttcaggtagcggtgctaggcaggaattgaaaatcaatttcccagaagtaggtttgaaaaaacttttagccagtgtggctccaattgagaaaaaaatctaa

SEQ ID NO: 37777 - DNA, 696 bp, Streptococcus pneumoniae
gtgaggaggatttttatgtacagtatttcattccaagaagattcactattaccaagagaaaggctggccaaggaaggagttgaagcgcttagtaaccaagagttgctagctattttactcaggacaggaacacgtcaagctagcgtttttgaaattgcccaaaaagtcttgaacaatctttcaagcctaacggatttgaaaaaaatgaccctgcaggaattgcagagtttgtctggtattgggcgtgttaaggccatagaattacaagctatgattgaactggggcatcgtattcacaaacacgagactcttgaaatggaaagtattctcagcagtcaaaagttggccaagaagatgcagcaggaattaggggataaaaaacaagagcacctggtggcactctatctcaatactcaaaatcaaatcatccatcagcagaccatttttatcgggtctgtaactcgtagtatcgctgaaccgcgagagattcttcactatgcaatcaagcatatggcgacttctcttgtcttggtccacaatcatccttcaggagcggtagcgcctagccaaaatgatgatcatgtcactaaacttgttaaagaagcctgcgaactgatggggattgttctcttggaccatttgattgtctctcattctaattactttagttatcgtgaaaagacagatttaatctaa

SEQ ID NO: 37778 - DNA, 672 bp, Streptococcus pneumoniae
atgaccttagaatgggaagaatttctagatccttacattcaagctgttggtgagttaaagattaaacttcgtggtattcgtaagcaatatcgtaagcaaaataagcattctccaattgagtttgtgaccggtcgagtcaagccaattgagagcatcaaagaaaaaatggctcgtcgtggcattacttatgcgaccttggaacacgatttgcaggatattgctggcttacgtgtgatggttcagtttgtagatgacgtcaaggaagtagtggatattttgcacaagcgtcaggatatgcgaatcatacaggagcgagattacattactcatagaaaagcatcaggctatcgttcctatcatgtggtagtagaatatacggttgataccatcaatggagctaagactattttggcagaaattcaaattcgtactttggccatgaatttctgggcaacgatagaacattctctcaactacaagtaccaaggggatttcccagatgagattaagaagcgactggaaattacagctagaatcgcccatcagttggatgaagaaatgggtgaaattcgtgatgatatccaagaagcccaggcactttttgatcctttgagtagaaaattaaatgacggtgtaggaaacagtgacgatacagatgaagaatacaggtaa

SEQ ID NO: 37779 - DNA, 831 bp, Streptococcus pneumoniae
gtgacgatacagatgaagaatacaggtaaacgaattgatctgatagccaatagaaaaccgcagagtcaaagggttttgtatgaattgcgagatcgtttgaagagaaatcagtttatactcaatgataccaatccggatattgtcatttccattggcggggatggtatgctcttgtcggcctttcataagtacgaaaatcagcttgacaaggtccgctttatcggtcttcatactggacatttgggcttctatacagattatcgtgattttgagttggacaagctagtgactaatttgcaactagatactggggcaagggtttcttaccctgttctgaatgtgaaggtctttcttgaaaatggtgaagttaagattttcagagcactcaacgaagccagcatccgcaggtctgatcgaaccatggtggcagatattgtaataaatggtgttccctttgaacgttttcgtggagacgggctaacagtttcgacaccgactggtagtactgcctataacaagtctcttggcggtgctgttttacaccctaccattgaagctttgcaattaacggagattgccagccttaataatcgtgtctatcgaacattgggctcttccattattgtgcctaagaaggataagattgaacttattccaacaagaaacgattatcatactatttcggttgacaatagcgtttattctttccgtaatattgagcgtattgagtatcaaatcgaccatcataagattcactttgtcgcgactcctagccataccagtttctggaaccgtgttaaggatgcctttatcggtgaggtggatgaatga

SEQ ID NO: 37780 - DNA, 897 bp, Streptococcus pneumoniae
atgaggtttgaatttatcgcagatgaacatgtcaaggttaagacctttttaaaaaagcacgaggtttctaagggattgctggccaagattaagtttcgaggtggagctattctggtcaataatcaaccgcaaaatgcaacgtatctattggacgttggagactacgttaccattgacattcccgctgagaaaggctttgaaaccttggaggctattgagcttccattagatattctctatgaggatgaccactttctagtcttgaataaaccctatggagtggcttctattcctagtgttaatcactctaataccattgccaattttatcaagggttactatgtcaagcaaaattatgaaaatcagcaggttcacattgttaccagactagatagggacacttctggcttgatgctctttgccaagcacggttatgcccatgcacgattagacaagcagttgcagaagaaatctatcgagaaacgctactttgctttggttaagggagatggacatttggagccagaaggggaaattattgctccgattgcgcgtgatgaagattccattattaccagacgagtggctaaaggcggaaagtatgcccatacttcatacaagattgtagcttcttatggaaatattcacttggtctatattcacctgcacactggtcgaacccatcaaatccgagtccatttttctcatatcggttttcctttgctgggagatgatttgtatggtggtagtctggaagatggtattcaacgtcaggctctgcattgccattacctatccttttatcatccatttttagagcaagacttgcagttagaaagtcccttgccggatgatttcagtaaccttattacccagttatcaactaatactctataa

SEQ ID NO: 37781 - DNA, 975 bp, Streptococcus pneumoniae
atggaagtttttgaaagtctcaaagccaaccttgttggtaaaaatgctcgtatcgttctccctgaaggggaagagcctcgtattcttcaagcaacaaaacgcttagtaaaagaaacagaagtgattcctgttttgcttggaaatcctgaaaaaattaaaatttatcttgaaattgaaggaatcatggatggttatgaggtcatcgaccctcaacattatcctcaatttgaagaaatggtttctgccttggtggagcgtcgcaagggcaaaatgactgaagaagatgtacgcaaggttttggttgaagatgtcaactactttggtgtgatgttggtttacttgggcttggttgatggaatggtgtcaggagcgattcactcaacagcttcaacagttcgcccagctctacaaatcatcaaaactcgtccaaatgtaactcgtacttcaggagccttcctcatggttcgtggtacggaacgttacctatttggagactgtgccattaatatcaatccagatgcagaagccttggctgaaattgccatcaactcagcaatcacagctaagatgtttggcatcgaacctaaaattgccatgttgagctattctactaaaggttcagggtttggtgaaagcgttgataaggtcgttgaagcaactaaaattgctcacgacttgcgtcctgaccttgaaatcgatggtgagttgcaatttgatgcggcctttgttcccgaaactgcagctctgaaagctccgggaagtacagtagctggtcaagcaaatgtcttcatcttcccaggtatcgaggcaggaaatatcggttacaagatggctgaacgcctgggtggctttgcggctgtaggacctgttttgcaaggtttaaacaagccagttaatgatctttctcgtggatgtaatgcagatgatgtttacaagttgaccctcatcacagcagctcaagcagttcatcaatag

SEQ ID NO: 37782 - DNA, 300 bp, Streptococcus pneumoniae
atgatgaacatgcaaaacatgatgcgtcaagcacaaaaacttcaaaaacaaatggaacaaagccaagctgaacttgctgctatgcaatttgttggcaaatctgctcaagatcttgtccaagcgaccttaactggcgataagaaagttgtcagcattgatttcaatccagctgtcgttgacccagaggaccttgagactctttctgatatgaccgttcaagccatcaactctgctcttgaacaaatcgatgaaactaccaagaaaaaactgggtgctttcgctgggaaattacctttctaa

SEQ ID NO: 37783 - DNA, 315 bp, Streptococcus pneumoniae
atgagcacatacgcaattatcaaaactggcggaaaacaagttaaagttgaagttggtcaagcagtttacgttgaaaaattgaacgttgaagctggtcaagaagttacttttaacgaagttgttcttgttggtggtgaaaacactgttgtcggaactccacttgttgctggagctactgtagttggaactgttgaaaaacaaggaaaacaaaagaaagtggttacttacaagtacaaacctaaaaaaggtagccaccgtaaacaaggtcaccgtcaaccatatacaaaagttgtcatcaacgcaatcaacgcttaa

SEQ ID NO: 37784 - DNA, 345 bp, Streptococcus pneumoniae
atgatacaggcagtctttgagagagccgaagatggcgagctgaggagtgcggaaattactggacacgccgagagtggcgaatacggcttagatgtcgtgtgtgcatcggtttctacgcttgccattaactttatcaattctattgagaaatttgcaggctatgaaccaatcctagaattaaacgaagatgaaggtggctatctgatggttgaaataccaaaagatcttccttcacaccagagagaaatgacccagttattctttgaatcatttttcttaggtatggcaaacttatcggagaactcttctgagttcgtccaaaccagagttatcacagaaaactaa

SEQ ID NO: 37785 - DNA, 270 bp, Streptococcus pneumoniae
ttgcaacttttcgcccacaaaaaaggtggaggttctacatcaaacggacgtgattcacaagcaaaacgtcttggagctaaagcagctgacggacaaactgtaacaggtggatcaatcctttaccgtcaacgtggtacacacatctatccaggtgtaaacgttggtcgtggtggagacgatactttgttcgctaaagttgaaggcgtagtacgctttgaacgtaaaggacgcgataaaaaacaagtttctgtttacccaatcgcaaaataa

SEQ ID NO: 37786 - DNA, 918 bp, Streptococcus pneumoniae
atgattattactattcctataaaaaaccaaaaagatattggcacaccatctgattcagtcgttgttctcggctattttgatggcatacataaggggcatcaagaattatttcgtgttgccaacaaggctgcgagaaaggatttattgcctatcgtcgttatgacctttaatgaatctccaaagatcgctttagaaccttatcatccagatttgtttttgcatattttgaaccctgctgaacgtgaaagaaaattaaagcgcgaaggtgtagaagaattatatctccttgattttagtagtcaattcgctagtctcactgcacaagaattctttgcaacttatatcaaggctatgaatgccaaaattattgttgcaggttttgattatacatttggttctgacaaaaaaacagcagaagatttaaaggattactttgatggagaagttatcattgttccacctgtagaagatgagaaaggaaagattagttcaactcgtatccgtcaagctattttagatggaaatgtgaaagaagcaggaaaacttttgggggcaccgcttccatcaagaggtatggtagttcatggtaatgctcgtggtcgtacaattggttatccgacagcgaatttagtgcttttagaccgtacttatatgccagcagatggcgtttatgtcgttgatgttgagattcaaagacagaagtatcgtgctatggctagtgtcgggaaaaatgtgacctttgatggagaagaagcacgttttgaagtcaatatttttgattttaatcaagatatttatggggaaaccgtcatggtttattggcttgatcgcattcgtgatatgaccaaatttgactcagttgaccaattagtggatcagttaaaggctgatgaagaagtaactcggaattggtcttaa

SEQ ID NO: 37787 - DNA, 276 bp, Streptococcus pneumoniae
atggcaaacaaacaagatttgatcgctaaagtagcagaagctacagaattgactaagaaagactcagcagcagcagttgaagctgtatttgcagcagtagctgactatcttgcagctggtgaaaaagttcaattgatcggttttggtaactttgaagttcgtgagcgtgcagaacgtaaaggtcgcaacccacaaactggtaaagaaatgacaattgcagcttctaaagtaccagcattcaaagctggtaaagctcttaaagacgctgttaaataa

SEQ ID NO: 37788 - DNA, 1902 bp, Streptococcus pneumoniae
atgattattttacaagctaataaaattgaacgttcttttgcaggagaggttcttttcgataatatcaacctgcaggttgatgaacgagatcggattgctcttgttgggaaaaatggtgcaggtaagtctactcttttgaagattttagttggagaagaggagccaactagcggagaaatcaataagaaaaaagatatttctctgtcttacctagcccaagatagccgttttgagtctgaaaataccatctacgatgaaatgcttcatgtctttaatgatttgcgtcggacggagagacaactgcgtcagatggagctggagatgggtgaaaagtctggtgaggatttggataaactgatgtcagattatgaccgcttatctgagaattttcgccaagcaggtggctttacctatgaagctgatattcgagcgattttgaatggattcaagtttgacgagtctatgtggcagatgaaaattgctgagctttctggtggtcaaaatactcgtttggcacttgccaaaatgctccttgaaaagcccaatctcttggtcttggacgagccaactaaccacttggatattgaaaccatcgcctggctagagaattacttggtaaactatagcggtgccctcattatcgtcagccacgaccgttatttcttggacaaggttgcgacaattacgctagatttgaccaagcattccttggatcgctatgtggggaattactctcgttttgtcgaattgaaggagcaaaagctagttactgaggcaaaaaactatgaaaagcaacagaaggaaatcgctgctctggaagactttgtcaatcgcaatctagttcgtgcttcaacgactaaacgtgctcaatctcgccgtaaacaactggaaaaaatggaacgtttggacaagcctgaagctggcaagaaatcagccaacatgaccttccagtctgaaaaaacgtcgggcaatgttgttttgactgttgaaaatgcagctgttggctatgacggggaagtcttgtcacaaccgattaacctagatcttcgtaagatgaatgctgtcgctatcgttggtccaaatggtatcggcaagtcaacctttatcaagtctattgtggaccagattccttttatcaagggagaaaagcgctttggcgctaatgttgaggttggttactatgaccaaacccaaagcaagctgacaccaagtaatacggtgctggatgaactctggaatgatttcaaactgacaccagaagttgaaatccgcaaccgtcttggagccttccttttctcaggagatgatgttaaaaaatcagtcggcatgctatctggtggcgaaaaagctcgtttgcttttagctaaattgtctatggaaaacaataattttttgattctggatgagccgaccaaccacttggatattgatagtaaggaagtgctagaaaatgccttgattgactttgatggaaccttgctgtttgtcagtcatgatcgttactttatcaatcgtgtggcaactcatgttttggaattgtctgagaatggttcaactctctaccttggagattacgactactatgttgagaagaaagcaacagcagaaatgagtcagactgaggaagcttcaactagcaatcaagcaaaggaagcaagtccagtcaatgactatcaggcccagaaagaaagtcaaaaagaagttcgcaaactcatgcgacaaatcgaaagtctagaagctgaaattgaagagctagaaagtcaaagccaagccatttctgaacaaatgttggaaacaaacgatgccgacaaactcatggaattacaggctgagctggacaaaatcagccatcgtcaggaagaagctatgcttgagtgggaagaattatcagagcaggtgtaa

SEQ ID NO: 37789 - DNA, 1959 bp, Streptococcus pneumoniae
atgaataaaagaatgaatgagttagtcgctttgctcaatcgctatgcgactgagtactataccagcgataatccctcggtttcagacagtgagtatgaccgcctttaccgtgagttggtcgagttagaaactgcttatccagagcaagtgctagcagacagtccgactcatcgtgttggtggcaaggttttagatggttttgaaaaatacagtcatcagtatcctctttatagtttgcaggatgctttttcacgtgaggagctagatgcttttgatgcgcgtgttcgtaaggaagtggctcatccgacctatatttgtgagctgaaaatcgatggcttatctatctcgctgacttatgaaaaggggattttggttgctggggtaacacgtggagatggttcaattggtgaaaatatcacagaaaacctcaagcgtgttaaggacatccctttgactttgccagaagaactagatatcacagttcgtggggaatgttacatgccacgcgcttcctttgaccaagttaaccaagcgcgccaagaaaatggagagcctgaatttgctaatcctcgtaatgcggcagcaggaactctgcgtcagttggatacagcagtagttgccaagcgtaatcttgcaacgtttctctatcaagaagccagcccttcaactcgtgatagccaagaaaagggtttgaagtacctagaacaactaggttttgtggtcaatcctaagcgaatcttggctgaaaacatagatgaaatctggaattttatccaagaagtaggacaggaacgggaaaatctgccttacgatattgatggagtggtaatcaaggtcaacgacctagcaagtcaagaagaacttggttttaccgttaaggctccaaagtgggcagtagcctacaagttccctgctgaagaaaaagaagctcaactcttatcagttgactggacagttggccgtaccggtgttgtaactccaactgctaatctaacaccagtacaacttgccggtacgactgttagccgtgcgaccctgcacaatgtagattatattgctgaaaaagatatccgaaaagacgatacggtcattgtatataaggctggtgacatcatccctgccgttttacgtgtggtagagtccaaacgggtttctgaagaaaaactagatatccctacaaactgtccaagttgtaactctgacttgttgcactttgaagatgaagtggccctacgttgtatcaatccgcgttgccctgctcaaatcatggaaggcttgattcactttgcttctcgtgatgctatgaatattacaggccttggtccatctattgttgagaagctttttgctgctaatttagtcaaggatgtggcggatatttatcgtttgcaagaagaggatttcctccttttagagggggttaaggaaaagtccgctgctaaactgtatcaggctatccaagcatcaaaggaaaattctgccgagaagctcttatttggtttgggaattcgtcatgtcggaagcaaggctagtcagcttttacttcaatatttccattcaattgaaaatctgtatcaggcagattcagaggaagtggctagtattgaaagtctaggtggcgtgattgccaaaagtcttcagacttattttgcggcagaaggctctgaaattctgctcagagaattgaaagaaactggggtcaatctggactataaaggacagacggtagtagcggatgcggccttgtcaggtttgaccgtggtattgacaggaaaattggaacgactcaagcgctcagaagctaaaagtaaactcgaaagtctgggtgccaaagtgacaggtagtgtttctaaaaagaccgacctcgtcgtggtaggtgcagacgctggaagtaaactgcaaaaagcacaagaacttggtatccaggtcagagatgaggcatggctagaaagtttgtaa

SEQ ID NO: 37790 - DNA, 1425 bp, Streptococcus pneumoniae
ttgacaagatatcagaatttagtaaatggaaaatggaaatcatccgaacaagaaattacgatttattcaccaatcaatcaagaagaattgggtacagttccagccatgactcagactgaagctgatgaggctatgcaagctgcgcgtgcagccctgccagcatggcgagctttatcagcaattgaacgtgcggcttatttgcataaaacagcagctattttagaacgcgataaggaaaaaattggtactatccttgccaaagaagtagcaaaagggattaaagcagcaattggagaagtagtgcgtacagcagacttgattcgttatgctgctgaggaaggtctccgtatcactggacaagcaatggaaggtggtggttttgaggcagcaagtaaaaacaaactggctgttgtccgtcgtgaaccagttggtatcgtgctagcgattgctccctttaattatccagttaatttatctgcttctaaaattgcacctgccttgattgcagggaatgtggtcatgttgaagccaccaacacaaggttccatttctggactcttgttggctaaagcatttgaagaagcagggattccggcaggtgttttcaacaccattacaggtcgtggttcagaaattggggattatatcattgagcacaaagaagtcaacttcatcaactttacaggttcaactcctattggagaacgtattggtcgtttagctggtatgcgtcctatcatgttggaacttggtgggaaagatgcagctcttgtactagaagatgcagatttggaacatgctgccaagcaaattgttgcgggagcctttagctactcaggacaacgttgcacggccattaaacgtgtcattgttctcgaaagtgtagcagataaattagctactttgcttcaggaagaagtttctaaattaacagttggtgatccatttgacaatgctgatattacacctgttattgacaatgcttcagccgacttcatttggggcttgattgaggatgcacaagaaaaagaggctcaggctcttacaccaatcaaacgtgagggcaatctcctctggccagtgctttttgaccaagttacaaaagatatgaaagtggcatgggaagagccatttggtcctgttttaccaatcattcgtgtggctagtgtagaggaagctattgcctttgccaacgaatctgaattcggccttcaatcatcagtctttacaaatgatttcaaaaaagcctttgaaattgctgaaaaacttgaagtaggtacagtccacattaataataaaacccagcgtggtccagataatttcccattccttggtgtcaaaggttctggagctggagtgcaaggaattaaatatagcattgaagcgatgacaaatgtcaaatccattgtttttgatgtgaaataa

SEQ ID NO: 37791 - DNA, 1305 bp, Streptococcus pneumoniae
atgtcaattattactgatgtttacgctcgcgaagtcctagactcacgcggtaacccaacacttgaagtagaagtttacactgaatcaggtgctttcggacgtggtatggttccatcaggagcttctactggtgaacacgaagcagttgaacttcgcgacggtgacaaatctcgttacggtggtcttggtacacaaaaagctgttgacaacgtaaacaacatcattgctgaagctatcattggctacgatgtacgtgatcaacaagctattgaccgtgctatgatcgcacttgacggtactcctaacaaaggtaaattgggtgcgaatgcaatcctcggtgtgtctatcgctgtagctcgtgctgctgctgactaccttgaaatcccactttacagctaccttggtggattcaacactaaagttcttccaactccaatgatgaacatcatcaacggtggttctcactctgacgctccaatcgctttccaagagttcatgatcttgccagttggtgcgccaacatttaaagaagcccttcgttacggtgctgaaatcttccacgctcttaagaaaatccttaaatcacgtggtttggaaactgccgtaggtgacgaaggtggattcgctcctcgtttcgaaggaactgaagatggtgttgaaactatccttgctgcgattgaagctgctggatatgtaccaggtaaagacgtatttctcggatttgactgtgcttcatcagaattctacgataaagaacgtaaagtttacgactacactaaatttgaaggcgaaggtgctgctgttcgtacatctgcagaacaaatcgactaccttgaagaattggttaacaaatacccaatcatcactattgaagatggtatggatgaaaacgactgggatggttggaaagctcttactgaacgtcttggtaagaaagtacaacttgttggtgacgacttcttcgtaacaaacactgactaccttgcacgtggtatccaagaaggtgctgctaactcaatccttatcaaagttaaccaaatcggtactcttactgaaacttttgaagctatcgaaatggctaaagaagctggttacactgctgttgtatcacaccgttcaggtgaaactgaagattcaacaatcgctgatatcgcagttgcaactaacgcaggacaaatcaagactggttcactttcacgtacagaccgtatcgctaaatacaaccaattgcttcgtatcgaagaccaacttggtgaagtagctgaatatcgtggattgaaatcattctacaaccttaaaaaataa

SEQ ID NO: 37792 - DNA, 3276 bp, Streptococcus pneumoniae
atgaaattactttatactgatattcggacttctttgacagaaattctaacaagagaggcagaagagctagttgcagctggcaagcgggtcttctacattgcccccaactctctttcttttgaaaaggaacgcgccgtgctggaatacttgtcccagcaggcttctttttcgattaccgtcacgcgctttgctcaaatggctcgctatctggtcttgaatgatttaccagctaaaactactcttgatgatatcggtcttgggttggccttttacaaatgccttgccgaactcgatcccaaggacttgcgtgtttatggcgctattaagcaggatcctcaattgatccagcagttaattgagctttaccatgagatgaccaaatctcagatgagttttttggacttggagaatttaacagatgaggataagagggcggatttactcttgatttttgagaaagtaacagcctatcttaatcaaggtcagttagcccaggaaagtcagttgtcccatttgattgaggctattgagaatgacaaggtaagtagtgattttaatcaaatcgccttggtcattgacggctttactcgtttttctgctgaggaagagcgggttgtggacttacttcacggcaaaggtgttgagattgttatcggggcttatgctagtaagaaagcctataccagtccttttagcgagggcaatctctaccaagccagcgtaaaatttctccatcatctggcttctaaataccaaacgcctgctcaggactgttctcaaactcatgagaagatggatagttttgacaaggcctctcgtttgttggagtcttcttatgacttttcagaactcgctttggatgtcgatgagaaagaccgtgaaaatttacaaatctggtcttgtttgacgcaaaaggaggagttggagctagtagcccgtagtattcgtcagaaattacatgagaactcagacctgagctacaagcattttcgtattctcttgggggatgtagcttcttaccagttatctctcaaaaccatttttgaccagtatcagattcctttttatcttggtagaagcgaagccatggctcatcatcccttgactcagtttgtcgagtctattttagctttaaaacgttaccgttttcgtcaggaggatttgattaatcttcttagaactgatttgtatactgacctcagtcagtctgatattgatgcttttgagcaatatatccgctatcttggtatcaatggcttgccagcctttcagcaaaccttcaccaaatcccaccatggaaaatttaatcttgagcgtttgaatgtcctccgcctgagaattttagcacctcttgaaaccctctttgccagccgaaaacaaaaggctgaaaaactcctacaaaaatggagtgtctttctaaaagaaggagctgtgaccaagcagttacaagatttgacaaccactttggaagctgtagaacaggaaagacaagccgaagtttggaaggctttctgccatgttttagaacaatttgcgactgtttttgctggttcacaggttagtctggaagacttcctagccttgctccattctggaatgagtttgtcccaataccgtaccattccagcaacagtggacactgttctggtgcagagttacgatttgattgcaccattgactgctgactttgtctatgctattggactaactcaggacaatttaccaaaaatttctcaaaacaccagtcttctgacagatgaagaaaggcaaaacctaaaccaagcgaccgaagaaggcgttcaattactgattgccagcagtgaaaatctcaagaaaaatcgctacactatgctttccttggtcaattctgctcgtaagcagttgttcttgtcggctccaagcctttttaacgaaagtgaaagtaaggaatctgcctatcttcaagagttgatccattttggatttaggcggagagagaagaggatgaatcacaaaggactgtctaaggaggatatggggtcctatcacagtcttttgtctagtctggttgcctatcaccagcagggtgagatgagcgatactgagcaagatttgacttttgtcaaggttctgtcgcgtgtcataggtaaaaaactagatcagcaaggtctggaaaatccagctatcccaaccagtccaagcagcaagaccttagccaaggacaccttgcaagctctctatcctgccaaacaggagttttacctgtctacgtcgggtttgacagagttttatcgcaatgaatacagttatttcctacgctacgttttaggcttgcaggaggaattacgtttgcatcctgatgcccgtagtcacgggaatttcttgcatcgtatctttgaacgcgccttacagttgcctaatgaagattcctttgaccaacgtctagaacaagctattcaagaaaccagtcaagaacgcgaatttgaagctatttatcaagaaagtttggaagcccagtttaccaaggaagttttgcttgatgttgcacggacaactggacatattctccgacacaatccagccatcgaaaccatcaaagaagaagcaaattttggtggaaaagaccaagcctttattcaattagacaatggacgcagtgtctttgtacgaggcaaggtggaccggattgaccgtttgaaagctaatggagcgataggagtagtagactacaaatccagtctgactcagttccagtttcctcatttctttaatgggctcaattctcagttaccaacctatcttgctgccctaaaaagagaaggggagcagaactttttcggcgccatgtacttggaaatggctgaacctgtccaatctctgatggcggtaaaaagtctggcaggagcagtggtagaagccagcaaatctatgaaataccaagggctcttcttggaaaaagaaagcagttatttaggcgaattttataacaaaaacaaggctaatcaactgacagatgaggaatttcagctcctactggactacaatgcctatctttacaagaaagctgctgagaagattttagcaggccggttcgccatcaatccttatactgaaaatggcagaagcattgccccatacgtccagcaacatcaggctattacaggctttgaagccaattaccatctgggccaagcccgtttcctagaaaagttggacctagctgatggcaagcgtctggtcggagaaaaactcaagcaagcttggcttgaaaaaataagagaggagttgaatcgatga

SEQ ID NO: 37793 - DNA, 3651 bp, Streptococcus pneumoniae
atgaagcttattccctttttaagtgaggaggagattcaaaaactgcaagaagcagaagcaaattcgagcaaggaacagaagaaaactgccgagcaaatcgaagctatctacacttctgcccagaatatcctggtctcagcatcggctggttctggaaagacctttgtcatggcagagcgcattctggaccaattggcgcgtggtgtcgaaatttctcaactctttatctcaacctttaccgtcaaggctgcaactgaacttaaagaacgtttagagaaaaaaatcagcaagaaaatccaagaaacagatgatgtcgacctcaaacaacacttgggtcgccagttggcagacctacccaacgctgccattggaaccatggattctttcacacaaaaattccttggcaaacatggttatctgcttgatattgcacctaatttccgtattttacaaaaccaaagcgagcaacttattctcgaaaacgaagtctttcatgaggtctttgaagcgcattaccaaggtaaacagaaagagacctttagtcatttgctgaaaaactttgctgggcgtggcaaggacgaacggggtctgcgccagcaggtctataaaatctatgacttcctccaatccaccagtaatcctcaaaagtggctgagtgaatctttcctcaaaggatttgagaaagctgattttaccagtgaaaaagaaaaactgaccgagcaaatcaaacaagccctttgggatttggaaagctttttccgttaccatctggataacgatgccaaggagtttgcaaaggctgcctatttagaaaatgttcagttaattctggatgaaattggctccctaaatcaggagtccgatagtcaggcttatcaggcagtgcttgcgcgtgttgtcgccatctctaaggagaaaaacggtcgagctctgactaatgccagccgtaaggctgatttgaagcccctggctgatgcctacaacgaagagagaaagacccagtttgctaaactaggacaattatcagaccagatagcgattctcgactatcaagaacgttatcatggagacacttggaaactagctaaaaccttccaatctttcatgagcgattttgtagaggcttatcgtcagagaaaacgacaggaaaatgcctttgaattcgctgatatcagccattacaccattgagattttagagaatttcccacaagttcgtgagtcttatcaggagcgcttccatgaagtcatggtcgatgagtatcaggataccaaccatattcaagaacggatgctggaattgttgtctaatggccacaatcgctttatggtgggagatatcaagcaatccatctatcgtttccgtcaggcagacccgcagattttcaatgagaaattccaacgctatgcgcaaaatccccaagaaggcaggctcattatcctcaaggaaaatttccgtagtagttcagaagtgctgtcagcaaccaatgatgtctttgaacgtctcatggaccaagaggtcggcgaaatcaactatgataacaagcaccagcttgtttttgccaataccaaactgactcccaatccagacaacaaggcagcatttctcctctacgacaaggacgatacaggtgaggaagaagagagtcaaacagaaacgaaactaacaggcgaaatgcgcttagttatcaaggagattctgaaacttcatcaagaaaaaggtgttgcctttaaggaaattgcccttctgacctccagccgcagtcgtaatgaccagattctcctcgccctgtctgagtacggaattcctgtcaaaactgacggagagcaaaacaattatctccaatccctagaagtgcaagtcatgctagacactcttcgtgtcattcacaatcccctgcaagactacgccttggttgcccttatgaagtctccaatgtttggttttgatgaggatgagctagcacgtttgtcccttcagaaagcagaggataaagtccacgaaaatctctatgagaaactggtcaatgcacaaaaaatggcaagtagtcaaaaaggcttgattcacacagctctagctgaaaaactaaagcaattcatggatatcctagcttcttggcgcttgtatgccaaaacccactctctctatgacttgatttggaagatttacaacgaccgtttttattatgactatgttggggctttgccgaatggtcctgctaggcaggccaatctctatgccctagcactgcgtgctgatcaatttgaaaagagcaatttcaaaggtttgtcgcgttttattcgtatgattgaccaagtcttagaagcccagcacgatttggcaagcgtggccgtcgcaccgccaaaagatgcagtagagctcatgaccatccacaagagtaaagggctggagtttccttacgtctttatcctcaatatggatcaagatttcaacaagcaagactctatgtcagaagtcattctcagtcgtcagaatggtcttggtgtcaaatatattgccaagatggagacaggggcagtagaagaccactatcctaaaaccatcaaactctccattcctagtctgacctataggcagaacgaagaggaattacagctagcaagctattctgagcagatgcgtttgctgtatgttgctatgacgcgggctgagaaaaagctctatcttgtcggcaagggttctcgtgaaaagctggaatccaaggaatacccagcagccaaaaatgggaaactaaatagcaatactagactgcaagcacggaatttccaagattggctttgggctatcagtaaagtgtttactaaggacaagctcaactttagttatcgttttattggcgaagatcagttgaccagagaagctatcggagagttggaaaccaagagtcctctccaagatagctcccaagcagacaatcgtcagtcagataccatcaaagaagctctggaaatgctgaaggaggtggaagtttataatactcttcaccgcgcagctattgaacttcctagtgttcaaaccccaagtcaaatcaagaaattctacgaaccagttatggatatggaaggtgtcgagattgctggtcaaggtcagtcagtaggcaagaaaatcagcttcgatttgccagatttttcaaccaaagaaaaggtaactggagctgagattggtagtgctactcacgaactcatgcagagaattgacctcagccagcaactaacccttgctagcctaacagaaacactcaaacaagttcaaactagccaagctgtcagagacaagatcaatcttgataaaattcttgctttctttgacacagtactcggtcaggaaattcttgctaataccgaccatctttatcgcgagcaacctttctccatgctcaaacgagaccaaaagagtcaggaagactttgttgtccgtggtatccttgatggctatctgctttacgaaaacaaaattgttctgttcgactacaagacagaccgctatgatgaaccaagtcaactcgtagaccgctatcgtggtcagttagctctatacgaagaggctttatcacgagcctattcgattgaaaatattgaaaaatacttgattttactcggtaaagacgaggttcaagttgtaaaagtataa

SEQ ID NO: 37794 - DNA, 5892 bp, Streptococcus pneumoniae
atggaaaagtattttggtgaaaaacaagagcgtttttcatttagaaaattatcagtaggacttgtatctgcaacgatttcaagtttattttttatgtctgtattagctagttcatctgtggatgctcaagaaactgcgggagttcactataaatatgtggcagattcagagctatcatcagaagaaaagaagcagcttgtctatgatattccgacatacgtggagaatgatgatgaaacttattatcttgtttataagttaaattctcaaaatcaactggcggaattaccaaatactggaagcaagaatgagaggcaagccctagttgctggtgctagcttagctgctctgggaattttaatttttgctgtttccaagaaaaaggttaagaataaaacggtattacatttagtattggttgcgggaatgggaaatggtgtcttagtttcagtccatgctttagaaaatcatcttttgctaaattacaatacggactatgaattgacctctggagaaaaattacctcttcctaaagagatttcaggttacacttatattggatatatcaaagagggaaaaacgacttctgattttgaagtaagtaatcaagaaaaatcagcagccactcctacaaaacaacaaaaggtggattataatgttacaccaaattttgtagaccatccatcaacagtacaagctattcaggaacaaacacctgtttcttcaactaagccgacagaagttcaagtagttgaaaaacctttctctactgaattaatcaatccaagaaaagaagagaaacaatcttcagattctcaagaacaattagccgaacataagaatctagaaacgaagaaagaggagaagatttctccaaaagaaaagactggggtaaatacattaaatccacaggatgaagttttatcaggtcaattgaacaaacctgaactcttatatcgtgaggaaactatagagacaaaaatagattttcaagaagaaattcaagaaaatcctgatttagctgaaggaactgtaagagtaaaacaagaaggtaaattaggtaagaaagttgaaatcgtcagaatattctctgtaaacaaggaagaagtttcgcgagaaattgtttcaacttcaacgactgcgcctagtccaagaatagtcgaaaaaggtactaaaaaaactcaagttataaaggaacaacctgagactggtgtagaacataaggacgtacagtctggagctattgttgaacccgcaattcagcctgagttgcccgaagctgtagtaagtgataaaggcgaaccagaagttcaaccgacattacccgaagcagttgtgaccgacaaaggtgagactgaggttcaaccagagtcgccagatactgtggtaagtgataaaggtgaaccagagcaggtagccccattgccagaatataagggtaatattgagcaagtaaaacctgaaactccggttgagaagaccaaagaacaaggtccagaaaaaactgaagaagttccagtaaaaccaacagaagaaacaccagtaaatccaaatgaaggtactacagaaggaacctcaattcaagaagcagaaaatccagttcaacctgcagaagaatcaacaacgaattcagagaaagtatcaccagatacatctagcgaaaatactggggaagtgtccagtaatcctagtgattcgacaacctcagttggagaatcaaataaaccagaacataatgactctaaaaatgaaaattcagaaaaaactgtagaagaagttccagtaaatccaaatgaaggcacagtagaaggtacctcaaatcaagaaacagaaaaaccagttcaacctgcagaagaaacacaaacaaactctgggaaaatagctaacgaaaatactggagaagtatccaataaacctagtgattcaaaaccaccagttgaagaatcaaatcaaccagaaaaaaacggaactgcaacaaaaccagaaaattcaggtaatacaacatcagagaatggacaaacagaaccagagaaaaaactcgaattaagaaatgtttctgatattgagttgtatagtcagacgaatggaacctacagacaacatgtttcattggatggaattccagagaatacggatacttactttgtcaaggtaaaatcttcagcatttaaagatgtctatataccagtagcttcaataaccgaagagaaaagaaatgggcagtcagtttataaaatcacagccaaagctgagaaactccagcaagaactagaaaataaatatgtcgacaatttcaccttctacctcgataagaaggctaaagaggaaaatacaaactttacttcctttagcaacctggtcaaagctataaaccaaaatccctctggaacctatcatttagcggccagcctgaatgctaacgaagtggagcttggtcctgatgaaagatcctatatcaaggacacctttactggtcgtttaatcggtgaaaaagatggcaagaattatgctatctataatttgaaaaaacctctgtttgaaaacttgagtggtgctacagtagaaaaactgagtctaaaaaatgttgctatttcagggaaaaatgatattggttcactggcaaatgaagctacgaatggcacaaagattaaacaagttcatgttgatggtgttctggctggagaacgtggtgtcggtggtttgttggctaaggcagaccaatcaagcatcgcagagagcagtttcaagggaagaattgtcaatacctatgaaacgactgatgcctacaatattggcggtctggtcggtcatttaacaggaaaaaatgcgtctattgctaaatccaaagcgacagtaaccatttcgtcaaacaccaataggtcagatcagactgtcggtggtcttgcaggtctagtagaccaagatgcgcatatacagaacagttatgcggaaggtgatattaataatgtcaagcactttggtaaagtcgctggtgtggcaggatatttgtgggatcgaacttctggtgaggaaaaacacgctggtgaattgaccaatgttcttagcgatgtcaatgtaacaaacggaaatgccatcactggataccactatacaggaatgaaggtagctaatacatttagtagtaaggctaatagagttttcaatgtcactttagagaaggatgaggtcgtcagcaaggaatcctttgaagaaagaggaacaatgctagatgcttctcaaattgtaagcaaaaaagcagaaataaatcctctcactctaccaacggtggaacccctctcaacaagtggcaagaaagacagtgatttttctaagatagcccattatcaagctaaccgtgctttggtttataagaacattgaaaaattgttacctttttataataagtcaaccatcgtcaaatacggaaacctggttaaggagaacagtctcttataccaaaaagaactcttatctgcagttatgatgaaggatgaccaagtaatcacagatattgtttccaacaaacagactgcaaacaaactcttacttcactataatgaccattcatctgagaaatttgatctcaagtaccagactgattttgccaatctagcagaatataatctaggtaatacgggacttctctacactcctaaccaattcttatatgatcgagactctattgttaaggaagtcttgcctgagttgcagaagcttgattaccagtcagatgctatcagaaagacacttggtatttctccagaagttaagttaaccgagctctatttagaagaccagttctccaaaacaaaacaaaatctgggagacagcttgaaaaaacttttgtcagcagatgccggtctagctagcgataactcagtcaccagaggctatcttgtagataaaatcaagaataataaggaagccttgctactcggtttaacttatttagaacgttggtataactttaactatggtcaagtgaatgtcaaagacctagttatgtatcatccagacttctttggtaaaggaaatacttccccactagatactctgattgagttaggtaaatctggctttaacaatcttctagctaagaataatgtcgatacttatggtatcagtcttgccagtcaacatggagcgacagatttgtttagcacgctggaacattaccgaaaagtctttttaccaaatacaagcaataatgactggtttaaatcagagactaaggcttacattgtcgaagaaaaatccactatcgaagaggtgaaaacgaagcaagggttagctggcaccaagtattctatcggtgtttatgatcgtatcacgagtgccacatggaaataccgcaatatggtcttgcctctcctgaccttgccagagagatccgtatttgtcatctcgaccatgtctagtctaggatttggagcttatgatcgctaccgcagtagtgaccataaagcgggcaaggctctcaatgattttgttgaagaaaatgcgcgtgaaacagccaaacgtcagcgagatcactacgattattggtatcgtattttagatgaacagtcacgcgaaaaactctatcgtacgattctcctttatgatgcctataagtttggggatgacacaacatcaggaaaagctacagcggaggctaagtttgatagctccaatccagctatgaagaacttctttggaccagttggcaataaggtagtacacaaccagcatggagcctacgctacaggggacggcgtctactatatgtcttaccgcatgctggacaaggatggagccattacttatacccatgaaatgacccatgattcggatcaggatatttaccttggtggctatggtcgaagaaatggcttgggaccagagttcttcgcaaaaggcttattgcaagcccctgaccaaccaagtgacgcaaccattaccattaattctatcttgaaacactcaaaatcagatagtacagagggatcccgtcttcaagtcttggatccgacagagagattccaaaacgcagcagatcttcagaactatgtccataacatgtttgaccttatctacatgatggaatatctcgaagggcagtcaatcgttaataaactaagtgtttaccagaaaatggcggctctcagaaaaattgagaacaagtatgtgaaagatccagcagatggaaatgaggtttatgccactaacgtagtcaaagaattgacagaagcagaggcccgaaacctgaatagttttgaaagtttgattgaccacaacatcttatcagctcgtgagtaccagtctggcgactatgaacgaaatggctactataccatcaaactctttgccccaatctattcagctctcagcagtgagaaaggcacaccaggggaccttatgggacgtaggattgcgtacgaacttttggctgccaaaggctttaaggatggaatggtaccttatatctcaaaccaatacgaagaagatgctaaacaacaagggcaaactatcaatctttatggtaaagaacggggcttggtgaccgatgagcttgttttgaaaaaggtatttgacggtaagtataaaacttgggcagaatttaagacagctatgtaccaagaacgggtggatcagtttggaaacttgaagcaggtgacctttaaagatccgacaaaaccatggccaagctatggcacaaagactatcaataatgtggatgaattgcaagccctcatggaccaagctgttctcaaggatgctgaaggtccacgttggagtaattatgatccagaaatcgacagtgccgttcataagttgaagagagcaatctttaaagcctatcttgaccaaacaaatgattttagaagttcaatttttgagaataaaaaatag

SEQ ID NO: 37795 - DNA, 852 bp, Streptococcus pneumoniae
atggctactattcaatggtttcctggtcacatgtctaaagcgcgtcgacaggtgcaggaaaatttaaaatttgttgattttgtgacgattttagtagatgcacgcttgcctctatctagtcaaaatcctatgttgaccaagattgttggtgataaaccaaaactcttgattttaaacaaggccgacttggctgatccagcaatgaccaaggaatggcgtcagtattttgaatcacaaggaatccagacgctagctatcaactccaaagagcaagtgactgtaaaagttgtaacagatgcggccaagaagctcatggctgataagattgctcgccagaaagaacgtgggattcagattgaaaccttgcgtaccatgattatcgggattccaaacgctggtaaatccactctgatgaaccgtttggctggtaaaaagattgctgttgttggaaacaagccaggggtcacaaaaggtcaacaatggcttaaaaccaataaagatctggaaatcttggatacaccggggattctctggcctaagtttgaggatgaaactgttgcacttaagttggcattgactggagctatcaaggatcagttgcttcctatggatgaggttaccatttttggtatcaattatttcaaagaacattatccagaaaagctggctgaacgcttcaaacaaatgaaaattgaagaagaagcgcctgtgattattatagatatgacccgcgccctcggtttccgtgatgactatgaccgtttttacagtctcttcgtgaaggaagtccgtgatggcaaactcggtaactataccttagatacattggaagacctcgatggcaacgattaa

SEQ ID NO: 37796 - DNA, 780 bp, Streptococcus pneumoniae
atggcaacgattaaagaaatcaaagaactccttgtgacagtcaaggagttagaaagccctatttttttagagcttgaaaaggataatcgctcaggagttcaaaaggaaatcagcaagcgtaaaagagccattcaagctgaattagatgaaaatttgcgcttggaatccatgctttcttatgaaaaagaactttataagcaaggattgaccttaattgtaggtattgatgaggttggtcgtggtcctcttgctggtcctgtagtcgctgcggccgtcattttacctaaaaattgtaagattaaaggtctcaacgacagcaagaaaattcctaaaaagaaacatctggagattttccaagccgttcaagaccaagccttgtcgattggaattggtatcatagataatcaggtcatcgaccaagtcaacatctatgaagcaaccaaactagccatgcaagaagcaatctcccagctcagccctcaaccagagcaccttttgattgatgccatgaaactggacttgcccatttcacaaacctccattatcaaaggagatgccaactccctctctatcgcagcagcatctatagtagccaaggtaacacgtgatgaattgatgaaagaatacgatcagcagttccctggctatgatttcgctactaatgcaggatatggcacagctaaacatctggaaggcctcacaaaactaggagttaccccaattcaccgaaccagctttgaacccgttaaatcactggttttaggtaaaaaagaaagttaa

SEQ ID NO: 37797 - DNA, 1566 bp, Streptococcus pneumoniae
ttgaaaggaaataccatggaggaacagtcggaaatagtccgttctaagaaagaattcgcctttgcatccagcactatactatcccaagttggtcgaggaatcattgtcggcctcatcgttggaattatcgtcggatcctttcgtttcttaattgaaaagggcttccacctgatacaaggagtttatcaagatcaagggtacttagtgcgcaatctttttgtactggttttgttttatatactcatctgttggctcagtgccaaactaacacggtcagaaaaagatattaaaggctcaggaattcctcaagtcgaagccgaactgaaaggcctcatgtccctcaactggtggggcattctttggaaaaaatatgtgctaggtattcttgctattgccagtggactcatgctgggtcgagagggacccagtattcaacttggagcagttggtggtaaaggaattgccaagtggctcaaatccagtccagtagaggaacgttccttgattgccagtggagctgcagcaggtttagccgcagcctttaatgctcctattgcagcacttctctttgttgtagaagaagtctatcaccatttttcgcgctttttctgggtctcaactctagcagccagcatcgtagcaaactttgtgtctctactcatgttcggtttgacaccagtattggatatgccagataacattcctcccatgaccctagatcagtattggatatatctcgtcatgggaattttccttggattttcaggctttctctatgagaaagctgtattaaacgttggaagagtttatgacttgattggtcaaaaaatccatttggatagagcttattatcccatcttggcttttatccttatcataccagtcggaatcttcttacctcaaatcattggtggcggaaatcagcttgtcctttctttaactgaacaaaattttagtttccaagttttattagcttactttttgatccgctttatttggagtatgattagctatggaagtggactgccaggaggaattttcctccccattttagctcttggttctttgcttggtgccttagttggtgttatctgtgtcaatcttggacttgtcagtcaagagcaattccctatatttgtcattctaggaatgagtggctattttggagccatatcaaaagctcccttaaccgctatgatcctcgtaactgagatggtaggagatattcgcaaccttatgccacttggtcttgtcactcttgtttcttatattatcatggatttgctcaaaggtacgccagtctatgaagccatgctggaaaaaatgcttccagaagaagtatctagcgaaggagaagttacacttatcgaaataccagtttctgataaaattgctgggaaacaagttcatgaactcaacttaccacacaacgtcctcatcacaactcaagtccataatggcaagagccaaacagttaacggctcaaccagaatgtatctgggtgatatgattcacctggttattccaaaaagtgaaattggaaaagtcaaagatttgttgttgtag

SEQ ID NO: 37798 - DNA, 1071 bp, Streptococcus pneumoniae
atgaaacgtgagattttactggaacgaatcgacaaactaaaacaactcatgccctggtatgttctggaatactaccaatctaaactggctgtgccctacagttttacaaccctgtacgaataccttaaggaatatgaccgatttttcagctgggttttggagtctggtatttcaaacgctgataaaatatccgatattcctttatcagttttggaaaatatgtctaagaaagacatggaatcctttatcctttatctacgtgaacgtcccttgctgaatgctaatacaacaaaacaaggtgtttcacagacaactatcaatcgaaccttatcagcactttctagtctttacaagtatctaaccgaggaggttgaaaacgatcagggggaaccttatttctatcgtaatgtaatgaaaaaagtttcaaccaagaaaaagaaagaaacccttgctgccagagctgaaaatatcaagcaaaaactctttctaggtgatgaaacagaaggttttctaacttatatcgatcaagagcacccacaacagctttcaaatcgagctctctcatcattcaacaaaaataaagaacgagatttagccattattgcccttctcttggcatctggtgttcgcttatctgaagctgttaatctagatctaagagatctcaatctaaaaatgatggttattgatgttactcgaaaaggtggcaaacgtgactcagtcaatgtcgctgcttttgctaaaccttatttagagaattatctggccattcggaatcaacgctataaaacggaaaaaacagatacagccctttttttaactctctacagaggtgttcctaatcgtatcgatgcttctagcgttgagaaaatggttgctaaatactcagaggattttaaagtacgtgtaacaccccataaactgcgccatacactagcaactaggctctatgatgctactaaatcacaagttttagtcagtcaccaactaggacatgccagcacacaagtcactgacctctatacccatattgttaatgatgaacaaaagaatgctctggatagtttatga

SEQ ID NO: 37799 - DNA, 1704 bp, Streptococcus pneumoniae
atggccttagaagtaattatgccaaaagccggcgtggatatgacagaaggacaaatcgtccaatggaataaaaaagtcggagaatttgtaaaagaaggagaaatccttttggaaatcatgactgataaagtcagcatggaattggaagccgaagaagatgggtacttgattgccattctcaaaggagatggtgaaactgtccctgtaacggaagttatcggttaccttggtgaagaaagggaaaacatcccaacagctggagcagcatcgccagaagctagccctgtacctgtagcaagtacctcaaacgatgatggtaagagcgatgatgcttttgatatcgttgtgattggtggaggtcctgctggttatgttgcagccattaaagctgcccaattcggcggtaaggttgcccttgttgagaaatctgaacttggtggaacctgcttaaaccgtggatgtattccaaccaagacctaccttcataacgctgaaattattgaaaatatcggtcatgctgcaaatcgtggtatcgtgattgaaaatcctaacttcactgttgatatggaaaaacttttagaaactaaatctaaagttgttaatactcttgttggtggtgttgcaggacttcttcgtagctacggagttactgttcataaaggaattggtacaatcactaaagacaagaacgtcttggtaaatggttctgaattgcttgaaaccaagaaaatcattcttgctggtggttcaaaagtcagcaagatcaacgtccctggtatggaatctccacttgtcatgactagtgatgacattcttgaaatgaacgaagtgccagaaagccttgttatcatcggtggtggagttgtcggtatcgaactcggtcaggccttcatgacatttggttcaaaagtgactgttatcgaaatgatggaccgtatagttccagctatggatgtggaagtttctaagaaccttcgcttgatccttgagcgtaaaggaatgaccatcttgactggtactaaactgcaagaaatcattgaggaaaatggtcaacttcgtatcaaggttgaaggaaaagacgatatcatcgcaagcaaagctcttctttcaattggtcgtatgccagaccttgaaggtattggagaggttgagtttgaattggatcgtggttgtatcaaggtcaacgaatacatggaaacttcagttccaggcatttatgcaccaggtgacatcaacggtactaagatgttggctcacgcagctttccgcatgggtgaagtttccgctgaaaatgcccttaaaggaaatcatgcagttgccaaattgaatttgactcctgcagccatctacactctccctgaagtagcagcagtaggtttgacagaagaacaagcccgtgagaaatacgatgttgccatcggtaagtttaactttgctgctaacggtcgtgctattgcatctgacgcagctcaaggtttcgtaaaagttatcgctgataagaaatacggagaaatccttggtgtacacattattggtcctgcagccgcagaattaataaacgaagcatcaagcatcatcgaaatggaaatcactgttgaggaaatgctgaagaccatccacgggcacccaacttactctgaagtgatgtacgaagcgtttgcagatgttctaggaatggccatccattcacctaagaaaaaataa

SEQ ID NO: 37800 - DNA, 1128 bp, Streptococcus pneumoniae
ttggcttcatcgaagccatcgtcgatttcctatttttcagtcgcttttgacgccctttgtatcataaatagaattggagaggtcatggctgatgacaagctaagagcgactcctgcagctagaaagttagcggatgatttagggataaacctctacgacgtttctggctcaggtgcaaacggtcgtgtccacaaagaagacgtggaaacttataaagacacaaacgtggttcgcatttcgccacttgcaaaacgaattgccctcgaacataacattgcttggcaggaaatccaaggaaccggtcatcgtggtaaaatcatgaagaaggatgttttggccctgcttcctgaaaatatcgaaaacgatagcatcaaatctcctgctcagattgaaaaagtggaagaagtccctgataacgtaacaccatatggtaaaatcgagcgtattccaatgacaccaatgcgtaaggttattgcccaacgcatggttgaatcttacttgactgcgccaaccttcaccctcaactatgaagttgatatgactgaaatgttggctcttcgtaagaaggttcttgagccaatcatggaagcaactgggaagaagactactgtaacagaccttctttcgcttgcagttgttaagactcttatgaaacacccatacatcaacgcttcattgacagaagatggcaagactattatcactcacaactatgtcaatcttgccatggcagttgggatggataatggattgatgacacctgttgtttacaatgctgagaagatgagtctttcagaactggttgtagcctttaaggatgttattggccgtaccttggatggtaaattggctccaagtgagttacaaaattcaacattcacaatcagtaatttgggaatgtttggtgttcagtcctttggtccgattattaaccaacccaactcagctatccttggtgtcagttcgacaatcgagaagccagttgtcgtcaatggtgaaattgtgattcgcccaatcatgagtttaggattaaccattgaccaccgtgtcgtagatggtatggctggtgctaagtttatgaaggacttgaaagagttgattgaaacgccaatctcaatgttaatttaa

SEQ ID NO: 37801 - DNA, 993 bp, Streptococcus pneumoniae
atggaaacaaaaacaatgtccttccgtgacaccattatccttgctatgtctgaggaaatgcgtcgcgatgaaaatgtgttcttgatgggagaagatgtcggtgtcttcggaggagacttcggtacttctgttggaatgcttgaagaatttggtccagaacgtgtccgtgactgtccgatttctgaagctgccatctctggagcagcagcaggagcagccatgacaggacttcgtccaatcgtcgatatgaccttcatggacttctctgttattgccatggacaatatcgtcaaccaagctgctaaaacacgttacatgtttggtggtaaaggtcaggttccaatgactgttcgttgtgcagctggtaacggagttggctctgccgcccagcactcacaatctctagagtcttggtttactcacattccaggacttaaggttgtggcacctggaacacctgcggacatgaaaggcctgcttaagtcttctatccgtgataacaacccagttattatacttgagtacaagtcagaatttaaccaaaaaggggaagtgccagttgatccagactacacaattccacttggggttggtgaaatcaaacgccaaggaacggatgtaacagttgttacttatggaaaaatgcttcgccgtgtggttcaagctgctgaagaattagcagaagaaggaatttcagttgaaattgttgacccacgtacccttgttccgcttgataaggatatcatcataaactcagtgaagaagactggtaaggttattctggtcaacgatgcccacaaaacaagtggctatatcggtgaaatttcagctattatttcagaatcagaagcatttgactatctagatgcaccaatacgccgttgtgcaggagaagatgtgccgatgccttatgcacaaaacctagaaaatgcaatgattccaacagttgaaagtatcaaagatgcaatccgaaaaacttataacaaagactag

SEQ ID NO: 37802 - DNA, 969 bp, Streptococcus pneumoniae
atgtcaactttagataaaaatcttttgctagaaatgttccgtaagatggaagaaatccgtcgcatggacttaaaaattgcacaattagtaaagaaagggaaagtgccaggaatgacgcacttttctgttggtgaagaggcagctaacgtgggggctatgttagctctcaatccagatgatctgattacctcaaaccaccgtggacacgggcaagctattgctaaagggattgacctcaacggaatgatggctgaaatccttggtaaatacactggaacctgtaaagggaaaggtggatctatgcatatcgctgaccttgatgctgggaaccttggtgccaatggtatcgtaggtggtggtatggggatcgctgtcggtgcagccctcagtcagcaaatgcaaaataccggtaaaatcgttgtttgcttctttggagatggtgcgaccaatgaaggtgttttccacgaagcagtgaacatggcttctatctggaacctgccagtcattttctattgcattaacaacggttacggtatctctgcggatatcaagaaaatgaccaatatagaacatatccatcaacgtagcgccgcttatggaattcctggaatgttcatcgaagacggtaacaatgtcatcgatgtctatgaaggatttcagaaagctgtagaccatgttcgcagtggcaatggtccagtcttgattgaaagtgtaacttatcgctggcttggtcactcatcatctgaccctggtaaatatcgtacgcgtgaagaagtggaattgtggaaacaaaaagatccaatcgaaaacctccgcaattaccttattgaaaataacattgcaagtgccgaagaattggaaaaaatccaagcgcaagtaaaggaagcagtagaagcttctgttaaatttgcagaggaaagcccattcccaccgcttgaatcagcctttgaagatatttacacagactaa

SEQ ID NO: 37803 - DNA, 1269 bp, Streptococcus pneumoniae
atgctactaatcaaaaatggtcgtgtaatggatcccaagtctggtttggatcaagtttgtgatgtcttagttcaagatgggaaaattatcaaaattgcgcctgagatcacggaagaaggagcagaaacgattgatgctactggtcatgtggttgctcctggtttggtcgatattcatgtgcatttccgtgaacctggtcaaacacataaagaagacattcatactggtgccctggcagccgctgcaggtggttttactactgtcgtcatgatggctaataccagtccaaccatttcagacgtggagactttgcaagcagttctccagtcagctgccaaagagaagattaatgtcaagacagttgcgaccattactaaaaactttaatggtaaaaacttgactgactttaaggcactcttagaagctggtgcggttggtttctctgatgacggtattccgcttgagagcagtaagattgtcaaggaagccatggaggaagccaaaaaactcaatacctttatcagccttcatgaggaagatccaggtttgaacggtgttcttggctttaatgaaaatattgctagagaacatttccatatctgcggtgctactggggtggctgagtacgctatgatggcgcgtgatgtcatgattgcctatgcaactaaagcccatgttcacatccagcatttgtctaaggaagaaagtgttaaagtagtggagtttgctcaggggttaggtgcagaagtcacagcagaagtagcgccacagcatttctctaagacagaagcacttcttttaacacaaggtagcaatgctaagatgaatccaccgcttcgtttggaatcagaccgtcgtgccgttatcgaaggtctcaaatcaggtgtcatcacagttattgcgactgaccacgcgcctcatcatgtagatgaaaaaaatgttgaggatattaccaaagcgccatctggtatgactggcttagaaacatccctgtctctcggcttgacctatttagtagaagctggtgagttgagcttgatggaattacttgaaaaaatgacatacaacccagccaagctttacaactttgaagcaggttacttggctgagaatggtccagcagatatcactatttttgatgccaaggctgaccgccttgtggactcccattttgcttccaaagcagctaattcaccattcatcggtgaaaccttaaaagggcaggttaaatataccatctgtaagggacaaatcgtctatcaagcttga

SEQ ID NO: 37804 - DNA, 1734 bp, Streptococcus pneumoniae
atgacagaaatgcttaaaggaatcgcagcatctgacggtgttgcagttgcaaaagcatatctactcgttcagccggatttgtcatttgagactattacagtcgaagatacaaacgcagaagaagctcgccttgatgccgctctacaggcatcacaagacgagctttctgttattcgcgagaaagcagtaggtacgctcggtgaagaagcagctcaagtttttgatgctcacttaatggttcttgctgacccagaaatgatcagccaaatcaaggaaactatccgtgcgaagaaagtgaatgcagaagcaggtctgaaagaagttacagatatgtttatcactatctttgaaggcatggaagacaacccatacatgcaagaacgcgcagcggatatccgcgacgtgacaaaacgtgtattggcaaaccttcttggtaaaaaattgccaaacccagcttctatcaatgaagaagtgattgtgattgcgcatgacttgactccttcagatacagctcaattggacaaaaactttgtaaaagcttttgtaaccaacattggtggacgtacaagccactcagctatcatggcacgtacacttgaaattgctgctgtattaggtacaaacaacatcactgaaatcgttaaagacggtgacatccttgctgttaacgggatcactggagaagtgattatcaacccaacagatgaacaagcggcagaatttaaagcagctggtgaagcctatgcgaaacaaaaagctgaatgggcacttttgaaagatgctcaaacagtgactgctgacggtaaacacttcgagttggctgccaatattggtactccaaaagacgttgaaggtgttaacaacaacggtgcagaagctgttggactttaccgtacagagttcttgtacatggattctcaagacttcccaactgaagatgagcagtatgaagcatacaaggctgttcttgaaggaatgaacggtaaacctgttgtcgttcgtacaatggatatcggtggagataaggaacttccttacttcgatatgcctcacgaaatgaacccattccttggattccgtgctcttcgtatctctatctctgagactggagatgctatgttccgcacacaaatccgtgctcttcttcgtgcgtctgttcacggtcaattgcgtatcatgttcccaatggttgcgctcttgaaagaattccgtgcagcgaaagcagtctttgatgaagaaaaagcaaaccttcttgctgaaggtgttgcagttgcggataacattcaagttggtatcatgatcgagattcctgcagcggctatgcttgcagaccaatttgctaaagaagttgacttcttctcaattggtacaaacgacttgatccaatatacaatggcagcagaccgtatgaacgaacaagtttcatacctttaccaaccatacaacccatcaatcctacgcttgattaacaatgtgatcaaagcagctcacgctgaaggtaaatgggctggtatgtgtggtgagatggctggtgaccaacaagctgttccacttcttgtcggaatgggcttggatgagttctctatgtcagcaacatctgtacttcgtacacgcagcttgatgaagaaactcgacacagctaagatggaagagtacgcaaaccgtgcccttacagaatgctcaacaatggaagaagttcttgaacttcaaaaagaatacgttaattttgattaa

SEQ ID NO: 37805 - DNA, 264 bp, Streptococcus pneumoniae
atggcttctaaagatttccacgtagtggcagaaacaggtattcacgcacgtccagcaacattgttggtacaaactgctagcaaatttgcttcagatatcactcttgagtacaaaggtaaatcagttaaccttaaatcaattatgggtgttatgagtcttggtgttggccaaggtgctgacgtaactatctcagctgaaggtgcagatgcagatgacgctatcgctgcaatctcagaaacaatggaaaaagaaggattggcataa

SEQ ID NO: 37806 - DNA, 2160 bp, Streptococcus pneumoniae
atgggattaaaacatcttgaagacgtgacttacttccgtcttaataacgaaattaaccgtcctgttaatggacaaatcatgcttcataaagacaaggaagccttggatgctttctttaaagaaaatgtagttccaaacactatggtttttgattcaatcaaagacaaaatcaattacctcattgaacacaactacatcgaaacagcctttatcaagaaataccgtccagagttcttggaagaattagctcaatttatcaaagaccaaaacttccaattcaagtcattcatggcagcttataaattttacaatcaatatgccttaaagactaatgacggtgaatactatcttgaaaatatggaagaccgtgtcttcttcaacgccctttatttcgctgatgggaatgaagctgttgcaatcgatattgccaatgaaatcatccaccaacgctaccaacctgctactccttccttcttgaatgctggacgtgctcgccgtggagagttggtatcttgtttcctaatccaagtgacggatgatatgaactctatcggacgttctatcaactcagctcttcaactttcacgtattggtggtggtgtgggaattaccctcagcaaccttcgtgaagctggtgcacctatcaaaggctatgaaggagctgcttcaggtgtcgttcctgttatgaagctttttgaagacagcttctcttactccaaccaattggggcaacgtcaaggtgccggtgttgtctacctcaacgtctttcacccagatatcatcgctttcctttcaactaagaaagaaaacgctgatgaaaaagtacgtgtcaagactctatcacttggtgttgtagtacctgataaattctacgaattggctcgtaaaaatgaagaaatgtacctcttcagcccttactctgtagaaaaagaatacggtgtgccattcaattacatcgacattactgaaaaatacgatgaattggtcgcaaatccaaatattcgcaagacaaaaatcaaggcgcgggatttggaaactgaaatctctaaattgcaacaagagtctggctatccttatgtagtcaacatcgatacggctaaccgtgcaaatcctgttgatggaaagattatcatgagtaacttgtgttctgagattcttcaagttcaagaaccaagcttgatcaacgatgctcaagaattccttcaaatgggaacagatgtttcatgtaacctgggttcaaccaacgtggttaacatgatgacttcacctgattttggtcgttctatccgtgctatggttcgtgcccttactttcgttacagatagttcacatatcgtagctgtaccaacgattgaccatggaaatagccaagcccacacctttggtctcggtgccatgggactgcacagctaccttgcccaacaactcattgaatatggttcacctgagtctgttgaatttacaagcatctactttatgcttatgaactactggaccttggtagagtcaaacaatattgcgcgtgaacgtggtattaccttccacaactttgaaaaatcagactatgctaacggaagttactttgacaagtatgtaactggtgaatttgttccaacatcagaccgtgttaaagaactcttcaaaaatgtctttatccctggtgttgctgattgggctgaacttcgcgacaaggttcaagaagatggtctttaccaccaaaatcgccttgctgtagcgccaaatggttctatcagctatatcaacgacgtttctgcttctatccacccgattacgcaacgtatcgaagaacgccaagagaagaaaattggtaaaatctactaccctgctgctggcttgtctacagaaaccattccttactacacttctgcctacgatatggatatgcgtaaagtcatcgatgtttacgctgctgcgactgaacacgtggatcaaggactttcactcaccctcttcatgcgtagtgacattccaaaaggcctttacgaatggaagagggaaaataaacaaacgacacgtgacttgtccatccttcgtaactatgcctttaacaagggaatcaagtctatctactacgtccgtacctttacagatgacggtggagaagtcggcgccaaccaatgtgaaagctgtgtgatttag

SEQ ID NO: 37807 - DNA, 963 bp, Streptococcus pneumoniae
atggaaacttactacaaagccattaactggaatgccatcgaagatgtcatcgacaaatcaacttgggaaaaactgacggagcaattttggctcgatacacgtattcccttatcaaacgacttggatgactggagaaagctatctaacaaagagaaagacttggtcggaaaagtttttggtggtttaacccttcttgacactatgcaatctgaaactggggttcaagcccttcgcgcagacatccgtacaccacatgaggaagctgttttcaataacatccaatttatggaatctgtccacgctaaatcttactcatcaatcttttctaccttgaatactaaggctgagattgaagaaattttcgaatggaccaataccaatccttacctacaaaagaaggctgagattgtcaacgaaatctacctaaacggcagcccacttgaaaagaaagttgccagcgtcttcctcgaaaccttcctcttctactctggtttcttcactcccctctactatctcggtaacaacaaactagccaacgttgcagaaatcattaaattgattattcgtgacgagtctgttcacggaacctacattggttacaaattccaacttggtttcaatgaattgcctgaagaagagcaagaaaaactcaaagaatggatgtacgacctactctatactctttatgaaaatgaagaaggctacacagagagtctttatgacggtgttggttggactgaagaggttaaaaccttccttcgctacaatgccaataaagctctcatgaacatgggacaagatccacttttcccagattcagctgaagatgtcaacccaatcgttatgaacggtatttcaacaggaacttccaaccatgacttcttctctcaagtcggaaatggttaccttcttggcgaagttgaagccatgcaagacgatgactataactacggtttagactaa

SEQ ID NO: 37808 - DNA, 1407 bp, Streptococcus pneumoniae
atgacaaaaacacttccaaaagactttatttttggtggcgcaacagctgcttatcaagcagaaggtgctacacatactgatggaaaaggaccagttgcttgggataaatatcttgaggataactactggtacactgccgaaccagctagtgatttttacaatcgatatccagttgacctcaagctagcagaagagtatggtgtcaatggtattcgaatttctattgcttggtcacgtattttcccgactggttacggccaagtaaatgctaaaggtgttgagttttatcataatttatttgcagagtgtcacaaacgtcatgttgagccttttgtaactcttcatcactttgacacgccagaagctctccactcaaatggagacttcttaaaccgtgaaaatatcgaacattttgtagactacgctgccttctgttttgaagaatttccagaagtaaactattggacaacctttaatgaaattggaccaatcggtgatggtcaatatttagttggtaaattccctccaggaattcagtacgaccttgccaaagtcttccaatcgcaccacaatatgatggtgtctcatgcacgtgctgtaaagctatataaagataaaggatataaaggggaaattggtgttgttcacgccctgcctactaaatatcctctagatcatgaaaatccagcagatgttcgtgcagctgagttggaagatatcatccacaataaattcatcttagacgcaacttatctaggtcgctattcagctgaaaccatggaaggtgtcaaccatatcttatcagtcaatggtggtagtttggatcttcgtgaagaagattttacagcattagaagctgcaaaagacttgaatgatttcctaggaatcaactactatatgagtgactggatggaagcctttgatggagaaactgaaattatccataatggtaaaggtaaaaaaggaagctctaagtatcaaatcaaaggtgttggtcgtcgtgtagctcctgactatgtaccacgcacggattgggattggattatctaccctcaaggtttgtatgaccaaatcatgcgtgtgaagaaagattatcctaactacaagaagatttacatcactgaaaatggtctcggctataaagatgagttcgtcgataacactgtttacgatgatggtcgtattgattacgtgaaacaacacttggagatcttgtctgatgcgattgcagatggagctaatgtaaaaggttacttcatttggtcattaatggatgtcttctcatggtcaaacggttatgagaaacgttatggtctcttctacgtagattttgaaactcaagaacgttatcctaagaaatcagctcactggtacaagaaagtagcggaaactcagattatagactag

SEQ ID NO: 37809 - DNA, 1692 bp, Streptococcus pneumoniae
atgaacaaactaattgcatttatcgagaaaggaaagcctttctttgataaactatctcgtaatatctatcttcgtgctattcgtgatggtttcattgcaggtatgcctgttattctcttctcaagtatctttatcttgattgcctttgtaccaaactcatggggctttaaatggtctgatgaagttgtagcctttctgatgaaaccttatagctattctatgggtattctggctctcttggtagctggtacaacagctaagtcattgaccgactcagtaaaccgtagcatggagaaaaccaatcaaatcaactatatgtcaacgctgttagcagcgattgttggtttgttgatgttggcagctgatcctatcgaaaatggtctagctactggattcttggggacaaaaggtttgctttcagccttccttgctgcctttgttactgtagccatctataaggtctgtgttaagaacaacgtcactattcgtatgcctgacgaagttccaccaaatatctcacaagtctttaaagatgtgattccattcactctatcagtggtttctctttatgctcttgatttactagctcgtcattttgttggttctagtgtggcagaatcaatcggtaaattcttcgcaccactcttctcagcagcagacggataccttggtattaccattatctttggtgcctttgccttcttctggtttgtgggtattcatggtccatctattgttgaacctgctatcgcagcgattacctatgcaaatgctgaagtcaacttgaaccttctccaacaaggtatgcatgctgataaaatccttacttcaggaactcaaatgtttatcgttactatgggaggtactggtgcgacactggttgttccattcatgttcatgtggttaacaaaatcaaaacgtaaccgtgcaatcggacgtgcttcagtagttccaactttctttggtgtaaatgaaccaatcttgtttggtgcaccacttgtattaaatccaatcttcttcattccatttatctttgctccaatcgcaaacgtatggattttcaaattctttattgaaactcttggaatgaactcattcactgctaatctaccatggacaactccagctccactaggtctagttcttggaactaacttccaagtgctatcattcattcttgctgcccttctaatcgtggttgacgttgtcatttactatccattccttaaggtctatgatgaacaaattcttgaagaagaacgttcaggtaagtctaatgatgaattgaaagaaaaagttgctgcaaacttcaacactgcaaaagcggatgctattcttgaaaaagcgggtgtcgatgcagcacaaaataccatcactgaagaaacaaatgtcctcgttctctgtgcaggtggaggaacaagtggtctccttgcaaatgctttgaataaggcagcagcagaatacaatgtccctgtgaaagcagcagcaggcggctatggtgctcaccgtgaaatgttaccagagtttgatcttgttatccttgcccctcaagttgcttcaaactttgaagatatgaaagcagaaacagataagctcggtattaaactagcgaaaacagaaggcgctcaatacatcaaattaactcgtgatggaaaaggtgctcttgcattcgtacaagcgcaattcgattaa

SEQ ID NO: 37810 - DNA, 318 bp, Streptococcus pneumoniae
atgaatagagaagaagtaacattgttaggttttgaaatcgtagcctatgctggcgatgctcgttcaaaactattggaagccttgaaggctgctgaagctggtgattttgaaaaagcggacgctctggtagaggaagctggtagctgtattgcagaggctcaccacgcgcaaacaagtctattgactaaggaagcttctggtgaggacttagcgtatagtgtgaccatgatgcatggccaagaccacttgatgacaactatcttgttaaaggatttgatgcaccatttgatcgaactctataagagaggagttaaataa

SEQ ID NO: 37811 - DNA, 981 bp, Streptococcus pneumoniae
atggctttaacagaacaaaaacgtgtacgcttagaaaaactttctgatgaaaatggtatcatctcagctcttgcatttgaccaacgtggtgctttgaaacgcctcatggctcaacaccaaacagaagaaccaactgtggcccaaatggaagaacttaaagtcttggtagcagatgaattgactaaatacgcttcatctatgcttcttgaccctgagtatggacttccagcaactaaagctcttgatgaaaaagctggtcttctccttgcttatgaaaaaacaggttatgacacaacaagcacaaaacgcttgccagactgcttggatgtttggtctgcaaaacgtattaaagaagaaggtgcagatgcagttaaattcttgctttactatgatgtagatagctcagacgaactcaatcaagaaaaacaagcctacatcgaacgcatcggttctgagtgtgtggctgaagatatcccattcttccttgaaatccttgcttacgatgaaaaaattgcggatgcaggttctgtagaatacgcgaaagtaaaaccacacaaagttatcggcgctatgaaagtcttttcagacccacgctttaacattgatgtcttgaaagttgaagttcctgttaacattaaatatgttgaaggcttcgctgaaggtgaagtagtttatacacgtgaagaagcagcagccttcttcaaagcgcaagatgaagcaacgaactttccatacatctacttgagtgctggtgtatcagctaaactcttccaagatactcttgtatttgctcatgaatcaggtgcaaactttaacggagttctttgtggccgtgctacatgggcagggtcagttgaagcttacatcaaagatggtgaagcagcagctcgcgaatggcttcgcacaactggatttgaaaacattgatgagctcaataaagttcttcaaacaacagcgacttcatggaaagaacgtgtgtaa

SEQ ID NO: 37812 - DNA, 516 bp, Streptococcus pneumoniae
atgagaattgcaattggatgcgaccacatcgtaacagatgaaaaaatggcggtttcagaatttttgaaatcaaaaggatatgaagtcattgactttggtacatatgaccatacacggactcactacccaatctttggtaaaaaagtaggggaagctgtaactagcggccaagctgatcttggggtatgtatctgtggtactggtgttggtatcaacaacgctgtaaataaagttccaggtgttcgttctgccttggttcgtgatatgacaacagccctttatgctaaagaacaattgaacgctaacgttatcggctttggtggtaagattactggtgaattgcttatgtgtgatatcatcgaagctttcattcatgctgaatacaaaccatctgaagaaaacaagaaattgattgcgaaaattgaacaccttgaaagtcacaatgctcaacaaacagacgcaaacttctttacagaattccttgaaaaatgggatcgcggagaataccacgactaa

SEQ ID NO: 37813 - DNA, 426 bp, Streptococcus pneumoniae
atgtctattgttatcggtgcagatgctgcaggtttgagattgaaagaagttgtgaaagacttcttagaaaaagaaaacttccaccttgtggatgttacagctgaaggtcaagactttgttgatgtgactctcgctgttgctgcagaagtaaacaaagaagaacaaaaccttggtatcgtgattgatgcttatggagctggtccatttatggttgcaactaagatcaaaggaatggttgctgcagaagtatctgacgaacgttcagcttatatgactcgtggccacaacaactcacgtatgatcactatgggtgcacaacttgttggtgatgaattggctaaaaacatcgctaaaggatttgttaacggtaaatacgatggtggacgtcatcaaatccgggtcgacatgttgaacaaaatgggctaa

SEQ ID NO: 37814 - DNA, 876 bp, Streptococcus pneumoniae
atgaaaaagcaagaaaaattagctcttgtcgagtcggctttggaagatttttatggagaccagcagtttgcctctagtttacgggagtctgttctctattctattcatgctggtggcaagcgtattcggccttttctcttgttagaagttctggaagccttgcaggttgccatcaaacctgctcacgcgcaggtagctactgccttggagatgattcatacagggagcttgattcacgatgaccttcctgctatggatgatgacgattatcgaagagggcggttaaccaatcacaagaaattcggtgaagctatggccattttggctggagatgccttattcttagacccatatgccttgattgcgcaggcagatttgccaagtcagatcaaggtggacttgattgccaacttatcccttgcttcaggtagtctgggtatggtggcagggcaagttttggatatggagggcgaacaccagcacttgtctctggaagaacttcagactattcatgccaataagactgggaagttactagcctatcccttccaagcggcagctattatagctgaattgtcacctgaaatgcaggtgaagctgaaaactgtgggtgaattgattggacttgcttttcaagtcagagatgatgtactggatgtgacagctagttttgaggaaatcggtaagacacctcaaaaggatctgcaggcagaaaaatcaacctatcctgccttgttgggcttggaagagtccattgccttttgtaaccaaaccctggatcaagctaatgaaaaattggaagaaattgcccagcaggttccctttgaaacagaatcgattgtaagtgtagtagaaagtttgagaatcaatggctaa

SEQ ID NO: 37815 - DNA, 1347 bp, Streptococcus pneumoniae
gtggagatggaaaagtatttatcggtaacaactttgaccaagtatctgaaaatgaaattcgataaagacccatacttggaacgggtctatttaactggtcaagtttccaactttcgtaaacgacctactcaccaatatttctccctaaaggatgaccatgcagttattcaagcgaccatctggtctgggatttatcagaaattagggtttgacctggaagaaggaatgaagatcaatgtgattgggcgtgtacaggtctatgaaccaagtggtagctactccatcatcattgaaaaagttgagcctgatggggttggggcgcttgcgattcagtttgaacaacttaagaaaaaattgacagaagaaggcctgtttcaagaacgcttcaagcaagctctgccccaattttctaagagaattggggtagtaaccagccgtagtggagccgttattcgagatattatcacgaccgtcagcaggcgattcccaggtgttgacatccttctttatccgaccaaggttcaaggtgaaggggctgcggaggaaattgctagaaatattgcgcgtgctaatcaacgggacgatttggatttgctcattattggtcgtggaggtggttctattgaggatctctgggcctttaacgaagaaattgtggtacgagctatttttgaatctcgtttgccagttatctctagtgtggggcatgagacggatgtgaccttggcagattttgtggcagatcgacgcgctgcaacgccaacagcggcggctgaactggcaacacctgtgaccaagttggatgtattagctcatttgcaaaatcaggaaaaacggatggtaacggcagtccgaaatgttctatctaagaaacaagaggctttgaaaaaatgcagtcagtctgttatctttagacaacctgagcgcttgtatgacggttatttgcaacgcttggaccaactgcaactgcgtttgaaacaaagtttgcgaactcggatttctgataacaaacaattagttcaagcaagaactcatcaattagtacaattatcacctgttaccaaaatccaacgctatcaagaccgtttaggacagttggacaagctcttaggtagccaaatggcgttagtttatgacgccaaggttgctgaggccaagcgactttcggaagctttgctcatgttggatactagccgaatcgtggcgcgtggttatgctattgtcaaaaaagaagagtccgttgtagattcggttgagagtttgaagaaaaaagaccaagtaacgcttttgatgcgagatggtcaagtagaattagaggttaaagatgtcaaaacaaaagaaatttga

SEQ ID NO: 37816 - DNA, 879 bp, Streptococcus pneumoniae
atgaacggtattatcaacttaaaaaaagaagcaggaatgacctcgcatgatgcggtttttaaactgcgtaagattttgggaaccaagaaaattggtcatggtgggaccttggatccggatgtggtgggtgttttgccgattgcggttggcaaggcgacacgcatggtcgagtttatgcaggacgagggtaagatctatgagggggaaatcattctgggctattccacgacgactgaggatgctagtggggaagtggtcgcagaaacccctgttttgtcttcattggatgaaaagcttgttgatgaagcgattgctagcttgactgggcctattactcagattccccctatgtattcggcagttaaggttaatggtcgcaagctctatgagtatgcgcgtgctggtcaggaagtggagcgtccagaacgtcaggtgatcatttatcaatttgagcgaacaagtccgatttcttatgatggccaacttgcccgattcacttttcgtgtaaaatgcagtaaagggacttacatccgtactttgtcagttgatttgggtgaaaagcttggttatgcggctcatatgtcccatttgactcgtactagtgctgctggcttacaattagaagacgctcttgccttggaggaaattgctgaaaaagtagaggctgggcaattagattttctccatcctttagagattgggacaggtgaccttgtcaaagttttcctaactccagaagaggctacagaagttcgatttggtcgttttattgagctagaccaaacggacaaagaactggctgcctttgaagatgataaattgttagccattctagaaaaacggggcaatctctataagccaaggaaggtttttagctag

SEQ ID NO: 37817 - DNA, 2469 bp, Streptococcus pneumoniae
atgcaggataaaaatttagtgaatgtcaatctgacaaaggagatgaaggcaagttttatcgactacgccatgagtgttatcgtagcgcgagctcttcctgatgttcgagatggcttaaaacctgttcaccgtcgcattctctacggaatgaatgaattgggtgtgaccccagacaaaccccataaaaaatctgctcgtattacaggggatgtcatgggtaaataccacccacacggggattcctctatttatgaagccatggtccgtatggctcaatggtggagctaccgttacatgcttgtagatggtcatgggaattttggttccatggatggagatagtgctgccgctcaacgttataccgaggcacgtatgagcaagattgctctggaaatgcttcgtgatatcaacaaaaatacagttgatttcgttgataactatgatgccaatgaacgggaacccttggtcttgccagcgcgttttccaaaccttttggttaatggagcaactggtatcgcggttgggatggcaaccaatattccacctcataatctgggtgaaaccattgatgcagtgaagttggtcatggataatcctgaagtgactaccaaggacttgatggaagtcttgcctggaccagattttccaactggtgctcttgtcatggggaaatcaggtatccataaggcttatgaaacaggtaaaggttcgattgtcctacgttctcgtacagagattgaaacgactaagactggtcgtgagcgtatcgttgtaacagaatttccttacatggtcaataaaaccaaggtgcatgagcatattgttcgcttggttcaggaaaaacgcattgagggtatcacagcagtacgtgatgagtcaaaccgtgaaggtgttcgatttgttattgaagtcaagcgcgacgcctcagccaatgttattctcaataacctcttcaaaatgacccaaatgcaaaccaattttggtttcaatatgctcgctatccaaaatggtataccgaaaattttgtctcttcgtcagattttggatgcttatattgagcaccaaaaagaagtggttgttcgtcgtacacgttttgataaggaaaaagcggaagcgcgcgctcatatcttagaaggtctcttgattgcgctagaccatatcgacgaagtgattcgtatcatccgtgctagtgaaacggatgcggaagctcaagctgagttgatgagcaagtttaagctttctgaacgtcaaagtcaagctatccttgatatgcgtcttcgtcgtttgacaggtttggaacgcgataagattcaatctgagtatgatgacctcttggctctgattgcggatttagcagatattcttgctaagcctgaacgtgtttctcaaattatcaaagacgaattggatgaagttaaacgtaaattttctgataaacgccgtacagagttgatggttggacaggtcttgagtctcgaggatgaggacttgattgaagaatcggatgtcttgattaccctttctaacagaggctacattaagcgtttggatcaggacgagttcactgctcaaaaacgtgggggtcgtggtgtccaaggaacgggagtgaaagatgatgactttgttcgtgagttagtgtcaactagtacccatgatcatctgctcttcttcacaaacaagggacgtgtctatcgtcttaaaggttatgaaattcctgagtatggtcggactgccaaagggctaccagtagtcaatctcttgaaattggatgaagacgaaagtattcagacggttatcaatgttgagtctgatcgcagtgatgatgcttatctcttctttacaacccgtcacggtattgtgaagagaaccagtgttaaggagtttgccaatattcgtcaaaatggtctcaaagcgctgaatttaaaggatgaagatgagttaatcaatgtcttgttggcagaaggagatatggatattatcattggtaccaagtttggttatgcagttcgctttaatcaatcagccgttcgtggtatgagccgtatcgccactggtgtgaaaggtgttaaccttcgtgaaggagacacagttgttggtgccagcttgattactgatcaagatgaggttcttattatcacagaaaaaggatatggtaagcgtacagtcgctactgaatacccaacaaaaggtcgtggtggtaagggaatgcagacagctaaaattaccgaaaaaaatggcttgctggccggtcttatgactgttcaaggggatgaggatttgatgattatcactgatacaggtgtcatgattcgaaccaatcttgccaatatttcacaaacaggacgtgcaactatgggagttaaagtaatgcgcctggatcaagatgctcagatagtgactttcacaacggttgcggtggcagaaaaagaagaagttgggacagaaaacgaaacagaaggtgaagcataa

SEQ ID NO: 37818 - DNA, 1350 bp, Streptococcus pneumoniae
atgcttgatttactgaaacaaaccatttttaccagagattttatctttatcctgattttgttaggtttcatccttgttgtgaccctcttattactggaaaatagacgtgataatattcagttgaagcaaatcaatcaaaaggttaaagatttgattgcaggagattattccaaggttcttgatatgcaaggtgggtctgaaatcaccaatattaccaataatttgaatgacttgtcggaggttattcgtctcactcaggaaaatctagaacaagagagtaagaggctaaatagtattctgttttatatgacagatggggttcttgcgactaaccgtcggggtcagattatcatgattaacgatacagccaagaagcaactggggttggttaaggaagatgttctgaatagaagcattttggaattgctcaagatagaagaaaactatgaattgcgtgatttgattacccaaagtccagaattgttgctagattcccaagatatcaatggcgaatatttgaaccttcgagttcgctttgccttgatacgtcgagagtctggctttatttcaggtttggtggctgttttgcatgatacgacggagcaggagaaggaagaacgcgaacgaagactctttgtttccaatgttagccatgagttacggactcctctgactagcgtaaaatcctatcttgaagccttggatgagggggctttgtgtgaaactgtagcaccagactttatcaaggtttctcttgatgagaccaaccgtatgatgcgcatggtgacggatctcctccatctttcacgtattgataatgctaccagtcacctagatgtggaactgattaacttcactgcttttattacctttatcctcaatcgttttgacaagatgaaaggacaggaaaaggagaaaaaatatgagctggtgagagattatcccatcaattctatctggatggaaattgatacagataagatgacgcaggttgtcgacaatattttaaataatgctattaagtattcgccagatgggggtaaaatcactgtcagaatgaagacaactgaagaccagatgattttatccatttctgaccacggtttggggattcctaagcaggatttaccacgtatctttgaccgtttctatcgtgtggatcgtgctagaagtcgtgcacaaggtggtacaggtctaggactgtctatcgctaaagaaattatcaaacaacataagggctttatttgggccaagagtgaatacggcaagggttcaacctttaccattgtactcccttatgataaggatgcagtgaaagaagaagtatgggaggatgaagtagaagactag

SEQ ID NO: 37819 - DNA, 756 bp, Streptococcus pneumoniae
ttgtgtcttctgactattttttggtataatagtagagaaaaaggtgaacatatgaaaaaaatactaattgtagatgatgagaaaccaatctcggatattatcaagtttaatatgaccaaggaaggttatgaagttgtaactgcttttaatggtcgtgaagcgctagagcaatttgaagcagagcaaccagatattattattctggatttgatgcttccagaaattgatggtttagaagttgctaagaccattcgtaagacaagcagtgtgcccattcttatgctttcagccaaagatagtgaatttgataaggttatcggtttggaacttggggcagatgactatgtaacgaaacccttctccaatcgtgagttgcaggcgcgtgttaaagctcttctgcgtcgttctcaacctatgccagtagatggtcaggaagcagatagtaaacctcaacctatccaaattggggatttagaaattgttccagacgcctacgtggctaaaaaatatggcgaagaactagacttaacccatcgtgaatttgagcttttgtatcatttagcatcgcatacaggtcaagtcatcacgcgcgaacacttgcttgagactgtctggggttatgactattttggtgatgtccgcacagttgatgtgactgtacgacgtctgcgtgagaagattgaagatacgcccagccgaccagagtatatcttgacgcgccgtggtgtagggtattacatgagaaataatgcttga

SEQ ID NO: 37820 - DNA, 1488 bp, Streptococcus pneumoniae
atgtcatctaaggttattgttacaattttcggtgcgagtggagacctggctaaacgcaagctctacccttccctttttagactatataaatccggcaatctttccaagcactttgccgttattggaactgcccgtagaccttggagtaaggaatattttgaatctgtagttgtcgagtccatccttgatttggcagatagtaccgagcaagcccaagaatttgctagccacttctactatcaaagccatgatgtcaatgattcggaacattatattgctttgcgtcaattacaagctgagcttaatgaaaaataccaagctgaacacaataagctcttcttcttgtctatggcacctcagttctttggaaccattgccaaacacctcaaatctgaaaacattgtcgatggcaaaggttttgagcgcttgatcgttgaaaaaccatttggtacagattacgcaactgcaaacaagttgaatgacgaactcctagcaacatttgacgaagaacaaattttccgtatcgaccattatcttggtaaggaaatgatccaaagcatctttgcagttcgctttgcaaacttgatttttgaaaacgtttggaacaaggattttatcgacaatgttcaaattacctttgcggagcgcttgggtgtagaagaacgtggtggctactatgaccaatccggtgccctccgtgacatggtccaaaaccacactctacaacttctttcgctcctcgccatggacaaaccagcaagcttcacaaaagacgagattcgtgctgaaaagattaaggtctttaaaaacctctatcatccaactgatgaagaactcaaagaacactttatccgtgggcaataccgctctggtaagattgatggcatgaaatacatctcttatcgtagcgagccaaatgtgaatccagaatcaacaactgaaacctttacatctggtgccttctttgtagacagcgatcgattccgtggtgttcctttctttttccgtacaggtaaacgactgactgaaaaaggaactcatgtcaacatcgtctttaaacaaatggattctatctttggagaaccacttgctccaaatattttgaccatctatattcaaccaacagaaggcttctctcttagcctaaatgggaagcaagtaggagaagaatttaacttggctcctaactcacttgattaccgtacagatgcgactgcaactggtgcttctccagaaccatacgaaaaattgatttatgatgtcctaaataacaactcaactaactttagccactgggatgaagtttgtgcgtcatggaagttgattgaccgtattgaaaagctctgggctgaaaatggtgccccacttcatgactataaagctggaagcatgggacctcaagccagctttgacctacttgaaaaattcggtgccaaatggacttggcaaccagatatcacctatcgtcaagatggtcgcttagaataa

SEQ ID NO: 37821 - DNA, 1278 bp, Streptococcus pneumoniae
atgggattgtttgaccgtctattcggaaaaaaagaagaacctaaaatcgaagaagttgtaaaagaagctctggaaaatcttgatttgtctgaagatgttgatcctaccttcacagaagttgaggaagtttctcaggaagaagcagaggttgaaattgttgaacaagctgtgttccaagaagaggaaatccaagacacagttgaagaaagtctggatttagagccagttgtagaagtttctcaaaaagaagtcgaagaatttccacactcagaagaagggaatactgagtttctagagactatagaagaaaataattctgaagttcttgaaccagaaaggcctcaagcagaagaaaccgttcaggaaaaatatgaccgcagtcttaagaaaactcgtacaggtttcggtgcccgcttgaatgccttctttgctaacttccgctctgttgacgaagaatttttcgaggaactggaagaactgctgattatgagtgatgttggtgtccaagtcgcttctaacttaacggaggaactacgttacgaagccaagcttgaaaatgccaagaaacctgatgcacttcgtcgtgtcatcattgagaaattggttgagctttatgaaaaggatggtagctacgatgaaagcatccacttccaagataacttgacagttatgctctttgttggtgtgaatggtgttgggaaaacaacttctatcggaaaactagcccaccgctacaaacaagctggtaagaaggtcatgctggttgcagcagataccttccgtgcgggtgcagtagctcagctagctgaatggggccgacgagtagatgttccagtagtaactggacctgaaaaagctgatccagccagcgtggtctttgatggtatggaacgtgccgtggctgaaggtatcgatattctcatgattgatactgctggtcgtctgcaaaataaggataaccttatggctgagttggaaaagattggtcgtattatcaaacgtgttgtgccagaagcaccacatgaaaccttcttggcacttgatgcatcaacaggtcaaaatgccctagtacaggccaaagaattttcgaaaatcacacctttaacgggaattgttttgactaagattgatggaactgctcgaggaggtgtggttctagccattcgtgaagaactcaatattcctgtaaaattgattggttttggtgaaaaaatcgatgatattggagagtttaactcagaaaactttatgaaaggtctcttggaaggtttaatctaa

SEQ ID NO: 37822 - DNA, 819 bp, Streptococcus pneumoniae
atggcagatataaaattgattgcattggacttggacgggaccttgctgactactgataaaaggctgacggatcgtaccaaggaaaccttgaaagctgcgcgtgatcgtggtatcaaggtcgtattgacaactggtcgtcccttaaaagccatggatttctttctccatgagttagggactgacggtcaggaagatgagtataccattacttttaatggtggattagttcagaaaaatacaggagaaatccttgataaaacagtcttttcatatgatgatgtggcacgtttgtatgaagaaacagagaaattatcactgcctcttgatgccatctcagaaggaacagtttatcaaatccaatcggaccaagaaagtctttatgccaaattcaatccagctttgacctttgttccagtggactttgaagacttatctagtcaaatgacctacaacaaatgcgtgactgcctttgctcaagaacccttggatgcagccattcagaagatttctccagaattgtttgaccaatatgaaatctttaaatcacgtgaaatgttgctagaatggtcaccaaagaatgttcataaagcaacaggtttggcaaaactaatcagccatcttggaatcgaccaaagtcaagtgatggcttgtggtgacgaggccaatgacctctctatgattgaatgggcaggtcttggtgttgctatgcaaaacgctgttcctgaagtaaaggcagccgcaaatgtagtgacgccgatgaccaacgatgaggaagctgtcgcctgggctatcgaagaatatgtgctaaaggagaactaa

SEQ ID NO: 37823 - DNA, 3540 bp, Streptococcus pneumoniae
atgtatttaaaggaaatcgaaattcaggggttcaagtcttttgctgataagaccaaggtcgtttttgaccaaggtgtgacggcagttgttggacccaatggatctggaaagtccaatattacagaaagtctgcgttgggctttgggggagtctagtgtcaagagtctccgtgggggcaagatgccggatgtcatctttgctggaacagaaagtcgcaaaccgctcaattatgcttctgtagttgtgactctggataatcatgacggatttatcaaggatgcaggtcaagaaatcagggtggaacgccatatctatcgtagtggagatagcgaatacaagattgacggcaagaaagtccgtctgcgtgatattcatgacctcttcttggatactggattgggacgagattccttctctattatttcccaagggaaggttgaggagatttttaattccaagcctgaggaacgacgagctatttttgaagaagctgctggagttttaaaatacaagactcgcagaaaagaaaccgagagtaaactgcagcaaactcaggataatctggaccgcttagaggacattatctacgagttggataatcaaatcaagcctcttgagaagcaagctgagaatgcccgtaagtttttagacttggaaggacaacgtaaggttatttatttagacgttctggttgctcaaatcaaggaaaataaggcagaactagagtcgacagaagaagagttggctcaggttcaagaactcttgatgagttattaccaaaagcgtgaaaaattagaagaagaaaatcaaactcttaaaaagcaacgccaagatttacaggctgaaatggccaaagaccaaggcagtttgatggacttgactagtctgattagtgatttagaaagaaaattagccctatcgaaactggagtccgagcaagtggccctgaatcaacaggaggcacaagctcgtttggctgctttggaggataagagaaattcactcagcaaagaaaagtatgataaagaaagctctttagctctgttagagggaaatctagtccaaaataatcaaaaactcaatcgtttagaagctgaattgctggctttctcagacgatcctgatcagatgattgagctcttacgtgaacgctttgtagctcttttacaagaagaagcggatgtctcaaaccagttgacccgtattgagaatgagttggaaaatagtcgtcagctttctcaaaaacaagcagatcaactagaaaagctgaaagagcaattagctacagctaaagagaaggctagtcagcaaaaagacgagcttgaaactgccaaggtgcaggttcagaaattattggctgactatcaagctattgccaaggagcaagaggagcagaaaacttcctatcaagctcaacaaagtcaactctttgaccgtctggatagtctcaaaaacaagcaggccagagctcaaagtttggaaaatatcctgagaaatcatagtaacttttatgcaggtgttaagagtgttctccaagaaaaagatcgcctaggtgggattattggtgcagtcagtgagcatctgacctttgatgtttattatcaaactgccctagagattgccttaggggcaagtagccagcatatcatcgtagaagatgaagagtcggcaaccaaagctattgatttcctcaaacgaaacagagtcggtcgtgcaacctttcttcctttgaccactattaaggcgcgtacgatttctagtcagaaccaagatgctatcgctgtaagcccaggtttccttgggatggcagatgagttggtgacttttgatactagactggaagccattttcaagaacttgctagctacgacggctatctttgataccgtagaacatgcgcgtgaagctgctcgacaagttcgttatcaggttcgtatggtgacattggatgggacagaattacgcacgggtggttcctatgcgggtggtgccaatcgccaaaataacagtattttcatcaagccagaactggagcaattacaaaaagaaattgctgcagatgaagcaagcttgggttcagaagaagcggctttgaagaccttgcaagaccagatggctgcattgacagaaagattagaagccatcaaatctcaaggagagcaggcacgtattcaggagcaaggcttgtccctcgcttatcagcaaactagtcagcaagttgaagaactggaaactctttggaaactccaagaagaggaaatagatcgtctttctgagggagattggcaagcggataaggaaaaatgtcaagagagccttgctactatcgccagtgaaaagcaaaatctggaagctgagattgaagaaattaagtctaataaaaacgccatccaagaacgctatcaaaatttgcaggaagaggtggcgcaagctcgcttgcttaagacagaactgcaagggcaaaaacgttatgaagtagctgatattgagcgtttaggcaaggaattggacaatcttaatatcgaacaagaagaaattcagcgcatgctccaagaaaaagttgacaatcttgagaaggttgatacagaattgctcagtcaacaggcggaagaatccaaaactcagaaaacaaatctccaacaaggtttgattcgcaagcagtttgagttggatgatatagaaggtcaactggatgatattgccagtcacttggatcaagctcgccagcagaatgaggagtggattcgcaagcaaacacgtgctgaagccaagaaagaaaaggtcagcgagcgcttgcgccatctacaaaatcaattaacagaccagtaccagattagctatactgaagcactagaaaaggcacatgaattggaaaacctcaatctggcagagcaagaggtgcaggatttagagaaggctattcgctcattgggacctgtcaacttggaagctattgaccagtacgaagaagttcacaaccgtctggactttctaaatagtcagcgagatgatattttgtcagcgaaaaatctgctccttgaaaccattacagagatgaatgatgaggtcaaggaacgctttaaatcaacctttgaagctattcgtgagtcctttaaagtgaccttcaagcagatgtttggcggaggtcaggcagacttgatattgactgagggcgaccttttaacagctggtgtggagatttctgttcaacctccaggtaagaaaatccagtcgcttaacctcatgagtggtggtgaaaaagctctatcggctcttgccttgcttttctccattattcgtgtcaagaccattccttttgtcatcttggatgaggtggaagctgcgctggatgaagccaatgttaaacgttttggggattacctcaaccgctttgacaaggacagccagtttatcgttgtaacccaccgtaagggaaccatggcagcggctgattccatctatggagtgaccatgcaagaatcgggtgtttcaaagattgtttcagttaagttaaaagatttagaaagtattgaaggatga

SEQ ID NO: 37824 - DNA, 987 bp, Streptococcus pneumoniae
atgttaaatgaatttccaatttttgattacgaagatattcaattgattccaaataaatgtgtcattaaaagccgtgcagaagcggatacaagtgtcactttaggaaatcacacctttaaactacctgttgtgccagcgaatatgcagacgattttggatgaaaatgtagcagagcaactggctaaaggtggttacttctacattatgcaccgttttgatgaggcaggacgcattccttttattaaacgaatgcacgatcaagggctcattgcttccatatctgtcggtgttaaggattatgagtatgattttgttagccagctcaaggctgatgctcctgagtatatcactattgatattgctcatggtcatgcggatagcgtgatttctatgattcaacacatcaagaaagaattgccagatacctttgtcattgctggaaatgtgggaacaccagaagctgtgcgtgaattggaaaatgctggtgcagatgctactaaggtcggaatcggtcctggtaaggtttgtatcaccaaggttaagactggttttggtacaggtggttggcagttggctgctctacgctggtgtgccaaggctgcgcgtaaaccgattatcgctgatggaggaattcgtactcacggtgatattgccaagtctatccgcttcggtgctagcatgatcatgattggttccctctttgcaggacacattgaaagtccagggaaaacgattgaagtcgatggtgaacagttcaaagaatattatggttcagcctcacaatatcagaaaggtgcttacaaaaatgtggaaggcaaacgtatcttgcttcctgctaaaggtcatctgcaagacactttaactgagatggaacaagaccttcaaagtgctatttcttatgcaggtggacgtcaggttgctgaccttaaacacgttgattatgtgatcgtgaaaaactccatctggaatggggatgcttcccactaa

SEQ ID NO: 37825 - DNA, 2106 bp, Streptococcus pneumoniae
ttgaaaaggtgtgatactgtggctacggcaacaaaaaagaaaaaatcaacagttaaaaaaaatctagtcatcgtggagtcgcctgctaaggccaagacgattgaaaaatatctaggcagaaactacaaggttttagccagtgtcgggcatatccgtgatttgaagaaatccagtatgtccgtcgatattgaaaataattatgaaccgcaatatattaatatccgaggaaaaggccctcttatcaatgacttgaaaaaagaagctaaaaaagctaataaagtttttctcgcgagtgacccggaccgtgaaggagaagcgatttcttggcatttggcccatattctcaacttggatgaaaatgatgccaaccgtgtggtcttcaatgaaatcaccaaggatgcagtcaaaaatgcttttaaagaacctcgtaagatcgatatggacttggtcgatgcccaacaagctcgtcggatcttggatcgcttggtagggtattcgatttcgcctattttgtggaagaaggtcaagaagggcttgtcagcaggtcgcgttcagtccattgcccttaaactcatcattgaccgtgaaaatgaaatcaatgccttccagccagaagaatactggacagttgatgctgtctttaaaaagggaaccaaacaatttcatgcttccttctatggagtagatggtaaaaagatgaaactgaccagcaataacgaagtcaaggaagtcttgtctcgtctgacgagtaaagacttttcagtagatcaggtggataagaaagagcgtaagcgcaatgctcctttaccctataccacttcatctatgcagatggatgctgccaataaaatcaatttccgtactcgaaaaaccatgatggttgcccaacagctctatgaaggaattaatatcggttctggtgttcaaggtttgattacctatatgcgtaccgattcgactcgtatcagtcctgtagcgcaaaatgaggcggcaagcttcattacggatcgttttggtagcaagtattctaagcacggtagcaaggtcaaaaacgcatcaggtgctcaggatgcccatgaggctattcgtccgtcaagtgtctttaatacaccagaaagcatcgctaagtatctggacaaggatcagctcaagctatatacccttatctggaatcgttttgtggctagccagatgacagcggccgtttttgataccatggctgttaaattgtctcaaaaaggggttcaatttgctgccaatggtagtcaggttaagtttgatggttatcttgccatttataatgattctgacaagaataagatgttaccggacatggttgttggagatgtggtcaaacaggtcaatagcaaaccagagcaacatttcacccaaccgcctgcccgttattctgaagcaacactgattaaaaccttagaggaaaatggggttggacgtccatcaacctacgcgccaaccattgaaaccattcagaaacgttattatgttcgcctggcagccaaacgttttgaaccgacagagttgggagaaattgtcaataagctcatcgttgaatatttcccagatatcgtaaacgtgaccttcacagctgaaatggaaggtaaactggatgatgtcgaagttggaaaagagcagtggcgacgggtcattgatgccttttacaaaccattctctaaagaagttgccaaggctgaagaagaaatggaaaaaatccagattaaggatgaaccagctggatttgactgtgaagtgtgtggtagtccaatggtcattaaacttggtcgttttggtaaattctacgcttgtagcaatttcccagattgccatcatacccaagcaatcgtgaaagagattggtgttgagtgtccaagctgtcatcagggacaaattattgagcgaaaaaccaagcgtaatcgcctattctatggttgcaatcgctatccagaatgtgaatttacctcttgggacaagcctgttggtcgtgactgtccaaaatgtggcaacttcctcatggagaaaaaagtccgtggtggtggcaagcaggttgtttgtagcaaaggcgactacgaggaagaaaagattaaataa

SEQ ID NO: 37826 - DNA, 891 bp, Streptococcus pneumoniae
atggaggttcagatgaaaagtaaaaacggagttccttttggccttctctcaggtattttctggggcttgggtctaacggttagtgcttatatcttttcgatttttacagatttgtcaccctttgtggtggctgcaactcatgattttttgagcatctttatcttactagcttttctcttggtaaaagaagggaaagttcgcctctcaattttcttaaatattcgcaatgtcagtgttatcatcggagcattgctagcaggccctatcggtatgcaggccaatctttatgcagttaagtatatcggaagttctttagcttcatctgtatcggctatttaccctgcgatttcagttctattggctttcttctttttgaagcacaagatttcgaaaaatactgtatttgggattgtcttgattattggaggtattattgcccagacctataaagttgaacaggttaattccttctacattgggattctctgtgctttggtttgtgctattgcatggggaagtgagagtgttcttagctcctttgctatggaaagtgaactgagtgaaatcgaagccctcttaatccgtcaagtgacttcgttcttgtcctatcttgtgattgtgctcttctctcatcagtcatttactgcagtagccaatggacaattgctaggtctcatgattgtttttgcagcctttgatatgatttcctacttggcttattatatcgctatcaatcgcttgcaaccagccaaggctacaggcttgaacgtgagctatgtagtatggacggtcttgtttgcagttgttttcttgggtgcaccgctagatatgctgacaattatgacgtcacttgtcgtcattgctggagtttatattattattaaagaataa

SEQ ID NO: 37827 - DNA, 1041 bp, Streptococcus pneumoniae
ttgagaaagactagtaaaatgattaatcaaatttatcaactaactaagcctaagtttatcaatgtcaaatatcaggaagaggctattgaccaagagaatcatatccttatccgtcccaactacatggctgtctgtcatgcggatcagcgttactatcagggaaaacgtgatcccaagattttgaataaaaagcttccaatggcaatgattcacgagtcatgtggaaccgtcatttctgacccgaccggaacctacgaggttggtcaaaaagttgtcatgattcccaatcagtctcctatgcagagtgatgaagaattctatgaaaactacatgacagggacccatttcttgtctagtggatttgatggctttatgagagagtttgtttctctccctaaagatcgtgtggtggcttatgatgctattgaagatacggttgcagccattacagagtttgtcagtgtgggcatgcacgctatgaatcgtctattgactcttgctcatagcaagcgggagcggatcgccgttattggagatggaagtttagcttttgtggttgccaatattatcaactatactttgccagaagcagagattgtggttattggtcgtcattgggaaaagttggaactcttctcatttgccaaagaatgctatattacggataatattcctgaagatttggcctttgaccatgcttttgaatgttgtggtggtgatggtactggaccagctattaatgacttgattcgctacattcgtcctcagggaacgattctcatgatgggagttagcgaatataaagtcaatctcaatactcgcgatgccttagaaaagggcttgattttggttgggtcatctcgttctggtcgcattgattttgaaaatgctatccaaatgatggaagtcaagaaatttgccaatcgtcttaaaaatatcctttatctagaagaacctgtaagagaaattaaagatattcatcgtgtctttgcaaccgatttaaacacagcctttaaaacagtgtttaagtgggaagtataa

SEQ ID NO: 37828 - DNA, 708 bp, Streptococcus pneumoniae
atgatttatgcaggaattcttgccggtggaactggcacacgcatggggatcagtaacttgccaaaacaatttttagagctaggtgatcgacctattttgattcatacaattgaaaaatttgtcttggagccaagtattgaaaaaattgtagttggtgttcatggagactgggtttctcatgcagaagatcttgtagataaatatcttcctctttataaggaacgtatcatcattacaaagggtggtgctgaccgcaatacaagtattaagaacatcattgaagccattgatgcttatcgtccgcttactccagaggatatcgttgttacccacgattctgttcgtccatttattacacttcgcatgattcaggacaatatccaacttgcccaaaatcatgacgcagtggacacagtggtagaagcggttgatactatcgttgaaagtaccaatggtcaatttattacagatattccaaatcgtgctcacctttatcaaggacaaacacctcaaacattccgttgcaaggacttcatggacctttatggatctctttctgatgaagagaaggaaatcttgacagatgcatgtaaaatctttgtgatcaaaggaaaagatgtggctttggccaaaggtgaatactcaaatctgaagattacaaccgtaacagatttgaagattgcaaaaagtatgattgagaaagactag

SEQ ID NO: 37829 - DNA, 1488 bp, Streptococcus pneumoniae
atgaaaagtataaaattaaatgctctatcttacatgggaattcgtgtcttgaatattatttttcccatcctaactggaacctatgtcgcgcgtgtcttggaccgaactgactatggttacttcaactcagtcgacactattttgtcatttttcttgccctttgcaacttatggtgtctataactacggtttaagggctatcagtaatgtcaaggataacaaaaaagatcttaacagaaccttttctagtcttttttatttgtgcatcgcttgtacgattttgaccactgctgtctatatcctagcctatcctctcttctttactgataatccaatcgtcaaaaaggtctaccttgttatggggattcaactcattgcccagattttttcaatcgaatgggtcaatgaagctctggaaaattacagttttctcttttacaaaactgccttcatccgtatcctgatgctggtctctattttcttatttgttaaaaatgaacacgatattgttgtctatacacttgtgatgagtttatcgacgctgattaactacctgattagttatttttggattaaaagagacatcaaacttgttaaaattcacctaagtgattttaaaccactctttctccctctgacagccatgttagtctttgccaatgccaatatgctcttcacttttttagatcgcctcttcctcgttaaaacagggattgatgtcaacgttagttactataccatagctcagcgaattgtgaccgttatagctggggttgtaacaggtgcaattggagtgagtgtgcctcgtctcagttactatctggggaaaggagacaaagaagcctatgtttctctggttaatagaggtagtcgaatctttaacttctttatcattccactgagttttggactcatggttttaggaccaaatgccatcctactttacggtagtgaaaaatatatcggaggcggcatcttgacctctctcttcgcttttcgtacgattatcctggccttagataccattcttggttcccaaattctctttaccaatggctatgaaaaacgtatcacagtctatacagtctttgctgggctactcaatttgggcttgaatagtctcctttttttcaaccatatcgtggctcctgaatactacttactgacaactatgctatcagagacttctctacttgttttctatatcattttcatccatagaaaacaactcatccacttgggacatatctttagctatactgttcgatactctctcttttcactttcctttgtagcaatttatttcctgattaatttcgtgtatcctgtagatatggtcattaatttgccatttttgattaatactggtttgattgtcttgctatcagctatctcttatattagtctacttgtcttcacaaaagatagcattttctatgaatttttaaaccatgtcctagccttaaaaaataaatttaaaaaatcatag

SEQ ID NO: 37830 - DNA, 3177 bp, Streptococcus pneumoniae
atgcctaaacgtactgatattcaaaaaattatggtgattggttctggtccgattattattggtcaggctgctgagtttgactacgctgggactcaggcttgcttttcgttgaaagaggaaggttatgaggttgttttggttaactcaaatcctgcaaccatcatgacggacaaggaaattgctgacaaggtttacattgaaccgattacacttgagtttgtgacacgtattcttcgtaaggaaggtccagatgccttgctaccaacactcggtggtcagacaggtctcaacatggccatggaattatctaaaaatggtatcctagacgagcttggcgttgaacttctgggtaccaaattatctgccattgaccaagcggaggaccgtgacctctttaaacaattgatggaagagcttgaacaacccattccagaatctgaaattgttaacacagtagaagaagcagttgcctttgcagcgacaattggctacccagtcatcgttcgtccagcctttacccttggtggtactggtggtggtatgtgtgccaacgagaaagaattgcgtgaaatcactgaaaatggtttgaaattgtcacctgttacccaatgtttgattgagcgttcgattgccggtttcaaggaaattgaatacgaagtgatgcgtgactcagctgacaatgccttggttgtttgtaacatggaaaactttgacccagttgggattcacacaggggattccattgtatttgcccctgcgcaaaccatgtcagactatgaaaaccaaatgcttcgtgatgcgagcttgagcattattcgtgccctcaagattgaaggtggatgtaatgttcagctagctcttgatcctaacagcttcaagtattatgttatcgaagtaaaccctcgtgtatcacgttcgtcagcccttgcttctaaagcgacaggatatccgattgctaagttggctgccaagattgcagtaggtttgaccttggatgaggttataaacccagttacaggttcaacctatgccatgtttgaaccagcccttgactacgtagttgctaagattccacgtttcccatttgacaagtttgaaaagggtgaacgccgtctcggtacacaaatgaaggcgactggagaagtcatggcaatcggtcgtaacatcgaggaatctcttctcaaggcctgccgctcccttgaaattggggtgcaccacaatgaaatacctgaacttgcagcagtttctgatgatgccttgattgaaaaggttgtcaaagcccaagatgaccgtctcttctacgtatcagaagccattcgtcgtggctacacacctgaagaaattgcagagcttacaaaaattgatatcttctatcttgataaactcttgcatatctttgaaattgagcaagaattgggtgctcatccacaagatttagaagttttgaaaacagccaaacttaatggtttttcagaccgtaagattgctgaactctggggaacgactgatgataaagttcgccaacttcgcttggaaaacaagattgttccagtttataagatggtagacacttgtgcggcagagttcgactccgaaacgccatatttctattcaacctatggttgggaaaatgaatctatcagatctgataaagaatctgtacttgtcctaggttcaggtccaatccgtatcggtcaaggggttgagtttgactacgcaaccgttcactctgttaaggctatccaggcagctggttatgaagctatcatcatgaactcaaacccagagaccgtttcaacagacttctctgtatcagataagctttactttgagccattgacattcgaagatgttatgaacgtcattgacttggaacaaccaaagggagttatcgttcagttcggtggtcaaacagccatcaaccttgcggagccattggcaaaagcaggtgtgaccatccttggtacacaggttgctgacctagatcgtgccgaagaccgtgacctcttcgagcaagctctcaaagaattggatattccacagccaccaggacaaacggctaccaatgaagaagaagcagctcttgcagctcgcaagattggcttcccagttcttgtccgcccatcttatgtacttggtggacgtgccatggaaatcgttgaaaacgaagaagaccttcgttcttacatgcgaactgctgttaaggctagtccagaccacccagttcttgtcgactcttatatcgttgggcaagagtgcgaagttgatgccatttcagatggtaaaaatgtactcattcctggtatcatggagcatatcgaacgtgctggtgtccactcaggtgactcaatggctgtttacccaccacaaaccttgtcgcaaaaggttcaggagaccatcgcagactacaccaaacgcttagcaatcggtcttcactgccttggaatgatgaacatccagtttgttatcaaggatgaaaaagtctacgttattgaggtcaatccacgtgccagccgtactgttccattcctatctaaggtaaccaatattcctatggctcaagtagcgaccaaactcattcttggtcaaagtttatcagaacttggctaccaaaatggactttaccctgaaagcacccgtgttcatatcaaggcacctgtcttctcctttaccaaactagctaaggtagacagcttgctcggtcctgaaatgaagtcaacaggtgaagttatgggttctgatgctactttggaaaaagctctctataaagcctttgaagcttcttatctacacttgccaacttttggtaatgtcgtctttaccatcgctgatgatgccaaagaagaagccttgaacttggctcgtcgtttccaaaacattggttatggaatccttgcgacagaagggacagcagccttctttgctagtcatggcttgcaagcccaacctgttggtaagattggtgatgacgataaggatatcccaagttttgtacgcaaaggaagaattcaagctatcattaacacagtaggaacaaaacgaactgctgacgaagatggtgagcaaattcgtcgttcagccattgaacacggggtgcccctcttcacagcgctagatacagctaatgccatgcttaaggtacttgaaagtcgtagctttgttacagaagcgatttaa

SEQ ID NO: 37831 - DNA, 1080 bp, Streptococcus pneumoniae
atgacaaaaagaattctagtattagaagatggcacagtttttgaaggcaaggccttcggagcagatattgatgtaacaggcgaaatcgtctttaatacagggatgaccggctaccaagaatccattacagaccagtcttataatggacaaatcttgacctttacttatcctttggtaggaaattatggtattaatcgtgatgattatgaatccattattccaacttgtaagggagtcgttgtttttgaagaagcgcgtagagctagcaactggcgcaaccaaatgaccttggatgaatttttgaaagccaagaaaattccagggatttcaggaattgatacgcgtgctcttaccaagattatccgtaagcatggtactatgcgtgcaaccttgacccatgttggggacagtatggaccatgtgacggaccagctccaagcaacagttttaccgacagacaatatcaaacaggtttctactaaaacgtcttatccagctccaggagttggtttgagcgtggtgctagtggactttggtctcaagcactcaatcctacgtgaactttctaaacgcaactgtaacgtgacagttgttccttattcgacaacggctgaagaaattctccatctcaatcctgacggagttatgttgtcaaatggtccaggtaacccagaagacgttccacaagcactcgacatgattcgcggtgtacaaggaaaaattccaatctttggtatttgtatgggacaccaactctttgcaatggcaaacggggctaagacctataagatgaagtttggccaccgtggattcaaccatgcggtacgtgaaatcgcaacaggacgagtagacttcaccagccagaaccatggttatgcagtcagccgcgaggatttgccagagcacttgattattacccacgaagaaatcaatgacaagtcagtggaaggtgtgcgccacagataccaacctgctttctctgttcaataccacccagatgcagctcctgggccacacgacgctagctacctatttgacgagtttatcgagatgatggaagtttttaaacaatcaaactaa

SEQ ID NO: 37832 - DNA, 738 bp, Streptococcus pneumoniae
atgatactaaagaaggaaataactatgaaaccagaaacattttacaacttgcttgccgagcagaatcttccactttcgaaccagcaaaaagaacaatttgaacgttattttgagctcttggtcgagtggaatgagaagattaatttgacggcgattacggacaaggaagaagtttatctcaaacatttttacgattcgattgcacccattcttcaaggtttgattcccaatgaaactatcaaacttcttgatatcggggctggggcaggatttcctagtctaccaatgaaaattctctatccggagttagatgtgaccattattgattcactcaataagcgcatcaacttcctacaactcttggctcaagaactggatttgaacggagttcatttctaccacggacgtgccgaagattttgcccaagacaagaacttccgtgctcaatatgattttgtaacagctcgtgcggttgcccgtatgcaggtcctatctgaattgactattccctaccttaaggttggtggaaaactattggcactcaaggccagcaatgcgcctgaggagttgttagaagctaagaatgccctcaatctcctttttagtaaagtcgaagacaatctcagctacgccctaccaaatagagatccgcgttacatcacagtggtagaaaagaaaaaagaaacaccaaataaatatccacgtaaggctggtatgccaaataaacgcccgctttaa

SEQ ID NO: 37833 - DNA, 1572 bp, Streptococcus pneumoniae
atggcatttgaaagtttaacagaacgtttgcagaacgtctttaaaaatctacgtaaaaaaggaaaaatctctgaatctgatgtccaagaggcaaccaaagaaattcgcttggccttgctcgaggccgacgttgccttgcctgttgtaaaggactttatcaagaaagttcgtgagcgtgcagtcgggcatgaggtcattgatacacttaatcctgcgcaacagattattaaaatcgttgatgaggaactgacagccgttttaggttctgatacggcagaaattatcaagtcacctaagattccaaccatcatcatgatggttggtttacaaggggctggtaaaacaacctttgctggtaaattggccaacaaactcaagaaagaagaaaatgctcgtcctttgatggttgcggcggatatttatcgtccagctgccattgaccagcttaagaccttgggacaacagattgatgtgcctgtctttgcacttggaacagaagtaccagctgttgagattgtacgtcaaggtttggagcaagcccaaactaatcataacgactatgtcttgattgatactgcgggtcgtttgcagattgatgagctcctcatgaatgagcttcgtgatgtgaaagcattggctcaaccaaatgaaatcttgcttgtcgttgatgctatgattggtcaggaagcagccaatgttgcgcgtgagtttaatgctcagttggaagtgactggggtcatccttaccaagattgatggcgatactcgtggtggtgctgctctgtctgttcgtcacattactggaaaaccaatcaagttcactggtacaggtgaaaagattacggacattgaaaccttccacccagaccgcatgtctagccgtatccttggtatgggggatatgctcactttgattgagaaagcttctcaggaatacgatgaacaaaaagcccttgaaatggctgagaagatgcgcgaaaacacctttgattttaatgatttcatcgatcaattagatcaggtgcaaaatatggggccgatggaagacttgctcaagatgattccaggtatggccaacaatccagcccttcaaaacatgaaggtggatgaacgccagattgctcgtaaacgtgccattgtgtcttcgatgacacctgaagagcgtgaaaacccagatttgttaaatccaagccgtcgccgtcgtattgctgctggttctggaaatacattcgtcgaagtcaataaattcatcaaggactttaaccaggctaaacagctcatgcagggtgttatgtctggggatatgaataaaatgatgaagcaaatggggattaatccaaataaccttcctaaaaatatgccaaatatgggaggaatggatatgtctgcccttgaaggaatgatgggacaaggcggtatgcctgacttatcagctctcggaggagcaggaatgccagatatgagccagatgtttggtggcggtttgaaaggtaaaattggtgaatttgccatgaaacagtccatgaaacgtatggctaacaaaatgaagaaagcgaagaagaaacgcaagtaa

SEQ ID NO: 37834 - DNA, 333 bp, Streptococcus pneumoniae
atggaaatcgaaaaaaccaatcgtatgaatgcgctctttgaattttatgcggcgcttttgacagataagcaaatgaattatatcgagctctactacgctgatgattacagccttgctgaaattgccgaggagttcggtgtcagtcgtcaggctgtctatgacaatatcaagcgaacagaaaagattctggaagattatgagatgaaattgcacatgtactcggactatattgtccgcagtcagatttttgatcagattttggagcgctatcccaaggataactttctgcaggagcagatagaaattttaacaagcattgataatagagaataa

SEQ ID NO: 37835 - DNA, 807 bp, Streptococcus pneumoniae
atgagtattaaactaatcgccgtcgatattgacggaaccctagtcaacagccaaaaggaaatcactcctgaagtcttttctgccatccaagatgccaaagaagctggtgtcaaagtcgtgattgcaactggccgccccatcgcaggtgttgccaaacttctggacgacttgcagttgagagaccaaggtgactatgtggtgaccttcaatggtgcccttgtccaagaaactgctactggccatgagattatcagcgaatccttgacctatgaggattatctggatatggaattcctcagtcgcaagctcggtgtccacatgcatgccattaccaaggacggtatctatactgcaaatcgcaatatcggaaaatacactgtacacgaatcaaccctcgtcagcatgcctatcttctaccgtacccctgaagaaatggctggcaaggaaattgtcaagtgtatgttcatcgatgaaccagaaattctcgatgctgcgattgaaaaaataccagccgaattttacgagcactactctatcaacaaatctgctcctttctacctcgaactccttaaaaagaatgtagacaagggttcagctattactcacttggctgaaaaactcggattgaccaaagatgaaaccatggcaatcggtgacgaagaaaatgaccgtgccatgctggaagtcgttggaaaccccgttgtcatggaaaatggaaatccagaaatcaaaaaaatcgccaaatacatcactaaaacaaatgacgaatccggcgttgcccacgccatccgaacatgggtactgtaa

SEQ ID NO: 37836 - DNA, 348 bp, Streptococcus pneumoniae
atgaatccattaatccaaagcttgactgaaggtcaacttcgtacagatatcccatcattccgtcctggtgatactgttcgtgtacacgcgaaagttgtcgaaggtaaccgtgaacgtatccagatttttgaaggtgttgttatcgcacgtaaaggtgctggaatctcagaaaactacacagttcgtaaaatctctaacggtataggtgttgagcgtatcttcccaatccacactccacgtgttgaaaaaatcgaagttgttcgttacggtaaagtacgtcgtgcgaaattgtactacttgcgtgctcttcaaggtaaagcagctcgtatcaaagaaatccgtcgttaa

SEQ ID NO: 37837 - DNA, 243 bp, Streptococcus pneumoniae
atgaaaaaagatatccatccagaatatcgcccagttgtcttcatggacacaactactggttaccaattccttagcggttcaacaaaacgctctaacgaaacagttgagttcgaaggcgaaacttacccattgatccgtgtggaaatttcatcagactcacacccattctacactggacgtcaaaagttcactcaagcagatggacgcgtggatcgtttcaacaaaaaatacggtctcaaataa

SEQ ID NO: 37838 - DNA, 579 bp, Streptococcus pneumoniae
ttggtcagaaattattggaaggctaaaagctggttactagttttagctttgtcatttttaattctttccccagcaggtgcccaagaaagcttgagttttttctttgtgaaaatcacagatgcatccaaaacggttaaaaatggtggtcagactgagacccagaaactcgttacgaagatggcatcagacttcgaaagagtagaaaataaggattctgaggttggtaagattgttaaggaaaagttagctctatctggagatattactgaagccaaactcaccgaaatttcctcagctctattagcttttgaaaaagaacaaaatcctgttgacctagatgcggaaaaggaaaaattggtaaaccgtctaagtcctcgttttgaaaccttagaacaggccattgcctccaaagatttggaaaaagtccgagaagcttttaagaaaatgaattccacttggaccatcaatgaaagtgtggttcgtgacaatagtacagctcattatggacgtgttgaaacagctatttccttcctgcctagtagcatggaaaccgaacctacagatgagtctggaacatga

SEQ ID NO: 37839 - DNA, 1005 bp, Streptococcus pneumoniae
atgcaaaagaatatctattttgttgtcttggacctgcatacgacggatagagataaaattatccagctattcaaggattggacggattatagtgccaagttggtcgagggggaattggttaaaaaagatggacagaatgctctctttcctccgagcgatactggtgagacagttgggctcaatcctcatcgtttgacgctgacttttggtgtatctgcaagtttcttgaaaaggatgaacttggaaaacaagcgccctcgactgttcagggatttacctctatttcctaaggagcaattacgtgaaaaatatactggtggagatattgtgattcatgcttgtgcagatgatgagcaaattgcctttcacgctattcgcaatctcatccgtaaggggagaaatgcggtgccccttcgttggagtcagtctggatttgcagctatcggggatcgaatggagactccgtggaacctctttggttttaaggatggaacagcaaatccaaccaaggagcaagactttgaccgcgttatctgggctgatagtaaggactggatggaaaatggttcttatatggcagttcgtcggattcagatgtttttagagacctgggaccgcactagtctcgaagaacaagaaaatacctttggtcgttacaaggaaagcggtgccccctttggtaagaaaaatgagtttgatgaagtggatttgagtctcttacctgatgattcgcatgtttgtttggccaaagaagtggataagccacttttacgtcgttcttattcttactcagatggcattgatgaaaagactggtcagtttgatacgggattgctcttcatttctttccagaaggatcctgataactttgttaaggttcaaactaacctaggtgctactgataagatgaatgaatacatcactcacataggtagtggactttttacttgctttggtggtgtggagaaaggaggctacattggtcagaaattattggaaggctaa

SEQ ID NO: 37840 - DNA, 1347 bp, Streptococcus pneumoniae
atgacatctgctaaagaatatatccaaagcgtgtttgaaactgtaaaagctcgtaacgggcacgaggctgaattcctccaagctgttgaagaatttttcaacactttggaacctgtatttgaaaaacaccctgagtatatcgaagaaaatatcttggcacgtattactgagcctgagcgcgtgatttctttccgtgttccttgggttgaccgtgatggaaaagttcaagtaaaccgcggctaccgtgttcaattcaactcagctgttggaccatataaaggcggacttcgtttccacccaactgtaaaccaagggattttgaaattcctcggatttgaacaaatctttaaaaacgtcttgactggacttcctatcggtggaggtaaaggtggatcagacttcgatcctaaaggtaaaacagatgctgaagtgatgcgcttctgccaaagcttcatgactgaattgcaaaaacacattggaccatcacttgacgtacctgctggtgatatcggtgttggtggacgtgagattggttacctttacggtcaatacaagcgtcttaaccaatttgatgctggtgtcttgactggtaaacctcttggatttggtggtagcttgattcgtccagaagcaactggttacggtttggtttactatactgaagaaatgctcaaagctaacggtaacagctttgctggtaagaaagtggttatttcaggttctggtaacgttgctcaatacgctcttcaaaaagcaaccgaacttggtgcaacagttatctctgtttctgactcaaacggctatgttatcgatgaaaacggtatcgacttcgatcttttggttgatgttaaagaaaaacgtcgcgctcgtttgactgagtatgcagctgagaaagcaactgctacttatcatgaaggttctgtatggacttacgctggaaactatgacattgcgcttccatgtgctactcaaaacgaaatcaacggtgaagcagctaaacgtttggttgctcaaggcgttatctgtgtatctgaaggtgccaacatgccaagcaaccttgatgccatcaaagtttacaaagaaaatggtatcttctacggacctgccaaagctgccaacgctggtggtgtagccgtttcagcccttgaaatgagccaaaacagccttcgcctctcatggactcgtgaagaagttgatggacgtctcaaagacatcatgaccaacatctttaacacagctaaaacaacttcagaaacatatggtcttgataaagactaccttgcaggagctaacattgctgcctttgaaaatgtagcaaacgctatgattgcacaaggtattgtttaa

SEQ ID NO: 37841 - DNA, 1320 bp, Streptococcus pneumoniae
atgctcagattagtttactatcaatttttacataataagaaacaatggttaggcgtttcaccagtaatttttgtttcgagtttagttatgggattggctgttaatggggtaattaatgttgagaataattcgcaagtatttgtcggacttccagatcctaaaccaatttttatgtttccgatagtattcggaggagtaacattattctttgtgctctctaacataataaatatgttggttgaaatttttagagatgattacgaacttttggaggtgttgggagcaagtcgccttcaactatcatttcttgtggggggacagatttttatcatttcctcgattattagttttattgcatatctatgctctatatttgttacgtcaaattattattattttttacaatactttttcggggaaaatatattacctgatatccaatttcaaacgagtgctgttggatgtatcattacagtagtgttgatttcatttttagcctttctaagtggttgcttttatacgttcaagaagattagaaataggaagagttctaaaataaggcatgttctttcaatagtaaaaagaatactgctattggctggttttagtgttatctggttgctttctttgcaacaaattttccaagatagcacaattttagcgaaggcccagataatattcaatattgtaatcttagatattgtgattatttatcaattatctccttttatacagtcatgttttatcaaactactttctataattatatttagaaataattttatgttcattgtttcgaagtggaatttactatattgtaagtcttatataaaatctatcagtgctgcaattacaggagctatattactaatttctagttttcaaatgatttctcagaatatactatctcaatttcaagatgacagtgatttagagctaaaagtagcatttattgtctatgtaggagcaccaattttgatagtacttgcaaatattatttcaattgcatttttgtcatcgcatcaagaaaggattgagattcagcaatttgaaattttaggaacttctaattaccagatggttaagattaaagttggtgaggctatatttttgacatttgttacttcattaattgcatttttacttaacattaaaattatggctttaatatactactctttagaggatattttaatagatgatatgaatcttttggggttaatacttccaaattttatagtatctattattttatttattttaatatttattactaaaagttcctattttatctttaagaatgcaaaaattatttcttaa

SEQ ID NO: 37842 - DNA, 384 bp, Streptococcus pneumoniae
ttggaggaaataacaatggcattgaacattgaaaacattattgctgaaattaaagaagcttcaatccttgaattgaacgaccttgtaaaagctatcgaagaagaatttggtgtaactgcagctgctcctgtagctgttgctgcagctgatgcagctgatgctggtgctgctaaagattcattcgacgttgaattgacatctgcaggcgacaaaaaagttggcgttatcaaagttgtacgtgaaatcactggtcttggtcttaaagaagctaaagaacttgttgacggtgcaccagcacttgttaaagaaggcgttgcaactgcagaagctgaagaaatcaaagctaaattggaagaagctggagcttcagttactcttaaataa

SEQ ID NO: 37843 - DNA, 501 bp, Streptococcus pneumoniae
atgagtgaagcaattattgctaaaaaagcggaactagttgacgtagtagctgaaaaaatgaaagctgctgcatctatcgtcgttgtagacgctcgtggtttgacagttgagcaagatacagttcttcgtcgtgagcttcgtggaagcgaagttgagtataaagttattaaaaactcaatcttgcgtcgtgcagctgaaaaagctggtcttgaagatcttgcatctgtatttgttggaccatctgcagtagcattttctaatgaagatgttatcgcaccagcgaaaatcttgaacgacttttctaaaaacgctgaagcacttgaaattaaaggtggtgcaatcgaaggcgctgtcgcatctaaagaagagattcttgcacttgcaactcttccaaaccgcgaaggacttctttctatgctcctttctgtacttcaagcgccagtgcgcaacgttgctcttgcagtcaaagcggttgcagaaagcaaagaagacgcggcttaa

SEQ ID NO: 37844 - DNA, 1467 bp, Streptococcus pneumoniae
atgaaaatcaaagagcaaactaggaagctagccgtaggttgctcaaagcacagctttgaggttgtagataagactgacgaagtcagttcaaaacactgttttgaggttgcagatagaactgacgaagtcagtaaccacacctacggcaaagtgaatctgaagtggtttgaagagagtacaacttgtcttttagaaaaggagcctataatgaaagtctttcagcatgtaaatatcgtgacttgtgatcaagatttccatgtttatcttgatggaatcttagcagtcaaggattctcaaatcgtctatgtcggtcaagataagccagcgtttttagagcaagctgagcagattatagactatcagggagcttggattatgcctggtttggtcaattgtcacacccattctgcaatgacaggtctgagagggatccgagatgacagcaatctccatgaatggctcaatgactatatttggccagcagaatctgagtttactcccgacatgactaccaatgcggtcaaagaagccctgacagagatgctccagtcaggaacaacaacctttaacgatatgtataatcccaatggtgtggatatccagcaaatttatcaggtggtgaaaacttccaagatgcgttgttatttttctccgactctcttttcttcagagacagaaacaactgctgagactataagtagaactcgatccatcatagacgaaatcttaaaatataaaaatccaaatttcaaggttatggtagcacctcattctccgtatagctgcagtagagacttgctggaagcgagtttggaaatggcaaaagagctaaatattccgctccatgtccatgtggcggagaccaaggaggagtcaggaattatcctcaaacgatacggcaaacgcccccttgcttttcttgaagaactgggttatttagatcatccgtccgtatttgctcacggggtcgaattaaacgagagagaaattgaacgcttggcatcttctcaagtggctatcgcccacaatcctatcagtaacctcaaactggcatcaggaattgctccaattatccagctccaaaaagcgggagtagcagtcggaattgcgactgactcggttgcttccaataacaatctagatatgtttgaggaaggaaggactgcagctcttcttcagaagatgaaaagtggggatgccagccagtttccaatcgaaacagctctcaaggtactgacaatcgaaggggctaaggcccttggaatggaaaatcagataggaagtctggaagtcggcaagcaagcagattttctggtcattcaaccacaagggaaaattcatctccaacctcaggaaaatatgctgtctcacctggtttatgcagttaaatctagtgatgtagatgatgtttatatcgccggagaacaggttgttaagcaaggtcaagtcctgacagtagaactttaa

SEQ ID NO: 37845 - DNA, 870 bp, Streptococcus pneumoniae
atgaagattattgtacctgcaaccagtgccaatatcgggccaggttttgactcggtcggtgtagctgtaaccaagtatcttcaaattgaggtctgcgaagaacgagatgagtggctgattgaacaccagattggcaaatggattccacatgacgagcgtaatctcttgctcaaaatcgctttgcaaattgtaccagacttgcaaccaagacgcttgaaaatgaccagtgatgtccctttggcgcgcggtttgggttcttccagctcggttatcgttgctgggattgaactagccaaccaactgggtcaactcaacttatcagaccatgaaaaattgcagttagcgaccaagattgaagggcatcctgacaatgtggctccagccatttatggtaatctcgttattgcaagttctgttgaagggcaagtctctgctatcgtagcagactttccagagtgtgattttctagcttacattccaaactatgaattacgtactcgcgacagccgtagtgtcttgcctaaaaaattgtcttataaggaagctgttgctgcaagttctatcgccaatgtagcggttgctgccttgttggcaggagacatggtgaccgctgggcaagcaatcgagggagacctcttccatgagcgctatcgtcaggacttggtaagagaatttgcgatgattaagcaagtgaccaaagaaaatggggcctatgcaacctacctttctggtgctgggccgacagttatggttctggcttctcatgacaagatgccaacaattaaggcagaattggaaaagcaacctttcaaaggaaaactgcatgacttgagagttgatacccaaggtgtccgtgtagaagcaaaataa

SEQ ID NO: 37846 - DNA, 987 bp, Streptococcus pneumoniae
atggaaactgcattaattagtgtgattgtgccagtctataatgtggcgcagtacctagaaaaatcgatagcttccattcagaagcagacctatcaaaatctggaaattattcttgttgatgatggtgcaacagatgaaagtggtcgcttgtgtgattcaatcgctgaacaagatgacagggtgtcagtgcttcataaaaagaacgaaggattgtcgcaagcacgaaatgatgggatgaagcaggctcacggggattatctgatttttattgactcagatgattatatccatccagaaatgattcagagcttatatgagcaattagttcaagaagatgcggatgtttcgagctgtggtgtcatgaatgtctatgctaatgatgaaagcccacagtcagccaatcaggatgactattttgtctgtgattctcaaacatttctaaaggaatacctcataggtgaaaaaatacctgggacgatttgcaataagctaatcaagagacagattgcaactgacctatcctttcctaaggggttgatttacgaagatgcctattaccattttgatttaatcaagttggccaagaagtatgtggttaatactaaaccctattattactatttccatagaggggatagtattacgaccaaaccctatgcagagaaggatttagcctatattgatatctaccaaaagttttataatgaagttgtgaaaaactatcctgacttgaaagaggtcgcttttttcagattggcctatgcccacttctttattctggataagatgttgctagatgatcagtataaacagtttgaagcctattctcagattcatcgttttttaaaaggccatgcctttgctatttctaggaattcaattttccgtaaggggagaagaattagtgctttggccctattcataaatatttccttataccgattcttattactgaaaaatattgaaaaatctaaaaaattacattag

SEQ ID NO: 37847 - DNA, 1275 bp, Streptococcus pneumoniae
atgagtaaagaaaatcccttaagtcatcatgagcagttgcgttatgattatttgctaaaaaatattcactatctcaatgagagagaaaaaaatgagtttgcctatttgcaagaaaagctaactcttgctaggggaaatagtagctctagcttggaacaagaaagagaagagcaggttgacttaccaagctatgcgaaccggagtcgctcacaatccaaatcacaagcactctctttccctccaaaaaagaaaagacggaagctccgtcttaaacgaatttttatggtgattttttcacttttggtctgtgtggctttggccatggtattcatgtttttgcgtggttaccaagatgctagcgcaaagaaaactgctgatgcccgggcagctcaagtagaagtctttaatggtcaggacactagagatggagttaatattttaatcatgggtactgatggtcgaatcggccagaacagtgttgagacacgaactgactctattatggtattaaatgtcgggggctcagataagaaaatgaagctagtcagtttcatgcgtgataatttggtctatatagatggttatagtcaagtgattaacggtagaaaacagacagataacaagttaaacgtagcctacgagttaggagaacaagaggggcaaaaaggggcagaaatggttcgccaagtcttgaaagataattttgacttggacattaagtactacgccttggttgatttccaggcctttgccacagcgattgacacgcttttccctgatggggtgacgattgatgctcaattttcaacattgaatgggcgtcccctaacagaagctacagtcggagatgatttatacgctaccgagactgagtctccaacccaaaccattaaagtcggaaaacagcagatgaatggctcgaccctgctcaattatgctcgtttccgtgatgatgatgaggcggattacggccgtacaaaaagacagcaacaagttttaacagcaattttagagcaaattaaagatcccactaaacttttcactggttctgaagctcttggaaaggtttttgctatgacctcaaccaacgtaccctatactttcctcctaacaaacggtttatctgttttggatggagcaaaaaatggtattgaaaaattgacgattccagaactgggtgactgggtagatgcctatgatgtttatggaggcttgggcttgctggttgatcaaaacaaatatcaaaccaagctcgctcaaatgggcttgagataa

SEQ ID NO: 37848 - DNA, 1167 bp, Streptococcus pneumoniae
atgagatatttaactgcaggagaatcacacggcccccgtctaacagctattattgagggaattccagctggacttccattgacagctgaggatatcaatgaggaccttagacgccgtcagggtggctacggtcgtggtggtcgtatgaagattgagaatgaccaggttgtctttacttcgggcgttcgccacgggaagacgacaggggcgcctattactatggatgtcatcaataaggaccaccagaaatggctggacatcatgtctgcggaggacattgaagaccgccttaaaagcaagcggaaaattactcatcctcgcccaggtcatgccgatttggttggggggattaagtaccgttttgatgatttgcgaaattctttggagcgttcatcagctcgtgaaaccaccatgcgggtggcagttggtgcagtagccaaacgcctcttggctgagctggatatggagattgccaaccatgtcgtggtctttggtggtaaggaaatcgatgttcctgaaaatctgacagtcgctgaaattaagcaaagagctgcccagtctgaagtttctattgtcaaccaagaacgagaacaggaaatcaaggactatattgaccaaatcaaacgtgatggtgataccatcggtggggttgtggagacagtcgtcggaggcgttccagttggtcttggttcctatgtccaatgggatagaaaattggatgcaagattggctcaagctgttgtctctatcaatgcctttaaaggggtggaatttggtcttggctttgaggctggttatcgtaaaggcagccaagttatggatgaaattctctggtctaaagaagacggttatactcgccgtaccaataatctaggtggttttgaaggtggtatgactaatgggcaacccatcgttgttcgtggggtcatgaaacctattcctactctttataaacctcttatgagtgtggatatcgaaacccacgaaccttacaaggcaaccgtggagagaagcgatccgactgctcttccagctgcaggaatggtcatggaagcagttgtagcaacggttctggcgcaagaaatcctcgaaaaattctcatcagataatcttgaggaactaaaagaagcggtagccaaacaccgagactatacaaagaactattaa

SEQ ID NO: 37849 - DNA, 855 bp, Streptococcus pneumoniae
atgaagcttgatggctatacacgtttagctgcagttgttgccaatcctattaagcattctatttctcccttcatccacaatagagcctttgaggcgacagctaccaacggtgcttatgtggcttgggagattgaagcgagtgacttggtagaaacagtggccaatattcgtcgctaccagatgtttggcatcaatctgtccatgccctataaggagcaggtgattccttatttggataagctgagcgatgaagcgcgcttgattggtgcggttaatacggttgtcaatgagaatggcaatttaattggatataatacagatggcaagggattttttaagtgcttgccttcttttacaatttcaggtaaaaagatgaccctgctgggtgcaggtggtgcggctaaatcaatcttggcacaggctattttggatggcgtcagtcagatttcggtctttgttcgttccgtttctatggaaaaaacaagaccttacctagacaagttacaggagcagacaggctttaaagtggatttgtgtgctttagaatatgtttctgaactgcaagcaaggattgccgagtcggatttgctagttaatgccaccagtgtgggcatggatggccaatcctctcctgttcctgaaaacatagtcttaccagaaactctcttagttgcagatatcatataccaaccctttgaaacaccgtttttgaaatgggctagaagtcagggcaatccagcagtcaatggtctgggaatgttgctctatcaagctgcagaagcttttcaactgtggacaggcaaggaaatgccgacagaagagatttggcagtctttaacagaaaaataccaataa

SEQ ID NO: 37850 - DNA, 678 bp, Streptococcus pneumoniae
atgaaattaatcgtttcagtaatgccaagaagtttagaggaggctcaggctctggatgccacgaggtacctggatgccgacatcattgaatggcgtgccgactatctgcctaaagaagcgattttgcaggtagctccagccatttttgaaaaattcgcaggccgtgagttggttttcacgctacgaactcgctccgaaggtggagaaatcgacctttctccagaagagtatatccatctaatcaaggaagttgcgcaactctatcaaccagactatattgattttgagtactatagctacaaggatgtttttgaggaaatgctggacttcccaaatcttgttttgagttaccataatttccaagaaacacctgagaacatgatggaaatcttgtcagagttgacgatcctaaatccaaaacttgttaaggttgcggtgatggctcacacggagcaggatgtcttagacttgatgaactatacacgaggctttaaaaccctcaatcctgaacaggaatatgtgaccatttctatgggtaaggtgggcaaggtctctcgtatcactgcggatgtgactggttcgagttggtcttttgccagtctggatgaggttagtgcccctgggcagatttctctagctagcatgaaaaaaatcagggagattttggatgaagcttga

SEQ ID NO: 37851 - DNA, 1173 bp, Streptococcus pneumoniae
atggtagttatgaatagaataagagtcagcaaaagggttgaaaagaagcttgctaaggggctagttttactagaagccagtgatcttgagaatgtcaatcttaaggatcaggaagtagaggtgcagggtcaggaaggaaactttcttgggactgcctacctttctcagcaaaacaagggcttgggctggtttgtcagcaaagacaaggtggccttcaatcaagctttctttgaaacgttgtttagaaaagccaaagaaaagagaagcgcctactatcaagacgatttaacaactgcctatcgtctctttaatcaagagggagatggctttgggggtctgacagtggacctttatggcgactacgccgtcttttcttggtataactcttatgtttatcagattcgtcagactatatcagaagcctttagacaggttttccctgaggttttaggggattatgagaaaatccgctttaagggtttggactatgaatctgcccatgtttatggtcaagaagcacctgactttttcactgttttagaaaatggtgtcctgtatcaagtctttatgaatgatggcttgatgacaggaattttcctagaccagcatgaggttcgcggtagtttagttgacggcttggctatgggtaaatccttgctcaatatgttttcctacacagcggctttttcagtagctgcggccatgggaggagctagccagacaacttctgttgatctagccaaacgttcacgagaattgtctcaagcgcattttcaggcaaatgggctcagcacagacgagcatcgttttatagtcatggatgtctttgagtatttcaaatatgccaaacgcaaaaacttgacctacgatgtgattgtcctagatccgcctagctttgctcggaataaaaaacaaactttctctgtggccaaggattatcacaagttgatttcccagagtcttgagattttaaatccgggagggattatcattgccagtaccaatgctgccaatgtttcccgtcagaaatttacagaacaaattgataaaggctttgcaggaagaagttaccagattttaaacaaatatggtcttccagcagattttgcctataataaaaaagatgaaagtagtaattacctcaaggtgattagtatgaaggttagtaaatga

SEQ ID NO: 37852 - DNA, 807 bp, Streptococcus pneumoniae
ttgtatcaaagtgctagtataatagtatgtaatatagataaagataggagtcatcccatgattgaatttcaaaatgttagtaagttgtatggtgataaagaggccttgagtaatctcaatttgcagattgaaaatggagagattatgggcttgattggtcataatggggctggaaaatcgaccaccataaaatccctagtcagtatcatttcacccagcagtggtcgtattttggtaaatggtcaggagttatcggaaaatcgcttggcgatcaaacgaaagattggctacgtagcagactcgcctgacttatttttacgtttaacggccaatgaattttgggaattgatcgcctcatcctatgatctgactagctctgacttggagactagtctagctaggctattgaacgtttttgattttgctgaaaatcgttatcaggttattgaaaccctttctcatggaatgcgtcagaaagtttttgtcatcggggcactcttgtctgatcctgatatttgggtcttggacgaacccttgactggtttggatccccaggctgcctttgatttgaaacagatgatgaaggaacatgcacaaaaagggaagacagtcttgttttcaactcatgtcctagaggtggcagagcaagtctgtgatcggattgccattttgaaaaaggggcatttgatttattgtggtagtgtagaggacttgagaaaagattacccagaccagtctttggaaagtatctaccttagtcttgctggtagaaaagaggaggttgcggatgcgtctcaaggtcattaa

SEQ ID NO: 37853 - DNA, 2619 bp, Streptococcus pneumoniae
atgaaacaactatctagtgcacaagtacgccaaatgtggcttgatttctgggcgaccaaaggtcactcagtagaaccatcagtaagtttggttcctgtaaatgacccaactcttttgtggatcaactctggggtagcaacccttaagaaatactttgacgggaccattatccctgaaaatccacgtattaccaatgcccaaaaggctatccgtaccaacgacatcgaaaacgtagggaagactgcgcgtcaccataccatgtttgaaatgctggggaacttctctatcggggattacttccgtgacgaagctatcacttgggcttatgagcttttgacaagccctgaatggtttgatttccctgctgaaaaactttacatgacctactatccagacgataaagattcttacaaccgctggattgaagtgggagtggatccaagtcacttgattccaattgaggacaacttctgggaaatcggtgcgggaccttctggaccagatacagaaatcttctttgaccgtggggaagcctttgacccagaaaatatcggtcttcgcctgcttgcagaagatattgaaaacgaccgttatattgaaatctggaacatcgttttgtcacaatttaacgcagaccctgctgttcctcgtagcgaatacaaggaattgccacataagaacattgatacgggcgctggtttggagcgtttggtggccgttatccaaggggctaagaccaactttgaaacggacctcttcatgccgattatccgtgaagtcgagaaattgtctggtaaggtttatgaccaagatggcgacaacatgagcttcaaggttatcgcagaccacattcgttctctttcatttgctatcggtgatggtgcccttccaggaaatgaaggtcgtggttatgttcttcgtcgtcttctccgtcgtgcttctatgcatggtcaaaaattgggtatcaacgagcctttcctttacaaattggttccaactgttggaaaaatcatggaaagctactacccagaagtgcttgagaaacgtgactttattgagaaaatcgttaagagcgaagaagaatcatttgcccgtacccttcactcaggtcaacactttgcccaaggcattgtggcagacttgaaagaaaaaggtcaatctgtcattgctggtcaagatgtctttaaactctatgatacttatgggttcccagttgaattgactgaagaaatcgctgaagaagctggtatgactgtagaccgtgaaggttttgaagcagccatgaaagaacagcaagaacgcgcgcgtgcgtcagctgtcaagggtggctcaatgggtatgcaaaatgaaactcttcaaaacatcactgtagaaagtgtcttcaactacaatactagccaattgtcttctaaattggtagctatcgttgctgacaatgcagaagtaggagctgtttcagaaggaactgcctctcttatctttgcggaaacgtcattttatgctgaaatgggtggacaggtagctgactacggacaaatcttggatgagtcaggtaagattgtggctactgtgaccaatgttcagaaagccccaaatggtcaagcccttcatacagttgaagtccttgcaccgcttgccttgaaccaagaatataccttggcaattgatagcaatcgccgtcaccgtgtcatgaaaaaccacactgcgactcatttgcttcacgctgcccttcacaatatccttggaaaccacgcaacacaggcaggatctcttaacgaagttgaattccttcgctttgactttacccacttccaagcagtaactgctgaggaacttcgtgcgattgaacagcaagttaacgagaaaatttgggaagcacttgaagtgaagacagttgaaacggatattgacactgctaaagaaatgggagctatggccctctttggtgagaaatacggcaaggaagttcgtgtcgtgactatcggtgactactctattgaactttgtggtggtactcatgttgacaacacttctgagattggtctcttcaaaattgtcaaagaagaaggaatcggttcaggaactcgccgtatcttggcagtgactggtaaggaagcctttgaagcctatcgtgaacaagaggatgctcttaaagctatcgcagcaaccttgaaagcacctcaagtcaaggaagtacctcacaaggtagaaggacttcaagaacaacttcgtcaacttcaaaaagaaaatgctgagttgaaagaaaaagccgcagctgcagccgcaggcgatatcttcaaagatgttaaggaagtcaacggtcatcgttacattgctagtcaagtgtctgtatccgatgccggtgcccttcgtacttttgcagataactggaaacaaaaagactactctgatcttcttgtcctagttgccgctatcggtgacaaagtcaatgtccttgtagcaagcaagacaaaagaccttcatgcaggaaaccttgtcaaagaattagcaccaatcatcgatggacgtggtggtggtaaaccagatatggccatggcaggaggaagcaaccaacctaagatccaagaattgttggatgcagtagcaggtaaattgtaa

SEQ ID NO: 37854 - DNA, 1071 bp, Streptococcus pneumoniae
atgaaaaaaatctattcatttttagcaggaattgcagcgattatccttgtcttgtggggaattgcgactcatttagatagtaaaatcaatagtcgagatagtcaaaaattggttatctataactggggagactatatcgatcctgaactcttgactcagtttacagaagaaacaggaattcaagttcagtacgaggcttttgactccaacgaagccatgtacactaagataaagcagggtggaacgacctacgatattgccattccaagtgaatacatgattaacaagatgaaggacgaagacctcttggttccgcttgattattcaaaaattgaaggaatcgaaaatatcggaccagagtttctcaaccagtcctttgacccaggtaataaattctccatcccttacttctggggaaccttaggaattgtctacaacgaaaccatggtagatgaagcgcctgagcattgggatgacctttggaagctggagtataagaattctatcatgctttttgatggggcgcgtgaggtgctgggactaggactcaattccctcggctacagcctcaactccaaggatccgcagcagttggaagagacagtggataagctctacaaactgactccaaatatcaaggctatcgttgcggacgagatgaagggctacatgattcagaataatgttgcaatcggcgtgaccttctctggtgaagccagccaaatgttagaaaaaaatgaaaatctacgttatgtggtaccgacagaggccagcaatctttggtttgacaatatggtcattcccaaaacagttaaaaatcaagactcagcctatgcctttatcaactttatgttgaaacctgaaaatgctctccaaaatgcggagtatgtcggctattcaacaccaaacctaccagcgaaggaattgctcccagaggaaacaaaggaagataaggccttctatcccgatgttgaaaccatgaaacacctagaagtttatgagaaatttgaccataaatggacagggaaatatagcgacctcttcctacagtttaaaatgtatcggaagtag

SEQ ID NO: 37855 - DNA, 951 bp, Streptococcus pneumoniae
atgtctgtaagagaaaaaatgcttgaaatcttagaaggaattgatatccgttttaaggaacccttgcatagctatagttatacaaaagtaggtggagaggctgattatttggtctttccacgaaatcgttttgagttggctcgcgttgtgaaatttgccaaccaagaaaatatcccttggatggttcttggcaatgcaagcaatatcatcgttcgtgatggtgggattcgtggatttgtcatcttgtgtgacaagctcaataacgtttctgttgatggctataccattgaagcagaagctggggctaacttgattgaaacaactcgcattgccctccgtcatagtttaactggctttgagtttgcttgtggtattccaggaagcgttggcggtgctgtctttatgaatgcgggtgcctatggtggcgagattgctcacatcttgcagtcttgtaaggtcttgaccaaggatggagaaatcgaaaccctgtctgctaaagacttggcttttggttaccgccattcagctattcaggagtctggtgcagttgtcttgtcagttaaatttgccctagctccaggaacccatcaggttatcaagcaggaaatggaccgcttgacgcacctacgtgaactcaagcaacctttggaatacccatcttgtggctcggtctttaagcgtccagtcgggcattttgcaggtcagttaatttcagaagctggcttgaaaggctatcgtatcggtggcgtagaagtgtcagaaaagcatgcaggatttatgatcaatgtcgcagatggaacggccaaagactacgaggacttgatccaatcggttatcgaaaaagtcaaggaacactcaggtattacgcttgaaagagaagtccggatcttgggtgaaagcctatcggtagcgaagatgtatgcaggtggttttactccctgcaagaggtag

SEQ ID NO: 37856 - DNA, 732 bp, Streptococcus pneumoniae
atggataagaacgtgcaggaaccagtgaaattatttcaatacaatactcttggagccttgatggctggcctttatggtggtactatgacagtaggagaattgctagaacatggtgaccttggtttgggaaccttggattccattgatggggaattgattgtcttggatggcaaggcttatcaggccaaagggtcaggagaccagccagaaattgtggaagtgtcaccagatgcccttattccttacgctgcagtggtaccgcatcaggcagaggtcattttccgccagcgctttgagatgacagacaaggaattgaaagaacgaattgagtcttattatgatggggaaaatcttttccgctctatcaagattcggggggaattttcacatatgcatgtgcgtatgattcctaagtcaacacccgataccaagtttgctgatgtcgcaacccatcaaccggaatatagtcgtgacaatgttgcggggactattgttggtttctggacgcctgagattttccatggggtcagtgtggcaggctaccatctgcacttcatatcagatgatttgaccttcggtggacatgtcatggattttgtcatcaaggaaggcattatcgaggtgggagcagttgaccagttggaccaacgtttcccagtccaagaccgtcaatacttgtttgctaagttcaatgttgacgagatgaaaaaagatattgaaaaggcagaatag

SEQ ID NO: 37857 - DNA, 816 bp, Streptococcus pneumoniae
atgaaatcaaaaaaatggatatttgttttatgtaattttcttgcaagtttcttcttagtagcttgccagtcaggttctaatggttctcagtcagctgttgaggccattaagcaaaaggggaaattagttgtggcaaccagtcctgactatgcaccctttgaatttcaatcattggttgatggaaagaaccaggtagtcggtgcagacatcgacatggctcaggctatcgctgatgaacttggggttaagttggaaatctcaagcatgagttttgacaatgttttgaccagtcttcaaactggtaaggctgacctagcagttgcaggaattagtgctactgacgagagaaaagaagtctttgatttttcaatcccatactatgaaaacaagattagtttcttggttcgtaaggctgatgtggaaaaatacaaggatttaactagcctagaaagtgctaatattgcagcccaaaaagggactgttccagaatcaatggtcaaggaacaattgccaaaagctcaattaacttccctaactaatatgggtgaagcagtcaatgaattgcaggctggaaaagtagatgctgttcatatggatgagcctgttgcacttagttatgctgctaaaaacgctggcttagctgtcgcaactgtcagcttgaagatgaaggacggcgacgccaatgccgttgctcttagaaaaaatagtgatgatttgaaagaagtggtagacaaggtcatccaaaaacttaagaatgaaggaacttaccaaagctatcttgaaaaagcagcaagtctaactgaagttgaagaataa

SEQ ID NO: 37858 - DNA, 918 bp, Streptococcus pneumoniae
atgaatcaagaagaattagctaagaaaatgttgcttccatcaaagaattctcgtctggagaaattaggaaaaggtttgacctttgcctgtctttctttgatagtcatccttgtggccatgattttggttttcgtagcgcaaaaaggcttgtcgaccttctttgtcaatggtgtgaatatctttgactttcttttgggaggaacttggaatccttctagtaaagaatttggtgcccttcctatgattttgggttcctttatcgttaccattctctcagcccttatcgcaacaccctttgctattggtgcagcagtttttatgaccgaagtatcaccaaaaggggcgaagattttgcaaccagctattgaactcctggttgggattccttcagtagtgtacggatttattggcttgcaagtcgtcgttccctttgttcgcagtgtctttggtgggactggttttgggattttgtcagggatttccgtcctctttgtcatgattttgccgaccgtaacctttatgacaacggatagcttgcgtgcggttcctcgttattatcgtgaagccagtttcgctatgggagccactcgctggcagactatctggcgtgtgatcttgaaggcggcccgttctggtattttcactgcagtggtctttgggatggcgcgtgcctttggtgaggctttagctatccagatggttgtcggaaactcagctgttatcccaacttccttgaccacaccagctgcaactttaacttctatattaactatgggaattgggaacactgtcatgggaactgtaaataataatgttctctggtcactggccttggtactgctcttgatgagtttagtttttaacagtgtgattaaattgattacgaaagaaagaggaaagaaaaattatgcgcgctaa

SEQ ID NO: 37859 - DNA, 738 bp, Streptococcus pneumoniae
atgggcttaacttatcaaatgaaaatgaaaattccttttgatatggctgatatgaacggtcatatcaaacttccagatgtgattttgctgtcactgcaagtttcagggatgcaatcgattgaactgggagttagtgataaggccattttggaagactataatctggtctggattatcgcagaatatgatattgaggtggttcgtttgcctcgttttgcggaagaaattaccatcgaaacggaagccttgagctacaatcgacttttttgctaccgtcgctttactatttataatgaagcggggcaggagctcatccatatgatggcgacctttgttctcatggaccgcgacagtcgaaaagtccatgctgttgaacctgagattgtggctccttaccagtctgattttgataaaaaacttatccgtggaccgaagtatgaatccttggaagagccgatcagcaaggattaccatgttcgtttttacgacttggatatgaatggtcatgtcaataacagtaaatacttggactggatttttgaggtcatgggagcggattttttgacccactatattcccaagaaaatcaacctcaagtatgtcaaggaagttcgaccaggtggggtgattacatcggctgttgaacggactggactggaaagcaagcatgaaattacaagtgatggggttatcaatgcccaagcaatcattacttggcaagaaataaaaaaggtttag

SEQ ID NO: 37860 - DNA, 951 bp, Streptococcus pneumoniae
ttgaaggaggaaatgatgtcggttttagtaaaagaagtgattgaaaagcttagactagacattgtctatggtgaaccagaattgcttgaaaaggaaatcaatatagcggatattacgcgacctggtcttgaaatgacaggctattttgactactatacaccagagcggattcaacttttggggatgaaggagtggtcttatctgatcagcatgccttccaacagccgttatgaagttttgaaaaaaatgtttctacctgagacaccagcagtcattgttgcccgtggtttggtggttccagaggagatgttaaaggctgctagagaatgtaagattgctattttaaccagccgtgcagctaccagtcgtttatctggagagttatctagctatctggattctcgtttggcagaacgtaccagtgtgcacggtgtcttgatggatatttatgggatgggcgtcttgattcagggagatagtggaattggtaagagtgagacaggtcttgagcttgtcaaacgtggtcaccgtttggtagccgatgaccgtgtcgatatctttgccaaggatgagattactctctggggtgaaccagctgaaattttgaaacacttgattgaaattcgtggggttggtattatcgatgttatgagtctctacggtgcgagtgctgtcaaggattcttcacaggttcagcttgctgtctatttggaaaattacgatacgcataagacctttgatcgtcttggaaacaatgcagaggaacttgaagtttctggcgtagccattcctcgtattcgtattccagttaaaacaggtcgtaatatctctgttgtgattgaggcagctgccatgaattatcgtgccaaggaaatgggctttgatgcgacccgtttgttcgacgaacgactgacaagtctcatcgctcgaaatgaggtgcaaaatgcttga

SEQ ID NO: 37861 - DNA, 201 bp, Streptococcus pneumoniae
ttgaacttgaagggagtgaaaaaaatgtctaaaacagtagtacgtaagaatgaatctcttgacgacgcacttcgccgtttcaaacgtgcggttactaaagctggtactcttcaagaaacacgcaaacgtgaattctatgaaaaaccttctgtaaaacgtaaacgtaaatcagaagtagctcgtaaacgtaaaaaattctaa

SEQ ID NO: 37862 - DNA, 723 bp, Streptococcus pneumoniae
atggaggatgaaaagatgaaagttattaaagttgaaaaccaagttcaaggtggaaaagttgcttttgagattttgaaggaaaaattggctaatggagctcaaactctaggacttgcgacaggaagtagcccacttgaattttacaaggaaattgttgagagtaaccttgatttttcaaatctaaccagtgtcaaccttgatgagtatgtgggccttgatggggacaatccacagtcttatcgttacttcatgcaagaaaacttgttcaaccaaaaaccatttaaagaaagtttcttgcctcgtggtgttaaggacaatgctgaagctgaagttgaacgctacaaccaaattttggctgaccatccagttgacctccaaatcttgggaatcggtcgcaatgggcatatcggctttaatgagcctggtactccatttgacagtcaaacgcatctagtagaacttgaccagtctactatcgaagccaatgcacgcttctttgccaagattgaagacgtcccaacccaagctatttcaatggggattaaaaacattttggatgccaagtctattattctttttgcttacggtgagtcgaaagcagaagccattgccggaacagtatctggcccagtgactgagaacctacctgcaagtagcctccaaaatcaccctgatgtaaccatcatcgcagatgctgaagcgcttagcttactcgaaaaataa

SEQ ID NO: 37863 - DNA, 1041 bp, Streptococcus pneumoniae
atgaacagatatatgaatacagctgattttgatttccacttgccagaggaattgattgcccaaacgccccttgaaaaacgtgatgcctccaaactcctcatcgtcaaccgtgagacaggagaaatgcaagataaacacttccactctattattgatatgctggaacctggtgatgcccttgtcatgaacgacacccgagttctccctgcccgcctctatggtcaaaaagtggagacaggaagtcatgtggaacttctcctccttaagaacactagtggagacgagtgggaagttctggctaaacctgccaaacgcctcaaggtcggtactcgtatcagctttggtgatggccgcctcagcgctgtcgttacagaagaattgacccacgggggacgcattgtccgctttgaataccaaagaattttcctagaagtcttggaaagtctgggagaaatgcctctgccaccttatatccacgaaaaattagatgaccgtgaacgttatcaaaccgtctacgccaaggaaagcggctctgctgcagcaccgactgctggtcttcacttcaccaaagaactgctggcagaaatccaagctaagggtgtccatctagtctatctgactctccatgtcggactcggaacctttagacctgtttctgtggataatctggacgaacacgaaatgcactcagagttctatcaactttctgaggaagctgcggccacccttcgctctgtcaaagaaaatggtggtcgtgtcatcgctgtcggaaccacttctatccgtaccttggaaactattggttccaagtttgatgggcaaatccaagcagattctggttggaccaatatctttatcaaacctgggtatgagtggaaggtcgtggatgccttctcaaccaacttccacctgccaaaatcaactctggtcatgttggtttctgcctttgcaggccgtgaattagtcttagatgcctaccaccattccatccaagaacactaccgcttcttcagttttggtgacgccatgtttatttattga

SEQ ID NO: 37864 - DNA, 825 bp, Streptococcus pneumoniae
atgagtttgcaagaaacgattatccaagagctgggtgtcaaaccagtgattgatgcccaggaagaaatccgtcgttctattgatttcttaaaaagatatctgaaaaaacatcccttcctaaaaacctttgtactagggatttctgggggacaagattcaaccttggcaggacgtttggcgcaattagctatggaagaactgcgagctgaaacgggagacgatagctacaaatttatcgctgtccgcctgccatacggagtgcaagctgatgaagcagatgctcaaaaagccctagccttcatccagccagatgtcagcttggttgtgaatatcaaggaatcagctgatgccatgacagctgcagttgaagcgacaggtagtcctgtttcagacttcaacaaggggaatatcaaggcacgttgccgtatgattgctcagtatgcccttgctggttcccatagcggagcggtcattggaacagaccacgccgcggaaaatatcacaggtttctttaccaagtttggtgacggcggtgcggatattctccctctttaccgcctcaataaacgccaaggaaaacaactcttgcagaaacttggcgcagagccagccctttatgaaaaaatcccaacggcagacctagaagaagacaaaccaggcctagctgacgaagtcgcacttggagtcacctatgcagagattgacgattacctagaaggcaaaacaatcagcccagaagctcaagcgaccattgaaaactggtggcacaaaggccaacacaaacgccacttacccatcaccgtatttgatgacttttgggagtaa

SEQ ID NO: 37865 - DNA, 1461 bp, Streptococcus pneumoniae
atgtatccagatgatagtttgacattgcacacggacttgtaccagatcaacatgatgcaggtttactttgaccaagggattcacaataagaaggcggtctttgaggtgtatttccgccaacagccttttaagaacggctatgcggtttttgcaggtttggaaagaattgtgaactatcttgaagacttgcgtttttcagatagtgatatagcctatttggagtcgcttggttatcatggggcgttcttggattaccttcgcaatttcaagttggagttgaccgttcgttctgcccaagaaggggatttggtttttgctaatgaaccgattgtgcaggtggaaggacctctagcccaatgtcagttggtcgaaacggctcttttgaacatcgtcaactaccagaccttggtggcgacgaaggcagctcgtattcgttcggttatcgaagatgaacccttgatggagtttgggacacgtcgggctcaagaaatggatgcggccatctggggaacacgcgcagctgtgattggtggcgccaatggaaccagcaacgtgcgtgcgggtaagctctttgacattcctgttttgggaacccatgcccatgccttggtacaggtttatggcaatgactatgaagctttcaaggcttacgctgcgacccacaaaaattgtgtctttcttgtggatacctatgacacccttcgcatcggtgtaccagctgccattcaggtggcgcgtgagctgggtgatcagattaactttatgggtgtgcggattgactctggggatattgcctacatttctaagaaagtccgtcagcaactggacgaggctggatttacagaggctaagatttatgcttctaatgatttggacgaaaatactatcctcaacctcaagatgcaaaaggccaagattgatgtctggggcgtgggtaccaagctgattacagcctatgaccagccagctcttggggcggtttacaagattgttgcaatcgaagatgaaactggtcagatgcgcaatacgattaagctgtctaataatgcggaaaaagtgtcgacgccaggtaagaagcaggtgtggcgcattaccagtcgtgaaaaaggcaagtcagaaggtgactacatcacttatgatggtgtggatattagcgacatgacagaaatcaagatgttccatccgacctatacatacatcaagaagacggttcgtaattttgatgccgttcctctcttggtggatatcttcaaagaaggtatattagtttacaacttgcctagtttgactgacattcaggattatgcccgtaaggaatttgacaagttgtgggatgagtataagcgtgtgctcaatccgcagcactatccagtggatttggcgcgtgatgtatggcaagataagatggacttgattgataagatgcgcaaggaagcccttggtgaaggagaagaagaatga

SEQ ID NO: 37866 - DNA, 726 bp, Streptococcus pneumoniae
atgcgtgatgccaaccgtggtggatgttctcagtcatgccgttggaagtacgacctttacgatatgccatttgggaaagaacgtaagagtttgcagggtgagattccagaagaattttcaatgtcagctgttgatatgtctatgattgaccatatctcagatatgattgaaaatggtgtggacagtctaaaaatcgaaggacgtatggagtctattcactatgtattaacagtaaccaactgctacaaggcggctgtggatgcctatcttgaaagtcctgaaaagtttgaagctatcaaacaagacttggtggacgagatgtggaaggttgcccaacgtgaactggctacaggattttactatggtacaccatctgaaaatgagcagttgtttggtgctcgtcgtaaaatccctgagtacaagtttgtcgctgaagtggtttcttatgatgatgcggcacaaacagcaactattcgtcaacgaaacgtcattaacgaaggggaccaagttgagttttatggtccaggtttccgtcattttgaaacctatattgaagatttgcatgatgccaaaggcaataaaatcgaccgcgctccaaatccaatggaactattgactattaaggtgcctcaacctgttcaagctggagacatggttcgtgcattaaaagaaggactcatcaatctttataaggaagatggaaccagcgtcacagttcgtgcttaa

SEQ ID NO: 37867 - DNA, 1305 bp, Streptococcus pneumoniae
ttgcaaataggagaaatcatgacaaaaacattaaaacgtcctgaggttttatcacctgcagggactttagagaagctaaaggtagctgttcagtatggagcagatgctgtttttatcggtggtcaggcctatggtcttcgtagccgtgcgggaaactttactttcgaacagatggaagaaggcgtgcagtttgcggccaagtatggtgccaaggtctatgtagcggctaatatggttatgcacgaaggaaatgaagctggtgctggtgagtggttccgtaaactgcgtgatatcgggattgcagcagttatcgtatctgacccagccttgattatgattgcagcgactgaagcaccaggccttgaaatccacctttctacccaagccagtgccactaactatgaaacccttgagttctggaaagagctaggcttgactcgtgtcgttttagcgcgtgaggtttcaatggaagaattagctgagatccgcaaacgtacagatgttgaaattgaagcctttgtccatggagctatgtgtatttcatactctggacgttgtactctttcaaaccacatgagtatgcgtgatgccaaccgtggtggatgttctcagtcatgccgttggaaatacgacctttacgatatgccatttgggaaagaacgtaagagtttgcagggtgagattccagaagaattttcaatgtcagccgttgacatgtctatgattgaccacattccagatatgattgaaaatggtgtggacagtctaaaaatcgaaggacgtatgaagtctattcactacgtatcaacagtaaccaactgctacaaggcggctgtggatgcctatcttgaaagtcctgaaaagtttgaagctatcaaacaagacttggtggacgagatgtggaaggttgcccaacgtgaattggcaacaggtttctactacggtataccatctgaaaatgagcagttgtttggtgctcgccgtaaaattcctgagtacaagtttgtcgctgaagtggtttcttatgatgatgcggtacaaacagcaaccattcgtcaacgaaacgtcattaacgaaggggaccaagttgagttttatggtccaggtttccgtcattttgaaacctatattgaagatttgcatgatgccaaaggcaataaaatcgaccgcgctccaaatccaatggaactattgactattaaagtcccacaacccgttcaatcaggagacatggttcgtgcattaaaagaaggactcatcaatttttataaggaagatggaaccagcgtcacagttcgagcttaa

SEQ ID NO: 37868 - DNA, 1563 bp, Streptococcus pneumoniae
atgagcaacatttcaactgatttgcaagatgtagaaaaaatcatcgtattggactatggtagccagtacaaccagctgatttcacgccgtatccgtgagattggtgttttttcagaactaaaaagccataaaatttcagctgctgaagttcgtgaagtcaatcctgtaggaattattctatcaggtggtccaaattctgtatatgaagatggttcatttgatattgacccagaaatcttcgaactcggaattccaattttgggaatctgttatggtatgcagttattgacccataaacttggaggaaaagttgttcctgcaggtgatgctggaaatcgtgaatacggtcaatcaaccctaactcacacaccatcagcgctttttgaatcaacacctgatgaacagactgttttgatgagccatggtgatgcggttactgagattcctgctgactttgttcgtacaggtacatcagctgactgcccatacgcagccatcgaaaacccagataaacacatttacggtatccaattccacccagaagttcgtcattctgtatacggaaatgatatccttcgtaactttgcccttaacatttgtaaggctaaaggtgactggtcaatggataatttcattgacatgcagatcaaaaaaattcgtgaaaccgtcggtgataaacgtgtccttcttggtctatcaggtggtgttgactcatctgtcgttggggttcttctccaaaaagcgattggcgatcaattgatctgtatcttcgtagaccacggtcttcttcgtaaaggcgaagctgatcaagttatggacatgctcggtggtaagtttggtttgaatatcgtcaaagcagacgctgctaaacgtttccttgacaaacttgctggcgtttctgatcctgaacaaaaacgtaaaatcattggtaacgagtttgtctatgtattcgatgacgaagcaagcaagctcaaagatgtgaaattccttgctcaaggtactttatatacagatgttatcgagtctggtacggatacagctcaaactatcaagtcacaccacaacgtgggtggtcttccagaagatatgcagtttgaattgattgaaccactcaatactctttacaaggatgaagttcgtgctcttggtacagagcttggtatgccagaccatatcgtatggcgccaaccattcccaggaccaggacttgctatccgtgtcatgggtgaaatcactgaagagaaacttgaaaccgttcgtgaatcagacgctattcttcgtgaagaaatcgctaaagctggacttgaccgcgatatttggcaatacttcactgttaacacaggcgttcgttcagtcggtgttatgggtgacggtcgtacgtatgactacacgattgcaatccgtgctatcacttctatcgatggtatgactgctgattttgccaaaattccatgggaagtacttcaaaaaatctcagtacgtatcgtaaatgaagtggatcatgttaaccgtatcgtctacgatattacaagtaaaccacctgcaacagttgagtgggagtaa

SEQ ID NO: 37869 - DNA, 957 bp, Streptococcus pneumoniae
atggatattagaccgcaatcaagtgatgaacttgattcgcaaagaagagtaaggagagacatgtcaaatagtttaaaagggactttactaacagttgtggctggtattgcttgggggttgtcaggaacgagtggccaatacctaatggcacacggaatttcggctctggtcttgaccaacttgcgtcttttaatcgctggtggaattctcatgctcttggcttatgctactgcaaaggataaaatactggtctttttaaaggatagaaagagtttgctgtctcttcttatttttgctctgattggtctttttctcaaccaattcgcctatctgtctgctattcaggagaccaatgcgggaacagcgacggtgcttcagtatgtttgtcctgtcggaattttaatttatagctgtatcaaggatagggtggcaccgacactgggagagatagtttccatcatattcgccatcggaggaaccttcctgatcgcaacacatgggcagttggaccagttatccatgacacctgctggcctgttctggggtctcttttctgccttgacttatgctctatatatcattttacccatagccttgattaaaaagtgggggagcagcttggtcattggtgtgggaatggtcatagcaggtttggtcgcccttccttttacaggggttctacaggccgatatcccgactagtcttgattttctccttgcgtttgcaggcattatccttatcgggactgtctttgcctatacagctttccttaaaggagccagtctgataggaccggtcaagtcaagcttgttggcttcaattgagccaatatcggcgattttctttgccttcttaataatgaatgaacaattttatcccattgattttcttggtatggcaatgatattgtttgctgtaactttgatttctttgaaagatttattcttagaaaaataa

SEQ ID NO: 37870 - DNA, 828 bp, Streptococcus pneumoniae
atgatgattaaggtaattgcgacagatatggatgggaccttgctggatgctagaggtcagcttgatctcccacgattggaaaagattttagatcagttggatcaaaggggcattcgttttgtcattgcgacgggcaatgaaattcaccgcatgagacaactactgagtcccttggtggatcgagtggttctggttgttgctaatggcgctcgtatttttgaaaacaatgaattgattcaggctcagacatgggatgacgccattgtcaacaaggctttgactcatttcaagggtcgagcgtgtcaggaccagtttgttgtaacggggatgaagggtgattttgtcaaggaaggtacgatttttacagatcttgaaagttttatgactccagaaatgattgaaaaattctaccaacggatgcaatttgtggatgaattaacatctgacctctttggtggtgtgctcaagatgagcatggttgttggtgaggaacgtttgagttcggttttggaagaaatcaatgctctctttgatggccgtgtccgagctgtatccagtggctatggttgcattgatatcctccaagctgggattcataaagcatggggcttggaggaattactcaagcgctgggacttgaaatcccaagaaatcatggcttttggtgatagtgaaaatgatgttgaaatgcttgaaatggctggaattgcctatgcgatggaaaatgctgatgagaaagccaaagctgtggcgactgctctagcaccagccaacagccaaggaggagtttatcaagtcttggaaaactggttagaaaaaggagaatga

SEQ ID NO: 37871 - DNA, 531 bp, Streptococcus pneumoniae
atgcaaaagaagtatgtaaaaatcctctactcctcaccaattggtattctatcacttgtagctgatgaccattatttgtatggaatttgggttcaggagcagaagcattttgagaggggactaggagatgaaacgatagaagaagttgttagtcatcctattttagacccagttattgcttgcttagatgattactttaaaggcaagcctcaggatttatccaacttgctcttggcgccaatcggaacgaattttgaaaagagagtttgggactatttacagggcattccttatggtcagacagtgacctatggacaaattgctcaagacctgcaagtggcttctgctcaagcaattggtggagcagtgggacgcaatccttggtctatcctagtaccttgtcatcgtgtgttgggagcaggcaagcgtctgacaggttatgctgcaggagtggaaaagaaagcttggctcttggagcatgaaggagtagattttaaagatagaaacaatagaaggagaagcacatgttag

SEQ ID NO: 37872 - DNA, 495 bp, Streptococcus pneumoniae
atggaaattcgtttagcttttccaaatgaagtagatgccatcatgcaggtgatggaggaggccaaaaaatgtttagcagatgctggtagtgaccagtggcaaaatggctatccaaatgcagatgttattatcgatgatatcatctcagggcaagcctacgtagccttggaagagggagaactgctagcctatgctgctgtgaccaagagtccagaggaggcctatgaagctatttatgagggaaactggcaagctggagagtcagagtatctagtctttcaccgtattgctgtggcagcagatgtgcagggaaaaggagttgctcaaaccttcttagagggcttgattgaaggttttgattatcttgattttcgctcagatacgcatgctgaaaacaaggttatgcaacatatttttgaaaaacttggttttaaacaagttggtaaggtgccagtagatggcgaacgcttggcctatcaaaaattaaagaaataa

SEQ ID NO: 37873 - DNA, 648 bp, Streptococcus pneumoniae
atgaacactagtcttaaactcagcaaacaactcagttttggagaggagattgctaatagcgtgacccatgctgtgggtgcagtcatcatgcttatcttgctgcctatttcatccatctatagttatgaagcacacggatttttatcctctatcggcgtttccattttcgtcatcagtctctttctcatgttcctatcatccaccatttatcactctatggcctatggttcgacccacaaatatgttttgcgaatcattgaccattctatgatttacgttgccattgccggctcatacacgcccgttgtcttgaccttgatgaataactggtttggctatctgattattgtcatccaatggggaacgaccatctttggtattctctataaaatctttgctaaaaaggtcaatgagaaatttagccttgctctttacctgattatgggctggttggttctggctatcattcctgccattatcagtcaaacgacacccgttttctggagtctcatggtaactggcggactctgttatacagttggagctggattttatgccaagaaaaaaccttatttccacatgatttggcatctctttatcctagctgcgtccgcactccaatacatcgctattgtttattacatgtaa

SEQ ID NO: 37874 - DNA, 582 bp, Streptococcus pneumoniae
atgaaaatcggaatattggccttgcaaggggcctttgcagaacatgcaaaagtgctagatcaattaggtgtcgagagtgtagaactcagaaatctagatgattttcagcaagatcagagtgacttgtcgggtttgattttgcctggtggtgagtctacaaccatgggcaagctcttacgtgaccagaacatgctacttcccatacgagaagccattctatctggcttaccagtgtttgggacctgtgcgggcttaattttgctggctaaggaaatcacttctcagaaagagagtcatctaggaactatggatatggtggtcgagcgtaatgcttatgggcgccaattaggaagtttctacacggaagcagaatgtaagggagttggcaagattccaatgacctttatccgtggtccgattatcagtagtgttggtgagggtgtagaaattttagcaatagtgaacaatcaaattgttgcagcccaagaaaaaaatatgttggtaagttcttttcatccagaattgactgatgatgtgcgcttgcaccagtactttatcaatatgtgtaaagaaaaaagttga

SEQ ID NO: 37875 - DNA, 894 bp, Streptococcus pneumoniae
atgatgaggataaaacaaatgactgaaaatcgttatgaactaaataaaaacttggcacagatgctcaagggtggtgttattatggatgtgcagaatcctgaacaggctcgtatcgcagaagctgctggtgcggcagctgtgatggccttggaacgaattccggctgatattcgtgcagctggaggagtttcccgcatgagcgacccaaagatgattaaggaaatccaagaagcggttagtattccagtaatggctaaggtcagaatcgggcattttgttgaagctcagattttagaggctattgaaattgattatatcgacgagagtgaagttctatctccagctgatgaccgtttccatgtggacaagaaagaattccaagttccttttgtctgtggtgctaaggatttgggtgaagccttgcgtcgtatcgctgaaggtgcttccatgattcgtactaaaggagaaccagggacaggggatatagtccaagctgttcgtcatatgcgtatgatgaatcaggaaattcgccgcattcaaaacttacgtgaggacgagctttatgttgctgccaaggatttgcaagtccctgtagaattggtccaatatgttcatgaacatggaaaattgccagttgtaaatttcgctgctggaggtgttgcaacgccagcagatgctgcgttaatgatgcaattaggggcagagggggtctttgtcggttcaggtattttcaagtcaggagatcctgttaaacgagcgagtgccattgttaaggctgtgactaacttccgtaatcctcaaatcctagctcaaatctctgaagatttaggagaagccatggttggtattaatgaaaatgaaatccaaattctcatggctgaacgaggaaaatag

SEQ ID NO: 37876 - DNA, 2037 bp, Streptococcus pneumoniae
atgacaaaaaacttattagtagaactcggtcttgaagaattaccagcctatgttgtcacaccaagtgaaaaacaactaggcgaaaaaatggcagccttcctcaaggaaaaccgcctgtcttttgaagccattcaaaccttctcaacaccacgtcgtttggctgttcgtgtgactggtttatcagacaaacagtctgatttgacagaagatttcaagggaccagcaaagaaaattgccttggatagtgatggaaacttcaccaaagcagctcaaggatttgtccgtggaaaaggcttgactgttgaagatatcgaattccgtgaaatcaagggtgaagaatatgtctatgtcactaaggaagaagttggtcaagcagttgaagccattgttcctggtgttgtagatgtcttgaagtcattgactttccctgtcagcatgcactgggctggaaatagctttgaatacatccgccctgttcacactttaactgttctcttggatgagcaagagtttgacttggatttccttgatatcaagggaggtcgtgtgagccgtggccatcgtttcttggggaaagaaaccaaaattcagtcagcattgagctatgaagaagaccttcgtaagcagtttgtaatcgcagatccatgtgaacgtgagcaaatgattgttgaccaaatcaagaaaattgaggcaaaacatggtgtacgtatcgaaattgatgcggatttgctgaatgaagtcttgaatttggttgaatacccaactgccttcatgggaagttttgatgctaaataccttgaagttccagaagaagtcttggtgacttctatgaaggaacaccagcgttactttgttgttcgtgatcaagatggaaaactcttgccaaacttcatttctgttcgtaacggaaacgcagagcgtttgaaaaatgtcatcaaaggaaatgaaaaagtcttggtagcccgcttggaagacggagaattcttctggcgtgaagaccaaaaattggtgatttcagatcttgttgaaaaattaaacaatgtcaccttccatgagaagattggttcccttcgtgaacacatgattcgtacgggtcaaatcactgtacttttggcagaaaaagctggtttgtcagtggatgaaacagttgaccttgctcgtgcagcagccatttacaagtttgacttgttgacaggtatggttggtgaatttgacgaactccaaggaattatgggtgaaaaatacacccttcttgctggtgaaactccagcggtggcagctgctattcgtgaacactacatgcctacatcagctgaaggagaacttccagagagcaaggtcggtgcagttctagccattgcagacaaattggatacgattttgagtttcttctcagtaggattgattccatcaggttctaatgacccttatgcccttcgtcgtgcaactcaaggtgtggttcgtatcttggatgcctttggttggcacattgctatggatgagctgattgatagcctttatgcattgaaatttgacagtttgacttatgaaaataaagcagaggttatggactttatcaaggctcgtgttgataagatgatgggctctactccaaaagatatcaaggaagcagttcttgcaggttcaaactttgttgtggcagatatgttggaagcagcaagtgctctcgtagaagtaagcaaggaagaagattttaaaccatctgttgaatcactttctcgtgcctttaacctggctgagaaggcagaaggggttgccacagttgattcagcactatttgagaatgaccaagaaaaagctttggcagaagcagtagaaacactcgttttatcaggacctgcaagtcagcaattgaaacaactctttgcgcttagcccagtcattgatgctttctttgaaaatactatggtaatggctgaagatcaggctgtccgtcaaaatcgtttggcaatcttgtcacaactaaccaagaaagcagctaagtttgcttgttttaaccaaattaacactaaataa

SEQ ID NO: 37877 - DNA, 918 bp, Streptococcus pneumoniae
atgtctaagaaattgactttccaggaaatcatccttactttgcaacaattttggaatgaccaaggttgtatgcttatgcaggcttatgataatgaaaaaggtgcgggaacaatgagtccttacactttccttcgtgctatcggacctgagccatggaatgcagcttatgtagagccatcacgtcgtcctgctgacggtcgttatggggaaaaccctaaccgtctctaccaacaccaccaattccaggtggtcatgaagccttctccatcaaatatccaagaactttaccttgagtctttggaaaaattgggaatcaatcctttggagcacgatattcgttttgttgaggacaactgggaaaacccatcaactggttcagctggtcttggttgggaagtttggcttgacggaatggaaatcactcagttcacttatttccaacaagtcggtggattggcaactggccctgtgactgcggaagttacctatggtttggagcgcttggcttcttacattcaagaagtagactctatctatgatatcgagtgggctgatggtgtaaaatacggagaaatctttatccagcctgagtatgagcactcaaaatattcatttgaaatttcggaccaagaaatgttgcttgaaaactttgataagtttgaaaaagaagctggtcgtgcattagaagaaggcttggtacaccctgcctatgactatgttctcaaatgttcacatacctttaatctgcttgacgcgcgtggtgccgtatctgtaacagagcgtgcaggctatatcgctcgtatccgtaacttggcccgtgttgtagccaaaacctttgttgcagaacgcaaacgcctaggttacccacttttggatgaagaaacacgagttaaacttttagcagaagacgcagaatag

SEQ ID NO: 37878 - DNA, 843 bp, Streptococcus pneumoniae
atgaatacctatcaattaaataatggagtagaaattccagtattgggatttggaacttttaaggctaaggatggagaagaagcctatcgtgcagtgttagaagccttgaaggctggttatcgtcatattgatacggcggcgatttatcagaatgaagaaagtgttggtcaagcaatcaaagatagcggagttccacgtgaagaaatgttcgtaactaccaagctttggaatagtcagcaaacctatgagcaaactcgtcaagctttggaaaaatctatagaaaaactgggcttggattatttggatttgtatttgattcattggccgaacccaaaaccgctcagagaaaatgacgcatggaaaactcgcaatgcggaagtttggagagcgatggaagacctctatcaagaagggaaaatccgtgctatcggcgttagcaattttcttccccatcatttggatgccttgcttgaaactgcaactatcgttcctgcggtcaatcaagttcgcttggcgccaggtgtgtatcaagatcaagtcgtagcttactgtcgtgaaaagggaattttattggaagcttgggggccttttggacaaggagaactgtttgatagcaagcaagtccaagaaatagcagcaaatcacggaaaatcggttgctcagatagccttggcctggagcttggcagaaggatttttaccacttccaaaatctgtcacaacctctcgtattcaagctaatcttgattgctttggaattgaactgagtcatgaggagagagaaaccttaaaaacgattgctgttcaatcgggtgctccacgagttgatgatgtggatttctag

SEQ ID NO: 37879 - DNA, 1062 bp, Streptococcus pneumoniae
ttgaaattttctcctctctgttggatagtcccgtctatctatgttataatgaaagaaggatttaaaatcggaaaaggagtatttatgctaaaattaggtgtcatcggaactggcgctatcagccatcatttcatagaagcagcccataccagtggagaataccaactggtcgcaatctattctagaaaactagaaactgcagcaacctttgcttctcgctatcagaatatccaactattcgatcaattagaagtcttcttcaaatcttcttttgatttagtctatatcgccagtccaaactccttacattttgctcaggcaaaagctgccttgtctgctggtaaacatgttattctcgaaaagccagctgtctctcaaccacaagaatggtttgatttgattcaaacagctgaaaaaaataactgttttatctttgaagcagctcgtaattaccacgagaaagcctttactactatcaaaaactttttagcagataagcaagtgttaggagcagatttcaactatgccaaatactcttccaagatgcctgacttgttggctggacaaacaccaaatgtcttttcagaccgttttgctggtggagccctcatggatttggggatttatcccctctatgctgctgttcgtctttttggaaaagccaatgacgcgacttaccatgctcaacagcttgacaatagcattgacctaaatggagatggtatcctcttctacccagactatcaagttcacatcaaggctggaaaaaacatcacttccaatcttccttgcgagatttatacaacagatggaaccttgactctcaacacgattgagcatattcgctcagctatttttaccgaccaccaaggaaatcaagtccagcttcctatccaacaggctcctcatacgatgactgaggaagtcgctgcatttgcacacatgatccagcaaccagatctgaatctctaccaaacttggctgtatgatgcaggctctgttcatgagctactatataccatgcgccagactgctggcattagatttgaggcagaaaaatga

SEQ ID NO: 37880 - DNA, 489 bp, Streptococcus pneumoniae
atggaacagtgctacacagatgtgactgaatttgccattccagtaagtactcaaaagctttacttatcaccagttttagatggctttaatagcgaaattatcgcctataatctttcaacttcacccaacttagaacaagtacaaacaatgttggaacaggcattcacagagaagcactacgagaatacgattctccatagtgaccaaggctggcaatatcaacacgattcttatcatcggttcctagagagtaagggaattcaagcatctatgtcacgcaagggaaacagccaagacaacggtatgatggaatctttctttggcattttaaaatccgaaatgttttatggctatgagaaaacatttaaatcacttaaccaattggaacaagccattatagactatattgattattacaacaataagaaaattaagataaaactaaaaggacttagccctgtgcaatacagaactaaatccttcggataa

SEQ ID NO: 37881 - DNA, 1197 bp, Streptococcus pneumoniae
atggcaaaagaaaaatacgatcgtagtaaaccacacgttaacattggtactatcggacacgttgaccacggtaaaactaccctaactgcagctatcacaactgttttggcacgtcgcttgccttcatcagttaaccaacctaaagactatgcgtctatcgatgctgctccagaagaacgcgaacgcggtatcactatcaacactgcgcacgttgagtacgaaactgaaaaacgtcactacgctcacatcgacgctccaggacacgcggactacgttaaaaacatgatcactggtgctgctcaaatggacggagctatccttgtagtagcttcaactgacggaccaatgccacaaactcgtgagcacatccttctttcacgtcaggttggtgttaaacaccttatcgtcttcatgaacaaagttgacttggttgacgacgaagaattgcttgaattggttgaaatggaaatccgtgacctattgtcagaatacgacttcccaggtgacgatcttccagttatccaaggttcagcacttaaagctcttgaaggtgactctaaatacgaagacatcgttatggaattgatgaacacagttgatgagtatatcccagaaccagaacgtgacactgacaaaccattgcttcttccagtcgaggacgtattctcaatcactggacgtggtacagttgcttcaggacgtatcgaccgtggtatcgttaaagtcaacgacgaaatcgaaatcgttggtatcaaagaagaaactcaaaaagcagttgttactggtgttgaaatgttccgtaaacaacttgacgaaggtcttgctggagataacgtaggtgtccttcttcgtggtgttcaacgtgatgaaatcgaacgtggacaagttatcgctaaaccaggttcaatcaacccacacactaaattcaaaggtgaagtctacatccttactaaagaagaaggtggacgtcacactccattcttcaacaactaccgtccacaattctacttccgtactactgacgttacaggttcaatcgaacttccagcaggtactgaaatggtaatgcctggtgataacgtgacaatcgacgttgagttgattcacccaatcgccgtagaacaaggtactacattctctatccgtgagggtggacgtactgttggttcaggtatggttacagaaatcgaagcttaa

SEQ ID NO: 37882 - DNA, 1719 bp, Streptococcus pneumoniae
atgtcttaccaagaaaattaccagaaatgggttgattttgtggagcttcctgactaccttcgtcaagatttggaaaatatggacgaaaaaactaaggaagatgccttctatacaaatcttgaatttggtactgcaggtatgcgtggcttggttggtgctggtacaaaccgtatcaacatctacgttgttcgccaagctactgaaggattggctcgtttgattgagtcaaaaggtggaaacgagaaagaacgcggtgtagcaattgcctacgatagccgtcacttctcacctgagtttgcctttgaatctgcggcagttcttgctaaacacggcatcaaatcttacgtatttgaaagccttcgtccgactccagaactatcatttgcagttcgtcatctcaactgtttcgcaggtatcatggtcacagccagccacaaccctgctccatttaacggttacaaggtttacggtgaagacggtggacaaatgcctccacacgatgcggacgctttgactacttatatccgtgcaatcgaaaacccatttgcagttgaagttgctgatgtggaaactgaaaaagcttctggcttgattgaagttatcggcgaagctgttgacatagaataccttaaagaggttaaggacataaacatcaacccagccttgattgaagaatttggtaaagacatgaagattgtctacacaccacttcatggtactggtgaaatgttggctcgtcgtgctcttgcccaagcaggatttgactctgttcaagttgttgaagcgcaagcaactgctgacccagacttttcaactgtaacatctccaaacccagaaagccaagcagcctttgcccttgctgaagaacttggtcgtcaagttggtgcagatgttcttgtcgcaactgacccagacgctgaccgtgttggtgttgaagttcttcaaaaagatggtagctacctcaacctttcaggtaaccaaatcggtgctatcatggctaaatacatcttggaagctcacaaaaacgctggaactcttcctgaaaatgccgctctctgcaaatctatcgtttcaactgacttggtaacgaagattgctgaaagctacggcgcaactatgttcaacgtcttgacaggtttcaaatttatcgctgaaaaaatccaagaattcgaagaaaaacacaaccacacttacatgatgggatttgaagaaagcttcggttacttgattaaaccatttgtacgtgataaagatgccatccaagccgttcttgtagttgctgaacttgctgcctactaccgttctcgtggtttgacacttgctgacggtatcgaagaaatctataaagaatatggctactacgcagaaaaaacaatctctgttactctttcaggtgtcgatggtgctgaacaaatcaaagcgattatggctaaattccgcaacaatgctccaacagaatggaacgcaacagctatcactgtcgtagaagacttcaaggcacaaactgctactgttgctgacggtactgttacaaacttgacaactcctccaagtgatgtgttgaaatacacacttgctgacggttcatggattgccgttcgcccttcaggtacagaaccaaaaatcaagttctacattgcagttgtaggggaaaccaacgaagaatcacaagctaagattgctaacatcgaagcagaaatcaatgcatttgtaaaataa

SEQ ID NO: 37883 - DNA, 837 bp, Streptococcus pneumoniae
atgaaaaaatggatgcttgtattagtcagtctgatgactgctttgttcttagtagcttgtgggaaaaattctagcgaaactagtggagataattggtcaaagtaccagtctaacaagtctattactattggatttgatagtacttttgttccaatgggatttgctcagaaagatggttcttatgcaggatttgatattgatttagctacagctgtttttgaaaaatacggaatcacggtaaattggcaaccgattgattgggatttgaaagaagctgaattgacaaaaggaacgattgatctgatttggaatggctattccgctacagacgaacgccgtgaaaaggtggctttcagtaactcatatatgaagaatgagcaggtattggttacgaagaaatcatctggtatcacgactgcaaaggatatgactggaaagacattaggagctcaagctggttcatctggttatgcggactttgaagcaaatccagaaattttgaagaatattgtcgctaataaggaagcgaatcaataccaaacctttaatgaagccttgattgatttgaaaaacgatcgaattgatggtctattgattgaccgtgtctatgcaaactattatttagaagcagaaggtgttttaaacgattataatgtctttacagttggactagaaacagaagcttttgcggttggagcccgtaaggaagatacaaacttggttaagaagataaatgaagctttttctagtctttacaaggacggcaagttccaagaaatcagccaaaaatggtttggagaagatgtagcaaccaaagaagtaaaagaaggacagtaa

SEQ ID NO: 37884 - DNA, 1506 bp, Streptococcus pneumoniae
ttggcaattaacgcacaagaaatcagcgctttaattaagcaacaaattgaaaatttcaaacccaattttgatgtgactgaaacaggtgttgtaacctatatcggggacggtatcgcgcgtgctcacggccttgaaaatgtcatgagtggagagttgttgaattttgaaaacggctcttatggtatggctcaaaacttggagtcaacagacgttggtattatcatcctaggtgactttacagatatccgtgaaggcgatacaatccgccgtacagggaaaatcatggaagtccctgtaggtgaaagtctgattggtcgtgttgtggatccgcttggtcgtccagttgacggtcttggagaaatccacactgataaaactcgtccagtagaagcaccagctcctggtgttatgcaacgtaagtctgtttcagaaccattgcaaactggtttgaaagctattgacgcccttgtaccgattggtcgtggtcaacgtgagttgattatcggtgaccgtcagacagggaaaacaaccattgcgattgatacaatcttgaaccaaaaagatcaagatatgatctgtatctacgtcgcgattggacaaaaagaatcaacagttcgtacgcaagtagaaacacttcgtcagtacggtgccttggactacacaatcgttgtgacagcctctgcttcacaaccatctccattgctcttcctagctccttatgctggggttgctatggcggaagaatttatgtatcaaggtaagcatgttttgattgtatacgatgatctatcaaaacaagcggtagcttatcgtgaactgtcgctcttgcttcgtcgtcctccaggtcgtgaagccttcccaggggatgttttctatctccacagccgtttgcttgagcgctcagctaaagtttctgatgaacttggtggtggatcaattacagccctaccatttatcgagacacaagcaggagatatctcagcctatatcgcaaccaacgtgatttctatcactgatggacaaatcttccttggcgatggcctcttcaatgcaggtattcgtccagccatcgatgcgggttcatctgtatctcgtgtaggtggttctgcacaaatcaaagccatgaagaaggttgctggtacacttcgtatcgaccttgcttcataccgtgagttggaagcctttactaagtttggttctgacttggacgcagcaacacaggctaagttgaaccgtggacgtcgtaccgttgaggtcttgaaacaacctgttcacaaaccattacctgttgagaaacaagtaaccattctttatgctttgacacatggtttcttggatactgttccagtagatgatattgttcgtttcgaggaagagttccatgccttctttgatgctcaacatccagagattttggaaaccattcgtgatacaaaagacttgccagaagaagcagtcttggatgctgcgattacagagtttctcaatcaatctagcttccaataa

SEQ ID NO: 37885 - DNA, 537 bp, Streptococcus pneumoniae
atggacaagaaaacagtaaaggtaattgaaaaatacagcatgccttttgtccaattggtacttgaaaaaggagaagaagaccgtatcttttcagacttgactcaaatcaagcaagttgttgaaaaaacaggtctgccttcttttttaaaacaagtggcagtagacgagtcggataaggaaaaaacaattgcttttttccaagattctgtgtcacctttattacaaaactttatccaggttctggcctacaatcacagagcaaatcttttttatgatgtgcttgtagattgcttgaaccgacttgaaaaagaaacaaatcgatttgaagtgacgattacgtctgctcatcctctaactgatgaacagaagactcgtttgctccctttgattgagaaaaaaatgtctctgaaagtaaggagtgtaaaagaacaaatcgatgaaagtctcattggtggttttgtcatttttgccaatcacaagacaattgatgtgagtattaaacaacaacttaaagttgttaaagaaaatttgaaatag

SEQ ID NO: 37886 - DNA, 495 bp, Streptococcus pneumoniae
atgcacgtaacagtaggtgaattaattggtaattttattttaatcactggctcttttattcttttgctagtcttgattaaaaaatttgcatggtctaatattacaggcattttcgaagaaagagctgaaaaaattgcttcagatattgacagagctgaagaagcccgtcaaaaagcagaagtattggctcaaaaacgcgaagatgaattggctggtagccgtaaagaagctaagacaatcattgaaaatgcaaaggaaacagctgagcaaagtaaggctaatatcttagcagatgctaaactagaagcgggacacttaaaagaaaaagccaatcaagaaattgctcaaaataaagtagaagctttacagagtgttaagggtgaggtcgcagatttgaccatcagcttagctggtaaaatcatctcacaaaaccttgacagtcatgcccataaagcactcattgatcagtatatcgatcagctaggagaagcttaa

SEQ ID NO: 37887 - DNA, 717 bp, Streptococcus pneumoniae
atggaagaaagtattaatccaatcatctctattggtcctgttatcttcaatctgactatgttagccatgactttgttgattgtgggagttatttttgtctttatttattgggcaagccgcaatatgaccttgaaacccaaaggaaagcaaaatgtacttgagtatgtctatgactttgttattggatttacagaacctaacattggttcgcgctacatgaaagattactcactctttttcctttgtttattccttttcatggtgattgccaataaccttggcttaatgacaaagcttcaaacgatcgatgggactaactggtggagttcgccaaccgctaatttacagtatgacttaaccttatcttttcttgtcattttgttgacacatatagaaagcgttcgtcgtcgtggatttaaaaaaagtataaaatcttttatgagtcctgtttttgtcataccgatgaatatcttggaagaatttacaaacttcttatctttggctttgcggatttttgggaatatctttgcaggagaggtcatgacgagtttgttacttcttctttcccaccaagctatttattggtatccagtagcctttggagctaatttggcttggactgcattttctgtctttatttcctgcatccaagcttatgtttttactcttttgacatctgtgtatttagggaataagattaatattgaagaggaatag

SEQ ID NO: 37888 - DNA, 201 bp, Streptococcus pneumoniae
atgaatttaacatttttaggcttatgtattgcctgtatgggcgtatctgtcggtgaaggtttattgatgaatggactgtttaaatcagtagcacgccaaccagatatgctttctgagtttcgtagtttgatgtttttaggtgttgcctttattgaaggaactttctttgtaactcttgtcttctcatttattatcaaataa

SEQ ID NO: 37889 - DNA, 1335 bp, Streptococcus pneumoniae
atgtcaaagacatatcattttatcggaattaagggatcagggatgagtgccttggccttgatgttgcaccagatggggcacaaggttcagggatcagatgttgaaaagtactactttacccaacgcggtcttgagcaggcaggaattaccattcttccttttgatgaaaagaatctagacggtgatatggaaattatcgctggaaatgcctttcgtccagataacaacgtcgaaattgcctatgcggaccaaaatggtatcagctacaaacgttaccatgagtttctaggtagctttatgcgtgactttgttagcatgggagtagcaggagcacatggaaaaacttcaacgacaggtatgttgtctcatgtcttgtctcacattacagataccagtttcttgattggagatgggacaggtcgtggttcggctaatgccaaatattttgtctttgaatctgacgaatatgagcgtcacttcatgccttaccacccagaatactctattatcaccaacattgactttgaccatccagattatttcacaagtctcgaggatgtttttaatgcctttaacgactatgccaaacaaattaccaagggtctttttgtctatggtgaagatgctgaattgcgtaagattacgtctgatgcaccaatttattattatggttttgaagctgaaggcaatgactttgtagctagtgatcttcttcgttcaacaactggttcaaccttcaccgttcatttccgtggacaaaacttggggcaattccacattccaacctttggtcgtcacaatatcatgaatgcgacagccgttattggtcttctttacacagcaggatttgatttgaacttggtgcgtgagcacttgaaaacatttgccggtgttaaacgtcgtttcactgagaaaattgtcaatgatacagtgattattgatgactttgcccatcatccaacagaaattattgcgaccttggatgcggctcgtcagaaatacccaagcaaggaaattgtagcagtctttcaaccgcatacctttacaagaaccattgccttgttggacgactttgcccatgctttaaaccaagcagatgctgtttatctagcgcaaatttatggctcggctcgtgaagtagatcatggtgacgttaaggtagaagacctagccaacaaaatcaacaaaaaacaccaagtgattactgttgaaaatgtttctccactcctagaccatgacaatgctgtttacgtctttatgggagcaggagacatccaaacctatgaatactcatttgagcgtctcttgtctaacttgacaagcaatgttcaatag

SEQ ID NO: 37890 - DNA, 1095 bp, Streptococcus pneumoniae
atgagcaaggaattacacattaacacaattttggcccaggcgggtattaagtcagatgaagcgacaggtgcattggtgacaccgcttcatttttcaacgacctatcagcatccagagtttggtcgatctactgggtttgactatacgcgaactaaaaatccaactcgtagtaaggctgaggaagtcttggcggctattgagtcagcagactatgccctagcgactagctcagggatgtcagctattgtactggcctttagcgtctttccagtaggaagtaaggtcttggcagtgcgtgatctttacggtggttcttttcgctggtttaaccaagtggagcaggaaggtcgtttccattttacctatgccaatacagaagaagagttgattgccgagttagaaaaggatgtggatgttctctatatcgaaaccccaaccaatcccttgatgttggaatttgatatcgaaaaactagcaaaattggctcatgctaagggtgccaaagtggtggtggacaataccttctatagccctatctaccaacgtccgattgaagatggagcagatatcgttctccattcagcaaccaagtatctagcaggccacaatgatgtcttggctggagtggttgtgaccaatagtttagaactatacgagaagcttttttacaatctcaatacaacaggggcagtcttgtctccatttgacagctaccagttgcttcgtggtctcaagaccttgtctcttcgtatggagcgctcaacagctaacgcccaagaagtggttgcctttttgaaggattctccagcagttaaggaagttctctacactggtcgtggaggcatgatttcctttaaagtagccgatgaaacacgcattcctcatattttgaacagtctcaaggtcttctcttttgcggaaagtttgggtggagtggaaagtcttattacttatccaacgactcaaactcatgctgatattccagcagaagtacgccattcttatggtttgacagatgacctcttgcgtttgtctattgggattgaggatgctagagatttgattgcagatttgcgccaagccttagaaggataa

SEQ ID NO: 37891 - DNA, 1623 bp, Streptococcus pneumoniae
atgtcgcacgaaaacaatcaccagcaggcccagatgttacgggggactgcttggctaacggctagtaactttatcagtcgcctactcggggctgtttacattatcccttggtacatctggatgggggcttatgcagctaaggcaaatggtctctttaccatgggttacaatatctatgcttggttcttgttggtttcaacagcggggattccagttgcggtggccaagcaagttgccaagtataataccatgcgagaagaagagcatagctttgccctgattcggagcttcttaggctttatgacaggactaggcctggtttttgctttagtcttgtatgtctttgctccttggctagcagacttgtctggcgtgggcaaagacttgatcccaatcatgcaaagcttggcttggggagtcttgattttcccgtctatgagtgttatccgaggatttttccaagggatgaataacctcaaaccctatgctatgagccaaattgctgagcaggtcattcgtgttatctggatgctcctagcaacctttatcattatgaagctcggttcaggagattatctagcagccgttacccaatcaacctttgctgcctttgtcggtatggtagccagttttgcagtcttgatttatttccttgcccaagaaggttcactcaaaagagtctttgaaacaggagataagattaacagtaagcgtctcttggttgataccattaaggaagccattccttttatcctgacagggtctgccatccagctcttccagattttggatcagctgacctttatcaatagtatgagctggtttaccaactacagcaatgaggacttggttgtcatgttttcttatttctcagccaatcctaataaaatcacgatgattttgatttctgtaggggtttcgattgggagtgttggtttgccacttttgacggaaaactatgtcaagggggacttgaaagcagcttctcgtctcgttcaggacagtctcaccctactctttatgttcttgctaccagcaacggttggagtggttatggtaggagaacctctttatacggtcttctatggtaagccagatagtttggctctgggcttatttgtctttgcagttttgcagtctattattttaggcttgtacatggtcttgtctccaatgcttcaggccatgttccgcaaccgcaaggccgttctctattttatctatggttctattgccaagctagtcttgcaactacctaccatcgccctcttccacagttatggtcctttgatttcaacaaccattgctctcatcattcctaacgtcttgatgtatcgggatatttgtaaagtaactggtgtcaagcgcaaggtgattttgaagcgaaccattttaatcagtttgctgaccctagtcatgtttctgttaataggaaccatccagtggctgttaggatttttcttccaaccaagtggacgtttgtggagcttcttttatgtagctcttgtcggtgccatggggggtggactttatatggttatgagtctgcgtacctatttattagataaggtaataggaaaagcccaagcagatcgcctgcgagcaaaatttaagctttcgtaa

SEQ ID NO: 37892 - DNA, 1446 bp, Streptococcus pneumoniae
atgattaagattgaaaccgtattagatattttaaagaaagatggcctttttcgcgaaattattgaccaaggtcattaccactacaactacagcaaagttatttttgatagcatcagctacgacagccgaaaagtaacagaagacactcttttttttgcaaaaggcgctgcctttaaaaaagaataccttctttctgctataacacaaggtttagcttggtatgtagctgaaaaggactacgaagtcgatatccctgtcatcattgtgaacgatataaagaaagccatgagtttgattgccatggagttctatggtaatccacaagagaaactcaaactccttgcctttactggtactaagggtaagacaacagcaacctatttcgcctataacatcttatctcaagggcatagacctgctatgttgtcgaccatgaacacaactcttgatggcgagactttctttaagtcagcgttgacaacccctgagagtattgacctctttgacatgatgaatcaggctgtgcaaaatgaccgtacccacctcatcatggaagtctccagtcaagcctatctagtccatcgagtctatggactgacctttgatgtaggagtctttcttaacatcactcctgaccatatcggcccgattgaacaccctagctttgaagactatttctaccacaagcgtctcttgatggaaaatagccgagcagtcatcattaacagtgacatggaccacttctcagtcttgaaagaacaggttgaagatcaagaccatgatttctatggtagccaatttgataaccaaatcgagaattccaaagcctttagcttttcagctacgggtaaactcgctggagattatgatatccaactcattggcaacttcaaccaagaaaatgcagttgctgctggacttgcttgtctccgtctcggagcaagtcttgaggacatcaaaaaaggcatcgctgcaacccgcgttcctggtcgtatggaagtcctcactcagaaaaatggagccaaggtcttcatcgactatgcccacaatggggatagtctgaaaaaactcatcaatgtggttgaaactcatcaaaccggaaagattgctctggttctgggatcaacaggaaacaagggagaaagtcgtcgtaaggactttggcctcctcctcaatcaacaccctgagattcaagtctttctgactgctgatgaccctaactatgaagacccaatggccattgcagatgaaattagtagctacatcaatcatcctgttgaaaagattgcggatcgccaagaagccatcaaggcggcaatggctatcacaaatcacgaattagatgcagttattattgcgggtaagggagccgattgttaccaaatcatccagggcaagaaagaatcctacccaggagatacagccgtcgcagaaaattatttataa

SEQ ID NO: 37893 - DNA, 195 bp, Streptococcus pneumoniae
atgtcacttgaaaacaaattggaacaagcaacaggcgctgtcaaagaaggttttggtaaagttactggagacagcaagacagaacttgaaggagctgttgaaaaaacagttgctaaggcaaaagacgttgtagaagacgcaaaaggtgctgtagaaggtgccgttgaaggtttgaaaaacgtttttactaaataa

SEQ ID NO: 37894 - DNA, 936 bp, Streptococcus pneumoniae
atgtccaagattctagtatttggtcaccaaaatccagactcagatgccatcgggtcatctgtagcttttgcctaccttgcaaaagaagcttacggtttggatacggaagctgttgcccttggaactccaaatgaagaaacagcctttgtcttgaactattttggtgtggaagcaccacgtgttatcacttctgccaaagcagagggggcagagcaagttatcttgactgaccacaatgaattccaacaatctgtatcagatatcgctgaagtagaagtttacggtgttgtagaccaccaccgtgtggctaactttgaaactgcaagcccactttacatgcgtttggagccagttggatcagcgtcttcaatcgtttaccgtatgttcaaagaacatggtgtagctgtgcctaaagagattgcaggtttgatgctttcaggtttgatttcagatacccttcttttgaaatcaccaacaacacacccaacagataaaatcattgctcctgaattggctgaattggctggtgtaaacttggaagaatatggtttggcaatgttgaaagctggtaccaacttggctagcaaatctgctgaagaattgattgacatcgatgctaagacttttgaactcaacggaaataatgtccgtgttgcccaagtgaacacagttgacatcgctgaagttttggaacgccaagcagaaattgaagctgcaatgcaagctgccaacgaatcaaacggctactctgactttgtcttgatgattacagatatcgtcaactcaaactcagaaatattggctcttggtgccaatatggacaaggtcgaagcggctttcaatttcaaacttgaaaacaatcatgccttccttgctggtgccgtttcacgtaagaaacaagtggtacctcaattaactgaaagctttaatgcgtaa

SEQ ID NO: 37895 - DNA, 240 bp, Streptococcus pneumoniae
atggctcaacaacgtcgtggcggattcaaacgccgtaaaaaagttgattacatcgcagcaaacaaaattgaatatgttgattacaaagatactgagcttcttagccgtttcgtttcagaacgtgggaaaatccttcctcgtcgtgtaacaggaacttcagctaaaaaccaacgtaaagtaacaacagctatcaaacgcgctcgcgtaatggctttgatgcctttcgtaaacgaagattaa

SEQ ID NO: 37896 - DNA, 471 bp, Streptococcus pneumoniae
atgattaacaatgttgtacttgtagggcgtatgacacgtgacgctgagttgcgttataccccatcaaatgtagcagttgcgacttttactcttgcagtaaaccgtacatttaagagtcaaaatggtgaacgtgaggctgattttatcaatgtcgttatgtggcgccaacaggctgaaaatcttgctaactgggctaaaaaaggctcacttatcggggtgacaggtcgtatccagactcgtagttacgataaccagcaaggacaacgtgtctacgtgacagaggtcgtggctgagaatttccaaatgttggaaagccgtagtgtgcgtgagggtcacacaggtggagcttactctgcaccaactgcaaactattcagcacctacaaattcagtaccagacttttcacgtaatgaaaatccatttggagcaacaaacccattggatatttcagatgatgatttaccattctaa

SEQ ID NO: 37897 - DNA, 291 bp, Streptococcus pneumoniae
atggctaaatacgaaattctttatatcattcgtccaaacattgaagaagaagctaaaaacgctttggtagcacgttttgactctattttgactgacaacggtgcaactgttgttgaatcaaaaacttgggaaaaacgtcgtcttgcatacgaaatccaagatttccgtgaaggactttaccacatcgttaacgttgaagcaaatgacgatgcagctcttaaagagtttgaccgtctttcaaaaatcaacgctgacattcttcgtcacatgatcgtcaaaattgacgcgtaa

SEQ ID NO: 37898 - DNA, 1344 bp, Streptococcus pneumoniae
atgacaaaacgtgtaacgattattgatgtaaaagactatgttggtcaggaagtgacgattggcgcttgggttgccaacaaatcaggaaaagggaaaatcgctttcttacaattgcgtgatggaacagccttctttcaaggtgtggcttttaaaccaaactttgtcgaaaaatttggtgaagaagtgggacttgagaagtttgatgttatcaaacgcttgagccaagaaacgtctgtttatgtgacaggtattgtcaaagaggacgaacgttctaaatttggctatgagttggacatcacagacatcgaagtgatcggtgaatctcaagactacccaatcacaccaaaagaacacggaacagactttttgatggataaccgtcacttgtggctacgctctcgtaagcaagtagctgtgttgcaaatccgtaacgctattatctatgtaacttatgagttctttgacaagaatggttttatgaagtttgacagcccaattctttcaggaaatgcggcagaagattctacagaactctttgaaactgactacttcggaacgccagcctacttgagccaatcaggtcagctttacctagaagcaggggctatggctcttggtcgtgtctttgactttggtccagttttccgtgctgaaaaatcaaaaacacgccgtcacttgactgagttctggatgatggatgctgagtactcatacttgacacatgatgagtcgcttgacttgcaagaagcttatgtgaaagctcttctacaaggtgttcttgaccgcgcgcctcaagccttggaaaccttggaacgtgatacagaactcttgaaacgctacattgcagagccattcaaacgtatcacttacgatcaagccattgacctcttgcaagagcatgaaaatgatgaagatgctgactacgagcatcttgagcatggtgatgactttgggtcaccacacgaaacttggatttcaaaccactttggtgtgccaacatttgtcatgaactatccagcagccatcaaggccttctacatgaaaccagttcctggaaatccagagcgcgtgctttgtgcagacttgcttgctccagaaggctatggagaaattatcggtgggtctatgcgtgaggaagattacgatgcccttgtcgctaagatggatgaacttggcatggatcgtacagaatatgaattctaccttgaccttcgtaaatacggtacagttccacacggaggatttggtatcggtatcgaacgtatggtaaccttcgcagcaggaacaaaacatatccgtgaagctattccattcccacgtatgttgcaccgtatcaaaccataa

SEQ ID NO: 37899 - DNA, 7656 bp, Streptococcus pneumoniae
atgaaacattcacataaaaaatcatttgactggtatagcatgcaacaacgttattctattcgtaagtattactttggtgcagctagtgtcttgctcggtaccgctttggtattaggtgcagcagctagtgtccaaacagtacaagcggaagaaaacaaacaagaaactaccaatagtatttctgttggtaggggagaagcagctactaaaccagcagaggtttctgcgtctaataaagagaaaacctatgcagctccaactgtagctaatccagtagaaacgactccagttaaaactgaagaagttactaaaccagcagaaaaagttgaagaagcaaaagacaaaaaagaggaagtaacgcatcaagatgccgttgacaagtcaaaattattaacggctctttcgcgtgctaaaaaattagaaagcaagttatatacagaagcaagtgctgctaacttgcaaacaagtatccaagctggtcaaagcttgcttggaaaagcagatgcaactgaagctgaattatcagcagcagagtcatctattcaatcatttattattggtctagaacttcgttctaactctaataaagaaactgtatcagaaacgcctgtagcgaagaaagctgatgcagttgaatcaaaagaaggggctaaaccagctgcaacaactgaacgttcagctgttgatagcgctattttgccaactagcacagctgacaaagtagaaacaacttcagctccagcatctattaatgaaatcttgaaactaggtttgagcctttctgatgctcgccaaaatccagctatccgtaaggaagatgttaatagagggtatagtggttttagagcggctagcaatccagccaacccaattgtctcaggttctggaaatacagttgcatttgcagatattagccaaggtggtcgtagctatagtttccgtggctacgggaactcacgtggtggaaattctattcattacgatgtaacaacagtacgtagtggtaatagtgttaactttacaattagttattctgcgccaggagattctagagagtttgttaataataattttatcttggataaaggggatggatttggaaatccttcaaatgcaacgatcacaagttcaaatccaagagtaagggagcaatcaaaatctattagtcagggtgccaactacgtatctcactcaggatacagtatgacctctgctatttcaacaaatacggaacaaactatcagatttagtttgcctatcattaatctaaatggtgatttgtctgttcgtttgaaacctgttacttttaacgtggaccaaggtggtggtggtgccgctactagcaatgacccatacagtaactctaactattattatagagcaaacccactatacttggatgcaaacccttatggtggtactaataataagactgtttcagaagacattgacttccaaactgtctatcttccaactagtaagttaccagaaggtcaaactagattagttcgagaaggtgaaaaaggacaacgtcaaattacctataaagttcatcgatttggtaacgaaacacttttaggattgccgattagtaatagtgttactaaagaagctaagccacgtattatgcaaattggtgtggctaaagatctaatcgatacagtaaaaccacgtgttgatcaaaataaagtcggtgatacaaataacctcactttctatcttgataacgatggaaacggtgtttatactgaaggtgtagacgaacttgttcaaaaaattgctattaaagatggagctaaaggtgaaaaaggagaccaaggtgaacgcggtctaactggagctaaaggtgaaaaaggagaccgaggcgaacgcggtctaactggagctcaaggagctaaaggtgaaaaaggagaccgaggtgaacgcggtctaactggagctcaaggagctaaaggtgaaaaaggagaccgaggtgaacgcggtctaaccggagctcaaggagctaaaggtgaaaaaggagaccgaggcgaacgcggtctaactggagctcaaggagctaaaggtgaaaaaggagcccaaggtgaacgcggtctaaccggagcacaaggagctaaaggtgaaaaaggggaccaaggtgaacgcggtctaaccggagcacaaggtgccaaaggtgaaaaaggggaccaaggtgaacgcggtctaaccggagcacaaggagctaaaggtgaaaaaggagcccaaggtgaacgcggtctaactggaactcaaggagctaaaggtgaaaaaggagaccgaggcgaacgcggtctgactggagcccaaggagctaaaggtgaaaaaggagaccgaggcgaacgcggtctgactggagcccaaggtgctaaaggtgaaaaaggagcccaaggtgaacgcggtctaaccggagcccaaggtgctaaaggtgaaaaaggggaccaaggcgaacgcggtctaactggagcacaaggtgaaaaaggagaccgaggcgaacgcggtttaactggagctaaaggtgaaaaaggggaccaaggcgaacgtggtatcactggagctaaaggtgaaaaaggagcccaaggtgaacgcggtctaaccggagcccaaggtgctaaaggtgaaaaaggggaccaaggtgaacgcggtctcactggagcccaaggtgaaaaaggagcccaaggtcaggcaggtcgtgacggtgtaactccaaccgtaaccgttaaagataataaaaatgacggcactcatactatcactattaacgacggtagaggtaatgttacaagtactgttgtaagagatggtttcgatggcgcaagtccattagttgcgactcaacgaaatgacgcagataagacaacaactgttatcttctattacgataaaaatggaaacaatgaattagatgcttctgataagaaattaaaagaagttgtaattgcagatggtgctaaaggtgaaaaaggggacaaaggtgaacaaggtcttcaagggcgtgatggtgaacaaggaccaaaaggagaagatgggaaaaccccaacagttaaagtaactgatggtcaagatggaacgcatacaattacaattaacgatggtaaaggtggtataactactacagtagtaagagatggatttgatggtgcaagccctcttgtttctactcatagaaatgaagcagataaaacaacaactgttattttctattatgatctaaatgataataatcaatttgatgaaggagatacaaaacttaaagaagttgttatcgcagatggaaaacaaggaccaaaaggtgacaaaggtgataacggaaaagatggattcacaccagaagtaacagttacagataacaataacggaacacacaccatcacaatcacacaaccagacaacagaccatcattaacaacaatcgttaaaaacggtgaagatggaaaaacaccaaaagtcaaagcagaacgagatgatgcgaagaaacaaacaacattaacattctacattgacaaagatggagatggaagttacacagcaggaaaagacgagttagttcaaacaacagtagttaaagacggacaagacggagctgcaggagcatctggacgtgatggaaaagaagtattaaacggaaaagtagacccaacaacagaaggtaaagatggagacacattcgtaaatacacaaacaggagatgtattcgttaagaaaggtaacacttgggaaccagcaggaaacatcaaaggaccgaaaggtgacaaaggtgcagatggtgccaagggtgaaaaaggagcccaaggagaacgcggcctgactggagcgcaaggtgtcaagggtgaaaagggagatcagggtgaacgcggtctaactggatctaaaggtgaaaaaggagaccaaggtgaacgcggtttaactggagcgcaaggtgccaaaggtgacaaaggtgaacaaggtcttcaaggtcgtgatggagctcaaggaccaaaaggagcagatggacaaagaggaccagcgggaccacaaggaccaaaaggagaacaaggtaatccaggaactccaggtaaagatggaaaatctctaattgctgttaaaaatggtgtattagtaacaattacaccagtagaaggtcgtccacaaacaacatttgtagaggatggacaaaagggtgctgatgggaaaactccaacagtaacaataactgaggggcaaaacggcacacatacattaacggttcataatccaggaagtccagatgtgacaactacgatccgtgatggagctacaggacaagcaggtcgtgatggtaaagatgtattaaacggaaaagtaaatccacaaccaaaccaaggtaaaaatggagataaatatattaatatcgaaaccggtgatgtctatgttaaaaacaatggaaactgggataaagaaggcaacatcaaaggccctaaaggtgacaaaggtgcagatggtgctaaaggcgaaaaaggagaccaaggcgaacgcggcctaactggagcgcaaggagctaaaggtgcggatggcgcagtaggtcgtgatggacgtgacggtaaagacgtgttgaacggcaaagctaacccagaagcacatcaaggtaaagacggcgataaatacgttaatacagaaacaggcgacgtcttcgttaagaataacggcaactgggataaagagggcaacatcaaaggccctaaaggtgacaaaggtgcagatggtgctaaaggcgaaaaaggagaccgaggcgaacgcggcctgactggagcgcaaggagctaaaggtgcggatggagcagcaggtcgtgacggacgtgatggacgtgacggtaaagacgtgttgaacggcaaagttaacccagaagcaaatcaaggtaaagacggcgataaatacgttaatacagaaacaggcgacgtcttcgttaagaataacggcaactgggataaagagggcaacatcaaaggctctaagggtgacaaaggtgaacgcggagaagatggtaagactccagaagtaactgtaactccaggtaaagatggccatagtactgacattacattcactgttccaggtaaagatccagttacagtaaatgttaaggacggagaaaatggtctgaacggtaaaactccaaaagttgatttacttcgtgtccaaggaaaaaacggaaatccatctcatacaattgtgacattctatacagatgaaaacaatgacggcaaatatacaccaggaactgatgaacttctaggttcagaaatgattaaagatggtgctaaaggcgcggacggacgagatggtaaatcattgcttactgtcaaggatggtaaagaaactaaagtttaccaagaagatccagctaacccaggacaaccattaaatccagaaaaaccacttgcggtaattagagatggagtagatggaaaatcacctacagttacagctgttcgtaaagatgaagcagggcataaaggtgtagaaatcactgttgataaccatgatggttcacaaccaactacagtctttgttcaagatggtgctaagggaaaaactggtgcaaccggtcaggatggacaaactcctacaatcactactcaacgtggacaagatggccaaagcactgttgtaactatcacaacatcaggtaaagatccagtaaccttcactgtaaaagatggtaagaatggtaaagatggccgtgcaccgaaaatcaaagtagaagatattacttcaccttcaagaattagacgcgatacagatgctgctgcaactccaacgcgtaacggtatccgtgttacagtttatgatgatgttaatgacaatggggtatacgacgaaggtgtcgataaagtattaaatagtaaagatatttataacggtatagatggacgtgatggttcagctccaactattactacaaaagataatggagatggaactcacactatcacagttcaaaacccagatggttctgaatcaacaacagttgttaaagatggtaaagacggtaaaactgcgaatatcactacaacagaaaacccagatggaagccacacaattacggtgacaaatccagatggttcaactaaagaaactgttgttaaaaacggtaaagacggtaagactcctaaagttgaagtaacggataacaacgatggaactcatactgttaaagttacagatggagacggcaatgttaccaacgctatcatcaaagatggtaaagacggtaaagctgcaacagcaacaactactgaaaatccagatggaagccacacagtaacaatcactaacccagacggaactaagaatgagtttgttgttaagaatggacgtgacggtgttgacggacgtactccaaccgcatctgttcgtgataatggagacggaagtcatacaatcgttattacaaatccagaaggtgtgacaactgaaaccacagttcgtgatggtaaatcaccaaaagtgactataactgatgaacaaaatggaactcataagatctctgttctaaatggtgacggaacaactactgaaacaatcattaaagatggtaaatcaccagtagcaacagttagagataaccaagatggtacttacactattcgtgtggaaaacggtaatggtactgtttctgaaaccacagttcgtgacggtaaatcaccaactgctaaggttgtggataatggagatggaactcacactatcacagttgtgaactcagacggaataactacaacaactacagttcgtgatggtagagaaccaaaacttgaagttattgataacaacgatggttcacacactattaaagtgacaggtgctgatggtaaaggaacgacaactacaatctttgatggtaaatcaccaaaagcgaacatcgttgataacggagatggaactcatacattaacaatcgtagattctgatggtcgtgaatacaaatctattatcaaagatggtaaagacggcaaagatagcgtttcaccaactgtaactgttaaaaataataacgatggaactcacgttgttacaatcactaatccagatggaagtaagacagaaatggtgattaaagacggtaaagatggtaaatcaccaaaagtttctgttgaagataatggtgatggtagtcatacaatcacaatcatcaattctgatggaactgtgacaaaaacagttattaaagatggcaaagatggtagagatggacgtgatggtcgagacggcaaagacggtaaagatggaaaatgtggatgccaagacaaaccagtaacaccatcaaatgacaaaccagttcctccaacaccaaatgtgccgacaccagaagtaccggttaaacctgtgccagcgcaaccaacaccaaatgtaccgacaccagaagtgccagtacaaccaactccagctgtttcaacaccagaagtaccggttaaaccagtaccagcggttccagaacaaccagtagtaccaacaccggctcaaccagcaactccagtaaatgctaacccagtagcaccaactacaggtaaagaaaaccgtggggacaaattacctgaaactggaagccaatctgattatatctctgttcttttaggtagcggtattctattgagcctatatgtaggacgaagaaaagaagattaa

SEQ ID NO: 37900 - DNA, 2697 bp, Streptococcus pneumoniae
atgtcaaaagaacaaaaacgccaagcgttttatactcagagccctgaagaggtcttgcaggctgtggatgcgaccgagcaaggtttgtcatcaagtgaggcggaaaagcgccttgccgaatttgggcacaatgaactcgaagaaggcgagaaacgatcaatcttggtcaaattcatcgagcaatttaaggatttgatgattatcatcctagttgcggcagcaatcttgtcagtcgtgacttctggtggggaagatatcgcagatgccattatcatcctagctgtggttatcatcaacgctgcctttggtgtttaccaagaaggaaaagctgaagaagctattgaagccctcaaatccatgtctagtccagttgcccgcgttcttcgtgatggacacatggcagagattgactctaaagaattggtaccaggcgatatcgttgcccttgaagcaggtgacgtggtaccagcggacctacgtttgatagaagccaactctcttaaaattgaagaagcagccttgacaggtgaatctgtaccagtcgaaaaagacttgtcagtcgatcttgcgacagatgctggcattggtgaccgtgtcaacatggccttccaaaactcaaacgtaacctatggtcgtgggatgggtgttgttgtcaatacaggtatgtatactgaagttggtcatattgctggtatgcttcaagatgcggatgagactgatacaccactcaaacaaaacttgaacaacctttctaaggtcttgacctatgctatcttggtcattgcccttgttacttttgtagtgggtgtcttcattcaagggaaaaatccacttggtgagttgttgacttctgttgcccttgctgttgcagccattccagaaggacttcctgctatcgttaccatcgttctttctcttggtactcaagttttggccaaacgacattccatcgttcgtaagttgccagcagttgaaacacttggttcaactgaaatcatcgcttctgataagactggtacgctgactatgaacaagatgacagtcgaaaaagtcttctacgatgcggttctacatgactcagctgatgatattgaactaggtcttgaaatgccactacttcgttcagttgtcttggccaatgatacgaaaatcgatgtggaaggtaacttgattggtgacccaaccgaaacagcctttatccaatatgccttggacaagggctatgatgtcaaaggtttcttagagaaatatcctcgtgtagctgaattgccatttgactctgaccgtaagctcatgtcaacagttcacccattgccagatagtcgtttccttgtagcagtcaagggtgcgccagaccaactcttaaaacgttgtcttcttcgtgataaggctggggatattgctccgattgatgagaaggttacaaatctcattcatacaaacaattctgaaatggctcatcaagccttgcgtgtccttgcaggtgcttataagattatcgatagtattccagaaaatctcacttctgaagagcttgaaaatgatttaatttttactggtttgattgggatgattgaccctgaacgtcctgaagccgctgaggctgttcgtgtggctaaggaagcgggaatccgtccaattatgattacaggtgaccaccaagacacagcggaagccattgccaaacgtttgggaatcattgacgcaaacgatacagaaggtcacgttttaactggtgctgaactcaatgaactgtcagatgaagaatttgaaaaagttgttggtcaatactctgtttatgcccgtgtgtctccagaacacaaggttcgtatcgtcaaggcttggcaaaaacaaggtaaagtcgttgccatgacaggtgacggtgtcaatgacgcgccagctctgaaaacagccgatattggtatcggtatgggaatcactggtacagaggtttctaagggggcttctgatatgattcttgcagatgataactttgcgactattatcgtcgcagtggaagaaggacgtaaggtcttctcaaacattcaaaagactattcagtacctactttctgctaatactgctgaagtattaaccatcttcctatcaaccttgtttggttgggatgtcttgcagccggttcatcttttgtggatcaacttggtaacggataccttcccagctatcgctcttggtgttgaacctgcggaacctggtgtcatgaatcataaaccacgtggacgcaaggcaagcttcttctcaggtggtgttttgagttctatcatttatcaaggtgtactccaagcagctcttgttatgagtgtttatggccttgcgattgcttacccagttcatgtgggtgacaatcatgctattcatgcagatgccctaacgatggcctttgcaacccttggtttgattcagctcttccatgcctacaatgtcaagtctgtctaccaatccatcttgacagttggcccattcaagtctaagacctttaactggtccatcttggtatcctttatccttctcatggcaacaatcgttgtagaaccgcttgaaggaatcttccacgtaaccaaactagacttgtcacaatggggaattgttatggctggaagcttctcaatgattatcatcgtcgaaatcgttaagtttattcaacgcaaactcggttttgacaagaatgcgatttaa

SEQ ID NO: 37901 - DNA, 1872 bp, Streptococcus pneumoniae
atgagtgattttatcgttgaaaaactaagtaaatccgttggtgacaagaccgtttttagggatatttcctttattatccatgacttagacagaattggtttaatcggtgtcaatgggactggcaagaccacccttttggacgtcctttctggtgtttctggatttgatggggatgtcagtcctttttcagctaaaaatgattaccagattggttacttgactcaggatcctgattttgatgatagaaagacagttttggatacggttctatctagtgaactcaaggaaatccagctcattcgtgagtatgaattgattatgctcgactatagtgaggacaagcaggcgcgtttggaacgtgtcatggcagagatggactctctccaagcttgggaaatcgaaagtcaggtcaagaccgttcttagcaaattgggcattcaagacttatctactcctattggggaattgtcaggtggtctgagaagacgggtacagttggcacaagtcttacttggcaaccacgacctcttgcttttggatgagccgaccaaccatctggatattgcgattattgagtggctgaccctctttttgaaaaattctaagaagaccgtcctttttatcactcacgatcgttatttcttagacgctttgtcaacacggattttcgagttggatcgtgcaggcttgaccgagtaccagggaaattaccaggactatgttcgcctaaaggcggaacaggatgagcgcgacgcggctcttcttcacaaaaaagaacaactctacaaacaagaattggcctggatgcgcagacaaccgcaggcgcgtgcgaccaagcagcaggcccgtatcaatcgattccatgatctgaaaaagaaagtttcaggcagtagtgctgagacagacttgaccatgaactttgaaaccagtcggattgggaagaaagtcatcgagtttcaggctgtttcctttgcctatgaaaacaagcctattttgcaagattttaatctcttggtgcaggccaaagaccgtatcggaatcgttggggacaatggtgttggaaaatcaaccctgctcaacttgattgcaggaagtcttgagccaactaaaggacaagttgtgattggggaaactgttcgcatcgcctatttctctcagcaaattgagggtttggatgaaagcaagagagttatcaattacctgcaggaagtggcagaggaggtcaagaccagtggcggttctacgacttcgattgcagagttgctggagcagttccttttcccacgttcgacgcatggaaccttgattgagaaattgtcagggggtgagaaaaaacgtctttatctcctcaaactgcttttggaaaaaccaaatgttcttcttttagacgagccaaccaatgacctagatattgcaactttgacagtcttagagaatttcttgcaaggttttgcaggtcccgttttaacagtcagtcacgaccgctatttcttggataaggtagcgaccaagattctcgcttttgaggatggcaagattcgtcctttctttggtcattacaccgactatcttgatgaaaaagcttttgaaacagatatggccaatcaagtgcaaaaggtcgaaaaggaaaaagtggtcaaggttcgagaagacaagaaacgcatgacctaccaagaaaagcaggagtgggcaagtattgaaggtgatattgaaaccttggaaaaacgtatcgctgctattgaagaggaaatgcaggctaacggctctgactttggtaagctggctactctccaaaaagaattggatgagaaaaatgaagcactccttgaaaaatacgaacgctatgagtatctcagtgaatttgatagttaa

SEQ ID NO: 37902 - DNA, 1200 bp, Streptococcus pneumoniae
atgagattaacgcaaatgccttctgaatttcagaaggctttaccagtattagaaaaaattaaagaagcaggctttgaggcttattttgttgggggctctgttcgagatgcccttctccatagccctatccacgatgtggatattgcgacgtcttcttatccagaagagaccaagcagatttttccgcgaacagccgatatcggaatcgagcatggaaccgtcttggtcttagatggggatgaggagtatgaggtaacaacctttcggacagaggatgtctatgtggactatcgcagacccagtgcggtttcctttgtacgatcgctagaagaagacctcaaacgccgtgatttcacagtcaacgcctttgccttggatgagacaggagaaatcgttgacttgttccatggtttagaagatttggaaaagcaagtcttgcgagcagttggagtggctagtgagcgtttcaacgaagatgctttacggattatgcgtggtttccgttttcaggctagtcttggttttgcacttgagccagaaacatttaaagctatgaagaccttgacgccgcttttggagaaaatttctgtagagcgtaccttcgtcgagtttgataaactcttgctggctccattttggagaaggggcttggcttccatgattgagagtcaagcttatgactatctccctgatatggcatctagccaggacaagctcaacagactgtttgatttggagactgattttacttttgaatcctctgaacaagcctgggcggctttactatgggctttggagattgaaaatgcgcagtcatttttgaaatcttggaagacctcacgccagtttgccaagcaagttcaggatttgctgattattttggctctgcgtgaaaatggagaattgagcaagcgagattgttatcgctttgacatagatttgcttttacaggctgaaaatcttcgtcaagctcaaggaaaagaagtcaacccacaagccatcacagaaaaataccaaagcttgactatccatgacaagaaagagattcagattaatggcggtattttgatcaaggaatatggctatcagccaggcccagacttgggagagattttaacagagattgagtttgccattgtcgatggagaattggagaataatcgtgaagccatccatgcttacctgagggagaaaaaatga

SEQ ID NO: 37903 - DNA, 768 bp, Streptococcus pneumoniae
atgagtattcgagtaattattgccggttttaagggaaagatgggccaggctgcttgtcagatggtattgactgatccagacttggacttggtggcagttttggatccttttgagtctgagtcagaatggcagggtattcctgttttcaaggataaggctgatttagctggttttgaagcggatgtctgggtagattttactactccagctgttgcctacgaaaatacacgttttgctcttgaaaatggctttgctccagtagttggaacgactggtttcacgagtgaagaaattgcagagctaaaagaattttctcgtgcccaagacttgggtggcctgattgcccctaactttgccttgggtgctgtcttactcatgcaatttgcgacgcaggctgccaaatatttcccaaatgtggagattattgagctccatcatgacaagaaaaaggatgctccgagtggaacagccattaaaacagctgagttgatggcagaggttcgagagtccattcagcaaggcgcagcagatgaggaagagctgattgctggtgctcgtggtgctgactttgatggtatgcgcatccactcagttcgtttgccaggcttggtagctcatcaagaagtcatctttggcaatcagggagaagggttgaccctccgtcatgactcctatgatcgcatctccttcatgacaggagtcaatttgggaattaaagaagttgtcaagcgtcatgagcttgtctatggattagaacacttattatga

SEQ ID NO: 37904 - DNA, 1353 bp, Streptococcus pneumoniae
atgggtaaatattttgggactgatggagtccgtggagaagctaacctagagctaacaccagaattagcctttaaactaggacgttttggaggctatgttcttagtcaacatgaaacggaagcgccgaaagtctttgtaggacgtgacacacgtatttcaggggaaatgctggaatcggccttggtggcaggtctcctttcagtagggattcacgtatacaaacttggtgtccttgcaacaccagcagtagcttacttggttgaaactgaaggagcaagtgccggtgtcatgatttctgctagccacaacccagcccttgataacggaatcaagttctttggcggtgatggcttcaaactagatgatgaaaaagaagcagaaattgaagccttgctagatgctgaggaagacactcttcctcgtccaagtgcagaaggcttaggaattttggtagattatccagaaggcttgcgtaagtatgaaggataccttgtttcaactggaactcctcttgatggaatgaaggttgccttggatacagctaatggagcagcttctaccagtgcccgtcaaatctttgcagaccttggtgcccaattgacggttatcggggaaacaccagacggtcttaacatcaaccttaatgttggttcaacacatccagaagcccttcaagaagtggtcaaagaaagtgggtcagctattggtttggcctttgatggagacagtgaccgcttgattgctgttgatgagaatggtgacatcgtcgatggtgacaagattatgtacatcatcggaaaatacctttctaaaaaaggacaattggctcaaaatacaattgtgacaactgttatgtctaaccttggtttccacaaggccttgaatcgcgaaggtattaacaaggcagttactgcagttggtgaccgctacgttgttgaagaaatgagaaaatcaggttacaaccttggtggtgaacagtctggtcacgttatcttgatggattacaataccacaggtgatggtcaattatcagcagttcaattgactaaaatcatgaaggaaactggtaagagcttatcagagttggcggcagaagtaacgatttatccacaaaaattagttaatatccgagtggaaaacgtcatgaaggaaaaggccatggaagtgccagctatcaaggccatcatcgagaagatggaagaagaaatggcggggaacggccgtatccttgttcgtccaagtggaacagaacccctcttgcgtgttatggcagaagcgcctacaacagaagaagtagactactatgttgataccatcacagatgtagttcgtgctgaaattgggattgactaa

SEQ ID NO: 37905 - DNA, 780 bp, Streptococcus pneumoniae
atgaaaaaaaatagtttatatatcatatcctcactcttttttgcttgtgtcttatttgtctatgctacggcgacgaattttcaaaacagtaccagtgctaggcaggtaaaaacggaaacctatactaatacagtaacaaatgtccctattgacatacgctataatagtgataagtattttattagcggttttgcttcagaagtatcagtggtcttgactggtgcaaatcgcctatcgctagctagtgaaatgcaagaaagtacacgtaaattcaaggttactgctgacctaacagatgccggtgttggaacgattgaagttcctttgagcattgaagatttacccaatgggctgaccgctgtggcgactccgcaaaaaattacagtcaagattggtaagaaggctcagaaggataaggtaaagattgtaccagagattgaccctagtcaaattgatagtcgggtacaaattgaaaatgtcatggtgtcagataaagaagtgtcgattacgagtgaccaagagacattggatagaattgataagattatcgctgtcttgccaactagcgaacgcataacaggtaattacagtggttcagtacctttgcaggcaatcgaccgcaatggtgttgtcttaccggcagttatcactccgtttgatacaataatgaaggtgactacaaaaccagtagcaccaagttcaagcacatcaaattcaagtacaagcagttcatcggagacatcttcgtcaacgaaagcaactagttcaaaaacgaattaa

SEQ ID NO: 37906 - DNA, 969 bp, Streptococcus pneumoniae
atgtctcaactctatgatattaccattgtgggtggtggtcctgtcgggctttttgcagccttttatgcccacctacgccaagccaaggttcaaatcatcgactctcttccccagctaggtggacaacctgctattctctaccctgaaaaggaaatcctagacgtaccaggcttcccaaacctgactggagaagagttgactaaccgcttgattgaacagctaaatggatttgatacccctattcatctcaatgaaacggttcttgagattgacaaacaagaagaagaatttgccatcacaacttccaaaggaagtcacctgactaaaacagttatcatcgctatgggtggcggtgccttcaaaccacgtccgctggaacttgaaggggttgaggactatgaaaatatccactaccacgtttctaacattcagcaatacgctggtaagaaagtgacgattcttggtgggggagactcggctgtggattgggctttggcttttgaaaaaatcgcaccaactacccttgttcaccgcagagataatttccgtgccttggaacacagtgttcaagccttgcaagaatcatctgtaaccatcaagacaccattcgcccctagccaactccttggagatggaaaaacgcttgataaacttgaaatcacaaaagtcaaatctgatgaaactgaaaccattgacctagaccacctctttgtcaactatggtttcaaatcttctgtcggtaaccttaaaaactgggggctcgacctcaaccgtcacaagattatcgtcaacagcaaacaagaatccagccaagcaggtatctatgctatcggtgactgctgctactatgacggaaaaattgatctgattgcgacaggtctaggggaagctccaactgctgtcaacaacgctatcaactacattgaccctgaacaaaaagtacaaccaaaacactctaccagtttataa

SEQ ID NO: 37907 - DNA, 912 bp, Streptococcus pneumoniae
atgagtttcacagtagcagtaaaagaagaaatcctgggccaacaccatctgagctggcatgaattatctgccattatcaaaatgtctggtagcatcggtctctcgacttcgggcttgactttgtcagttgtgacagaaaatgccaaactggcccgtcacctctatgagtcctttctccatttctatgaaatcaaatctgaaattcgtcaccaccaacggagcaatcttcgcaagaatcgcgtctataccgtttttacagatgaaaaggtgcaggatttgttaagtgatttgcacttggcagactctttctttggcctggaaacaggtattgatgaggcgattttatcggatgaggaagcaggtcgtgcctatctctgtggcgctttcttggcaaatgggagcattcgtgaccctgagtcaggcaagtaccagttggaaatcagttctgtttatctggaccacgcgcaaggaattgcctcccttctccaacagtttttactggatgccaaggtgcttgagcgcaagaagggggctgtgacctatctccagcgagcagaagacattatggacttcttgatagtaataggagccatgcaggcacgtgatgattttgagcgggttaagattttgcgagaaacccgtaacgacctcaatcgagctaataatgccgagacagctaatatcgctcggacagtttctgccagcatgaagaccattaacaatatcagtaaaatcaaagatatcatgggcttagaaaatttgccagtagatttgcaggaagtggcgcaactgaggattcagcacccagactactctatccagcagttagcagatagtctcagcacccctctgaccaaaagtggtgtcaatcacagactcagaaaaatcaataagatagcggatgaattataa

SEQ ID NO: 37908 - DNA, 978 bp, Streptococcus pneumoniae
atgagaaaaccaaagataacggtgattggtggagggactggaattcccgtcattctaaaaagtctgcgggaaaaagatgtggaaatcgcagctatcgtgacggtggcagatgatggtggttcttcaggtgaactccgaaaaaatatgcaacagttgacaccgccaggtgatcttcgtaatgtccttgtggccatgtcggatatgcctaagttttatgagaaggtctttcagtatcggttctctgaggatgccggagcctttgctggccatccattgggaaatctcatcattgctggcttgtcagaaatgcagggttcaacctataatgccatgcagttattgagcaaatttttccatacaacagggaaaatttatccttccagtgaccatcctttgacccttcatgcagtctttcaggatgggacagaagtggctggagagagtcatattgtagaccatcgaggcataattgacaatgtctatgtgaccaatgccctaaacgatgatacgcctctggccagccgtcgagtagtgcagaccatccttgaaagtgacatgattgtcctagggccaggttccctctttacctctattttgcccaatatcgtgattaaggaaattgggcgggctcttttggaaaccaaggcagaaattgcctatgtctgcaatatcatgacccaacgtggggagacggaacactttacagatagcaaccacgtggaagtcttgcatcgtcaccttggtcgcccttttatcgacactgtcttggtgaatattgaaaaagtgcctcaggaatacatgaattccaaccgttttgatgaatacttggtgcaagtggaacacgattttgtaggtctttgtaagcaagtttcgcgcgtgatttcatctaacttccttcgtctggaaaatggcggtgccttccacgatggagatttgattgtggacgagttgatgcgcattatacaggtgaaaaaatga

SEQ ID NO: 37909 - DNA, 891 bp, Streptococcus pneumoniae
atgacaaagaaacaacttcacttggtgattgtgacagggatgggtggcgcagggaaaactgtagccattcagtccttcgaggatctaggttatttcaccattgataatatgccgccagctctcttgcctaagtttttgcagctggttgaaattaaggaagacaatcctaagttggccttggtagtggatatgcgtagtcgttctttcttttcagagattcaagctgttttggatgagttggaaaatcaagatggtttggatttcaaaatcctctttttggatgcggctgataaggaattggtcgctcgttacaaggaaaccagacggagtcacccactagcagcagacggtcgtattttagatggaatcaagttggaacgtgaactcttggcacctttgaaaaatatgagccaaaatgtggtggatacgactgaactcactccacgtgagctgcgcaaaacccttgcagagcagttttcagaccaagaacaagctcagtctttccgtatcgaagtcatgtctttcggatttaagtatggaatcccgattgatgcggacttggtctttgatgtccgtttcttgccaaatccctattatttaccagaactgagaaaccaaacgggtgtggatgaacctgtttatgattatgtcatgaaccatcctgagtcagaagacttttatcaacatttattggccttgattgagccgattctgccaagttaccaaaaggaaggtaagtccgttttgaccattgccatgggatgtacgggtggacaacaccgtagtgtggcatttgctaaacgcttggtgcaggacttatccaagaattggtctgttaatgaagggcatcgcgacaaagaccgcagaaaggaaacggtaaaccgttcatga

SEQ ID NO: 37910 - DNA, 1233 bp, Streptococcus pneumoniae
atgtctacaaatagaaaaaatgatatgatggtttattgctcattttgtggcaaaaaccaagaagaagtacaaaaaataattgctggcaacaatgcttttatttgtaatgaatgcgtggagttagctcaggaaatcattcgagaagaattggttgaggaagtcttggcagacttgtctgaggtgccaaaaccaattgaactcctccatatcttgaaccactatgtaattggtcaagatcgtgccaagcgtgccttggcagtggcggtttataaccactacaaacgcatcaatttccacgatacacgcgaagagtcagaagatgtggatttgcagaagtcaaacattttgatgattggcccaactggttcagggaaaactttccttgcccagaccttggctaagagcttgaatgtgccttttgctattgcggatgcgacagctctgacggaggctggttatgtgggtgaggacgtggaaaatatcctcctcaaactcttgcaggttgctgactttaacatcgaacgtgcagagcgtggcattatctatgtggatgaaattgacaagattgccaagaagagtgagaatgtgtctatcacacgtgatgtttctggtgaaggggtgcaacaagcccttctcaagattatcgagggaactgttgctagcgtaccgcctcaaggtggacgcaaacatccacaacaagagatgattcaagtggatacaaaaaatatcctcttcatcgtgggtggtgcttttgatggtattgaagaaattgtcaaacaacgtctgggtgaaaaagtcatcggatttggtcaaaacaataaggcgattgacgaaaacagctcatacatgcaagaaatcatcgctgaagacattcaaaaatttggtattatccctgagttgattggacgcttgcctgtttttgcggctcttgagcaattgaccgttgatgacttggttcgcatcttgaaagagccaagaaatgccttggtgaaacagtaccaaaccttgctttcttatgatgatgttgagttggaatttgacgacgaagcccttcaagagattgctaataaagcaatcgaacggaagacaggggcgcgtggacttcgctccatcatcgaagaaaccatgctagatgttatgtttgaggtgccgagtcaggaaaatgtgaaattggttcgcatcactaaagaaactgtcgatggaacggataaaccgatcctagaaacagcctag

SEQ ID NO: 37911 - DNA, 507 bp, Streptococcus pneumoniae
atgactaagaaaatcgtagctatttgggcccaggatgaagagggtttgattggtaaggaaaatcgtctgccttggcatttgccagcagaattgcagcactttaaagaaacaactctgaatcatgctatcttgatggggcgtgtgacctttgatgggatggggcgtcgcttgcttccaaaacgggaaaccctgattttgacgcgtaatccggaagaaaagatagatggggttgctacttttcaggacgtccagtctgttcttgactggtatcaggatcaagaaaagaatctctacattatcggtgggaagcaaatttttcaggcttttgaaccttaccttgatgaagtgattgtcactcacattcatgctcgggtggaaggagatacctatttccctgaagagcttgacttgtctctttttgagacagtttcaagcaaattttacgccaaagatgagaagaatccttatgattttaccatccaataccgcaagagaaaggaagtctaa

SEQ ID NO: 37912 - DNA, 537 bp, Streptococcus pneumoniae
atgaatgaggtaaagaaaatggtagaattgaaaaaagaagcagtaaaagacgtaacatcattgacaaaagcagcgccagtagcattggcaaaaacaaaggaagtcttgaaccaagctgttgctgatttgtatgtagctcacgttgctttgcaccaagtgcactggtatatgcatggtcgtggtttccttgtatggcatccaaaaatggatgagtacatggaagctcttgacggtcaattggatgaaatcagcgaacgcttgattacactcggtggaagcccattctctacattgacagagttccttcaaaatagtgaaatcgaagaagaagctggtgaataccgtaatgttgaagaaagcttggaacgtgttcttgttatctaccgttacttgtcagaacttttccaaaaaggtttggatgtcactgatgaagaaggtgacgatgtgacaaacggtatctttgtaggcgctaaaactgaaacagataaaacaatttggatgcttgcagccgaacttggacaagcacctggtttgtaa

SEQ ID NO: 37913 - DNA, 1575 bp, Streptococcus pneumoniae
gtgaaatttaatgaattaaacttgtctgctgatttgctagcagaaattgaaaaagctggttttgtagaagctagtcctatccaagaacaaactattcctttggcccttgaaggcaaggatgttatcggtcaagctcagactggtacaggaaaaactgcagcctttggcttgcctacccttgaaaaaatccgtacagaagaagcgactatccaagctttggtcatcgctccaactcgtgaactagctgtccaaagtcaagaagaactcttccgctttggtcgtagtaagggagtcaaagtccgttcagtatatggcggatcaagcattgaaaaacaaattaaggctcttaaatctggtgcccatatcgtggtgggaactccaggtcgcctcttggacttgattaaacgcaaggccttgaaattacaagacattgaaacccttatccttgacgaagcggatgaaatgcttaacatgggcttccttgaagacatcgaagccattatttcccgtgtacctgagaaccgtcaaactttgcttttctcagcaactatgccagatgccatcaaacgtatcggtgttcagtttatgaaagcccctgaacatgtcaagattgcggctaaggaattgacaacagaattggttgaccagtactatatccgtgttaaggaacaagaaaaatttgacaccatgactcgtctcatggatgtggcacaaccagaactcgctattgtatttggtcgtaccaaacgccgtgtggatgaattgactcgtggtttgaaaattcgtggcttccgtgcagaaggaattcatggcgacctagaccaaaacaaacgtcttcgtgtccttcgtgactttaaaaatggcaatcttgatgttttggttgcgacagacgttgcagcgcgtggtttggatatttcaggtgtgacccatgtctacaactacgatattccacaagatcctgagagttatgttcaccgtatcggtcgtacaggtcgtgctggtaagtcaggtcaatctattacttttgttgctccaaacgaaatgggttaccttcaaatcattgaaaacttgactaagaaacgcatgaaaggtctcaaacctgcaagtgtagaagaatccttccaatcaaaaaaacaggtagctctcaagaaaatcgaacgtgattttgcagatgaaaccattcgtgccaactttgagaaatttggtaaggatgctcgcaaattggctgctgagtttactccagaagaattggcaatgtatatcttgagtctgacagtccaagacccagatagccttccagaagtggagattgcacgtgaaaaaccactaccgtttaaaccatcaggtaatggtttcggtggtaaagctaagggaggtcgtggaggccgtcgtggggacgaccgtcgagagcgtgatcgccgtggcaatggtcgccgtgatgagttcaaaaaaggaagtcgtggcaacgatcgttttgataaggaaaaacgttaccgtaaggataataaaaaaccacgcaatactttaagcgaaaagcaaacaggctttgttattcgtaacaaaggcgataaataa

SEQ ID NO: 37914 - DNA, 1344 bp, Streptococcus pneumoniae
atgaacttaaaaactactttgggccttcttgctgggcgttcttcccacttcgttttaagccgtcttggacgtggaagtacgctcccagggaaagtcgcccttcaatttgataaagatattttacaaagcctagctaagaactacgagattgtcgttgtcactggaacaaatggaaaaaccctgacaactgccctcactgtcggcattttaaaagaggtttatggtcaagttctaaccaacccaagcggtgccaacatgattacagggattgcaacaaccttcctaacagccaaatcttcaaaaactgggaaaaatattgccgtcctcgaaattgacgaagccagtctatctcgtatctgtgactatatccagcctagtctttttgtcattactaatatcttccgtgaccagatggaccgtttcggtgaaatctatactacctataacatgatattggatgccattcgaaaagttccaactgctactgttctccttaacggagacagtccacttttctacaagccaactattccaaaccctatagagtattttggttttgacttggaaaaaggaccagcccaactggctcactacaataccgaagggattctctgtcctgactgccaaggcatcctcaaatatgagcataatacctatgcaaacttgggtgcctatatctgtgaaggttgtggatgtaaacgtcctgatctcgactatcgtttgacaaaactggttgagttgaccaacaatcgctctcgctttgtcatagacggccaagaatacggtatccaaatcggcgggctctataatatctataacgccctagctgctgtggccatcgcccgtttcctaggtgccgattcgcaactcatcaaacagggatttgacaagagccgtgctgtctttggacgccaagaaacctttcatatcggtgacaaggaatgtacccttgtcttgattaaaaatccagtcggtgcaacccaagctatcgaaatgatcaaactagcaccttatccatttagcctatctgtcctccttaatgccaactatgcagatggaattgacactagctggatctgggatgcagactttgaacaaatcactgacatggacattcctgaaatcaacgctggcggtgttcgtcattctgaaatcgctcgtcgcctccgagtgactggctatccagctgagaaaatcactgaaacgagtaatctggagcaagttctcaagaccattgagaatcaagactgcaagcatgcctatattctggcaacttatactgccatgctggaatttcgtgaactgctggctagtcgtcagattgttagaaaggagatgaactaa

SEQ ID NO: 37915 - DNA, 783 bp, Streptococcus pneumoniae
atggtttatacttcactttcctcaaaagatggcaattacccctatcagctcaacattgcccacctctacggaaatctcatgaatacctacggggacaatggaaacatcctcatgctcaagtatgtggctgaaaaactgggagcccatgtgaccgttgacatcgtttctctccatgatgactttgatgaaaatcactacgacatcgcctttttcggtggtggtcaagactttgaacaaagtatcattgcagacgacctacctgctaaaaaagagagcattgacaactacatccaaaacgacggtgtagttctggctatctgcggtggtttccaactattgggtcaatattatgttgaagcttcaggaaaacgtatcgaagggctaggggtcatgggacactacacgctcaaccagaccaataaccgttttatcggtgacatcaagattcacaatgaagatttcgatgaaacctactatggatttgaaaatcaccaaggccgtaccttcctctctgatgaccaaaaaccgctgggacaggttgtctatggaaatggaaacaacgaagaaaaggtcggtgaaggggttcattataagaatgtctttggttcctacttccacgggcctatcctctctcgtaatgccaatctggcttatcgcctagttactactgccctcaagaagaaatatggtcaggacatccaactccctgcctatgaggatatcctcagccaagaaatcgctgaagagtacagtgacgtcaaaagcaaggctgacttttcttaa

SEQ ID NO: 37916 - DNA, 489 bp, Streptococcus pneumoniae
atggaacagtgctacacagatgtgactgaatttgccattccagcaagtactcaaaagctttacttatcaccagttttagatggctttaatagcgaaattatcgcctataatctttcaacttcacccaacttagaacaagtacaaacaatgttggaacaggcattcacagagaagcactacgagaatacgattctccatagtgaccaaggctggcaatatcaacacgattcttatcatcagtttcttgagggtaagggaattcaagcatccatgtcacgcaagggaaacagccaagacaacggtatgatggagtccttctttgggattctgaaatcggaaatgttttatggctatgagaaaacatttaaatcacttaatcaattggaacaagctattgtagactatattgattactacaacaacaaacgaattaaggtaaaactaaaaggacttagtcctgtgcagtacagaactaaatccttcggataa

SEQ ID NO: 37917 - DNA, 750 bp, Streptococcus pneumoniae
atgacgagatataaagcaactatttcctatgatggttatgcctttgctggctttcagcgccagtctcatgcgcgtagcgttcaggaagaaattgaaaaaaccttgaccagattaaataaagggcaaaccattactgttcacggtgctggtaggacagatagtggggttcatgccctgggacaggtcattcattttgacctgccttatcagatggatgaggagaaactccgttttgccttggatacccagtctcctgaagatattgatgtgatttcgattgagcttgtggcagatgattttcattgccgttatgccaaacatagcaagacctatgagtttattgtggatagaggacgtcccaaaaatccgatgcgccgtcactatgccacccactttccctacccactcgatgtggaacgaatgcagattgcaatcaaaaagctagagggaacccatgattttaccggttttacagcctctgggactagtgtagaggataaggttcgcaccatcacagaagctagtttaatagtcgatgagacaggacaatttttgacctttaccttttcaggaaatggtttcttgtataaacagattcgcaatatggtggggactcttctcaaaatcggtaacaaccgcatgccagtagagcagattgatctcatcttggagaagaaggacaggcaacttgcaggtcccactgcagcaccaaatggtttgtatttaaaggagattcgttatgaagaataa

SEQ ID NO: 37918 - DNA, 1152 bp, Streptococcus pneumoniae
atgaaacaatttttagaacgggccagcattttggctctctccctcgttttgattacctccttttccatttcgagtgccctaccagccatgtttgactattatcagggttattctaaggaacaaattgagctcttggtgagcttgccttcctttggaatcatgatgatgttactgctaaatggtttcttagaaaaaatatttcctgagcgcttacagattagtttgggcttgctgattttatcattgagcggtacagctcccttctggtaccaagcctatccctttgtctttggaacacggcttctctttggtttgggtcttgggatgatcaatgccaaggccatttctattatcagtgaacgctaccaaggaaaaaggcgaattcagatgttagggctacgcgcttctgcagaggtcgttggagcttctctcattaccttggccgtcggtcagttgttggcctttggttggacagctatctttctagcctatagtgctggatttttggtgctgcccctttatctgctctttgtcccttatggaaaatcaaagaaagaagtcaagaaaagagcgaaggaagcaagtcgtttaactcgagaaatgaaaggcttgatttttaccttagctatcgaagcggcagttgtagtttgtaccaatacagctattaccatccgtattccaagtttgatggtggaaagaggattgggggatgcccagttatctagttttgttcttagtatcatgcagttgatcgggattgtggctggggtgagtttttctttcttgatttctatctttaaagagaaactgctcctctggtctggtattacctttggcttggggcaaattgtgattgccttgtcttcatccttgtgggtggtagtagcaggaagtgttctggctggatttgcctatagtgtagtcttgacgacggtctttcaacttgtctctgaacgaattccagctaaactcctcaatcaagcaacttcatttgctgtattaggctgtagtttcggagcctttacgaccccatttgttctaggtgcaattggcttactaactcacaatgggatgttggtctttagtatcttaggaggttggttgattgtaatctctatctttgtcatgtacctacttcagaagagagcttag

SEQ ID NO: 37919 - DNA, 672 bp, Streptococcus pneumoniae
atgaaaacaattcaaattgctattgatggtcctgcttccagcggtaagagtacggtcgcaaagattattgctaaggattttgggttcacctaccttgatacaggagctatgtatcgtgcagcgacctatatggctcttaagaaccaattaggagttgaagaagtcgaagcccttctagccttgttggaccaacatccaatcagctttggacgttcagaaactggagaccagcttgtttttgtaggagatgtggatattacccatcctatccgtgaaaatgaagtgaccaatcatgtttctgctattgcagcaattcctgaagtgcgtgagaaactggtttctctccaacaagaaattgcccagcaaggcgggattgtcatggatggtcgcgatattggaactgttgtattgccacaagcagaattgaaaattttcctagtagcttctgttgatgagagagcagagcgtcgttacaaggaaaatattgccaagggaattgaaacagaccttgaaaccctaaaaaaggaaattgctgcgcgtgactacaaggatagtcatcgtgagacttctcctctcaaacaagcagaggatgctgtctaccttgatacaactggtttgaacattcaagaagtagttgaaaaaatcaaagcagaagctgaaaaaagaatgtaa

SEQ ID NO: 37920 - DNA, 279 bp, Streptococcus pneumoniae
ttgccacggttcttttgccataccttactccttgtttttttttacttttcttattacaatataaatatgaacatgaaaatcacacttatacctgaacgatgtatcgcctgtggactttgccaaacttattctgatttatttgattaccacgataatggaatcgtgcgtttttacgatgaccctgaccaactggaaaaagaaatttctcctagtcaggatgtcttagaggctgttaaaaattgcccaactcgcgccctgattggaaaccaggaagcctaa

SEQ ID NO: 37921 - DNA, 795 bp, Streptococcus pneumoniae
ttgataaggtataataataacaagaaaacaatcgaaggagatcgcatgttttatacttatttgcgtggattagttgtattgctcttatggtccatcaatggcaatgctcactatcataatactgataaaattcctaatcaagatgaaaattatattttagttgcgcctcaccgtacctggtgggatcctgtttatatggcctttgcgaccaagccaaaacagttcatctttatggcaaaaaaagaactctttaccaaccgtatctttggttggtggattcgtatgtgtggcgcctttcccatcgaccgtgaaaatcccagcgcctcagccatcaaatatcctatcaacgttctcaaaaaaagtgaccgctctctcatcatgtttccaagtggtagccgccactcaaacgatgtcaaggggggcgcagcactgattgccaaaatggccaaggtccgtatcatgccggttacctacaccggtcccatgactttgaagggcttgattagccgtgaacgtgtcgatatgaactttggaaatccaatcgatatctcagatatcaagaaaatgaatgatgaaggcattgaaacagtcgccaatcgtattcaaacagaattccaacgtctggacgaagaaacgaaacaatggcacaatgataaaaaaccaaatccactctggtggtttatccgcatccctgccctcatccttgctattatcctcgctatcctaaccatcatctttagctttatcgcaagcttcatctggaacccagataagaaaagagaagaacttgcatag

SEQ ID NO: 37922 - DNA, 270 bp, Streptococcus pneumoniae
atggcaatctcaaaagagaaaaaaaatgaaatcattgcacaatatgcacgtcacgaaggtgatacaggttcagtagaggttcaagttgctgtccttacttgggaaatcaaccaccttaacgaacacatcaaacaacacaaaaaagaccacgctacttaccgtggattgatgaaaaaaatcggtcgccgtcgtaacttgcttgcatacttgcgtaaaaacgacgttaaccgttaccgtgagttgatcaactctctaggacttcgtcgctaa

SEQ ID NO: 37923 - DNA, 1983 bp, Streptococcus pneumoniae
atgcttagaaactatgaaataataaaaaaggagaacatcatgattaacattactttcccagatggcgctgttcgtgaattcgaatctggcgtaacaacttttgaaattgcccaatctatcagcaattccctagctaaaaaagccttggctggtaaattcaacggcaaactcatcgacactactcgcgctatcactgaagatggaagcatcgaaattgtgacacctgatcacgaagatgcccttccaatcttgcgtcactcagcaactcacttgttcgcccaagcagctcgtcgtcttttcccagacattcacttgggagttggtccagccatcgaagatggtttctactacgatactgaccacacagctggtcaaatctctaacgaagaccttcctcgtatcgaagaagaaatgcaaaaaatcgtcaaagaaaacttcccatctattcgtgaagaagtgactaaagacgaggcacgtgaaatcttcaaaaatgacccttacaagttggaattgattgaagaacactcagaagacgaaggcggtttgactatctatcgtcagggtgaatatgtagacctctgccgtggacctcacgttccatcaacaggtcgtatccaaatcttccaccttctccatgtagctggtgcgtactggcgtggaaacagcgacaacgctatgatgcaacgtatctacggtacagcttggtttgacaagaaagacttgaaaaactaccttcaaatgcgtgaagaagctaaggaacgtgaccaccgtaaacttggtaaagagcttgacctctttatgatttcacaagaagtgggacaaggtttgccattctggttgccaaatggtgcgactatccgtcgtgaattggaacgctacatcgtaaacaaagagttggtttctggctaccaacacgtctacactccaccacttgcttctgttgagctttacaagacttctggtcactgggatcattaccaagaagacatgttcccaaccatggacatgggtgacggggaagaatttgtccttcgtccaatgaactgtccgcaccacatccaagttttcaaacaccatgttcactcttaccgtgaattgccaatccgtatcgctgaaatcggtatgatgcaccgttacgaaaaatctggtgccctcactggccttcaacgtgtacgtgaaatgtcactcaacgacggtcacctattcgttactccagaacaaatccaagaagaattccaacgtgcccttcagttgattatcgatgtttatgaagacttcaacttgactgactaccgcttccgcctctctcttcgtgaccctcaagatactcataagtactttgataacgatgagatgtgggaaaatgcccaaaccatgcttcgtgcagctcttgatgaaatgggcgtggactactttgaagccgaaggtgaagcagccttctacggaccaaaattggatatccagattaaaactgcccttggaaaagaagaaaccctttctactatccaacttgatttcttgttgccagaacgcttcgacctcaaatacatcggagctgatggcgaagatcaccgtccagtcatgatccaccgtggggttatctcaactatggaacgcttcacagctatcttgattgagaactacaagggggccttcccaacatggctggcaccacaccaagtaaccctcatcccagtatctaacgaaaaacacgtggactacgcttgggaagtggccaagaaactccgtgaccgcggtgtccgtgcagacgtagatgagcgcaatgaaaaaatgcagttcaagatccgtgcttcacaaaccagcaagattccttaccaattaattgttggagacaaagaaatggaagacgaaacagtcaacgttcgtcgctacggccaaaaagaaacacaaactgtctcagttgataattttgttcaagctatcctagctgatatcgccaacaaatcacgcgttgagaaataa

SEQ ID NO: 37924 - DNA, 2223 bp, Streptococcus pneumoniae
atgccgaaagaagtgaatttaacaggcgaagaagttgtcgctttaaccaaagaatatttaacggaagaggatgttcattttgtccataaggccttggtctatgctgttgaatgccacagtggtcaatatcgcaaatcaggcgagccttatatcattcaccctatccaagtggcaggtattttagctaagctaaagctggatgctgtaacagtagcttgtggattcttgcatgatgtggtggaagatacagatgcgactttggacgatttggaaagagagtttggtcctgatgtgcggatgattgttgacggagttaccaagcttggcaaggtcgagtacaaatcgatcgaggagcaattagcggaaaatcatcgcaagatgctcatggccatgtctgaggacatccgcgttattttggtcaaactgtctgaccgcttgcacaatatgcggaccctgaaacatcttcgaaaagacaagcaggagcgtatttccaaagaaaccatggaaatctatgccccgcttgcccatcgtttggggatttccagtgtcaaatgggaattagaagacttgtctttccgttatctcaatccaacggagttttacaagattacccatatgatgaaggaaaagcgcagggagcgtgaggccttggtggatgaggtagtcacaaaattagaggagtatacgacagaacgtcacttgaaagggaagatttatggtcgtcccaagcatatttactcaattttccgcaaaatgcaggacaagagaaaacggtttgaggaaatctatgatctgattgctattcgttgtattttagatacccaaagtgatgtttatgccatgcttggttacgtgcatgaattttggaaaccgatgccaggtcgcttcaaagactatatcgccaaccgcaaggccaatggttatcagtctatccatacgactgtttatggaccaaaagggccgattgaattccagattcgaaccaaggaaatgcacgaggtggctgagtacggggttgcggctcactgggcttataagaaaggtataaaggggcaagttaacagcaaggaatcagctattggaatgaactggatcaaggagatgatggagctccaagaccaggctgatgatgctaaggaatttgtggactctgttaaggaaaactatttggctgaggagatttacgtttttaccccagatggagctgtccgttcccttcccaaagattcaggaccgattgattttgcctacgaaatccataccaaggtcggtgaaaaagcaactggtgccaaggtcaatggccgcatggttccactgacaaccaagttaaagacaggggatcaggttgaaattatcgccaacccgaactcctttggacctagccgtgactggctcaatatggtcaagactagcaaggcgcgcaataagattcgccagttctttaaaaaccaagataaggaattgtctgtcaacaagggtcgtgagatgctgatggctcagttccaagaaaatggctatgtggcaaataaatttatggacaagcgccacatggatcaagttctgcaaaagaccagttacaagacagaagactccctctttgcggccattggttttggggaaatcggtgcgattaccgtctttaaccgtctgactgaaaaggagcgccgtgaggaagagcgtgccaaggccaaggctgaggcagaggagcttgtcaaaggtggcgaggtcaaggttgaaaataaagaaactctcaaggtcaagcatgaggggggagtggttattgaaggtgcttctggtctcctagtgcggattgctaagtgttgtaaccccgtgcctggtgacgatattgttggctacattaccaagggtcgtggtgtggctattcaccgtgtggactgtatgaacctgcgtgcccaagaaaactacgagcaacgtctccttgatgtggaatgggaagaccagtactctagctcaaataaggagtatatggcccatatcgatatctacggtctcaaccgtacaggactgttgaacgatgtactgcaagttctttcaaatacaaccaagaatatttcaacggtcaatgcccaaccaaccaaggatatgaagtttgctaatatccatgtgtccttcggtattgccaacctctctacactgaccacggttgtcgataaaattaagagtgtgccagaagtttactctgtcaaacggaccaacggctag

SEQ ID NO: 37925 - DNA, 2793 bp, Streptococcus pneumoniae
atgaaactcaaagacacccttaatcttgggaaaactgaattcccaatgcgtgcaggccttcctaccaaagagccagtttggcaaaaggaatgggaatatgcaaaactttatcaacgtcgtcaagaattgaaccaaggaaaacctcatttcaccttgcatgatggccctccatacgctaacggaaatatccacgttggacatgctatgaacaagatttcaaaagatatcattgttcgttctaagtctatgtcaggattttacgcaccatttattcctggttgggatactcatggtctgccaatcgagcaagtcttgtcaaaacaaggtgtcaaacgtaaagaaatggacttggttgagtacttgaaactttgccgtgagtacgctctttctcaagtagataaacaacgtgaagattttaaacgtttgggtgtttctggtgactgggaaaatccatatgtgaccttgactcctgactatgaagcagctcaaattcgtgtatttggtgagatggctaataagggttatatctaccgtggtgctaagccagtttactggtcatggtcatctgagtcagcccttgctgaagcagagattgaataccatgacttggtttcaacttccctttactatgccaacaaggtaaaagatggcaaaggagttctagatacagatacttatatcgttgtctggacaacgactccatttactatcacagcctctcgtggtttgacggttggtgcagatattgattacgttttggttcaacctgctggtgaagctcgtaagtttgtcgttgctgctgaattattgactagcttgtctgagaaatttggctgggctgatgttcaagttttggaaacttaccgtggccaagaactcaaccacatcgtaacagaacacccatgggatacagctgtagaagagttggtaattcttggtgaccacgttacgactgactctggtacaggtattgtccatacagcccctggttttggtgaggacgattacaatgttggtattgctaataatcttgaagtcgcagtgactgttgatgaacgtggtatcatgatgaagaatgctggtcctgaatttgaaggtcaattctatgaaaaggtagttccaactgttattgaaaaacttggtaacctccttcttgcccaagaagaaatctctcactcatatccatttgactggcgtactaagaaaccaatcatctggcgtgcagttccacaatggtttgcctcagtttctaaattccgtcaagaaatcttggacgaaattgaaaaagtgaaattccactcagaatggggtaaagtccgtctttacaatatgatccgtgaccgtggtgactgggttatctctcgtcaacgtgcttggggtgttccacttcctatcttctacgctgaagatggtacagctatcatggtagctgaaactattgaacacgtagctcaactttttgaagaacatggttcaagcatttggtgggaacgtgatgccaaagacctcttgccagaaggatttactcatccaggttcaccaaacggcgagttcaaaaaagaaactgatatcatggacgtttggtttgactcaggttcatcatggaatggagtggtggtaaaccgtcctgaattgacttacccagccgacctttacctagaaggttctgaccaataccgtggttggtttaactcatcacttatcacatctgttgccaaccatggcgtagcaccttacaaacaaatcttgtcacaaggttttgcccttgatggtaaaggtgagaagatgtctaaatctcttggaaatactattgctccaagcgatgttgaaaaacaattcggtgctgaaatcttgcgtctctgggtaacaagtgttgactcaagtaatgacgtgcgtatctctatggatatcttgagccaagtttctgaaacttaccgtaagattcgtaacactcttcgtttcttgattgccaatacatctgactttaacccagctcaagatacagtcgcttacgatgagcttcgttcagttgataagtacatgacgattcgctttaaccagcttgtcaagaccattcgtgatgcctatgcagactttgaattcttgacgatctacaaggccttggtgaactttatcaacgttgacttgtcagccttctaccttgattttgccaaagatgttgtttacattgaaggtgccaaatcactggaacgccgtcaaatgcagactgtcttctatgacattcttgtcaaaatcaccaaactcttgacaccaatccttcctcacactgcggaagaaatctggtcatatcttgagtttgaaacagaagacttcgtccaattgtcagaattaccagaagttcaaacttttgctaaccaagaagaaatcttggatacatgggcagccttcatggactttcgtggacaagcacaaaaagccttggaagaagctcgtaatgcaaaagttatcggtaaatcacttgaagcacacttgacagtttatccaaatgaagttgtgaaaactctactcgaagcagtaaacagcaatgtagcacaacttttgatcgtgtctgagttgaccatcgcagaaggaccagctccggaagctgcccttagcttcgaagatgtagccttcacagttgaacgtgctactggtgaagtatgtgaccgttgccgtcgtatcgacccaacaacagcagaacgcagctaccaggcagttatctgtgaccactgtgcaagcatcgtagaagaaaactttgcggaagcagtcgcagaaggatttgaagagaaataa

SEQ ID NO: 37926 - DNA, 801 bp, Streptococcus pneumoniae
gtgaggaatagaatgccaattacatcattagaaataaaggacaagacttttggaactcgattcagaggttttgatccagaagaagtcgatgaatttttagatattgtggttcgtgattacgaagatcttgtgcgtgcgaatcatgataaaaatttgcgtattaagagtttagaagagcgtttgtcttactttgatgaaataaaagattcattgagccagtctgtattgattgctcaggatacagctgagagagtgaaacaggcggcgcatgaacgttcaaacaatatcattcatcaagcagagcaagatgcgcaacgcttgttggaagaagctaaatataaggcaaacgagattcttcgtcaagcaactgataatgctaagaaagtcgctgttgaaacagaagaattgaagaacaagagccgtgtcttccaccaacgtctcaaatctacaattgagagtcagttggctattgttgaatcttcagattgggaagatattctccgtccaacagctacttatcttcaaaccagtgatgaagcctttaaagaagtggttagcgaagtacttggagaaccgattccagctccaattgaagaagaaccaattgatatgacacgtcagttctctcaagcagaaatggaagaattacaagctcgtattgaggtagccgataaagaattgtctgaatttgaagctcagattaaacaggaagtggaaactccaactcctgtagtgagtcctcaagttgaagaagagcctctgctcatccagttggcccaatgtatgaagaaccagaagtag

SEQ ID NO: 37927 - DNA, 540 bp, Streptococcus pneumoniae
atgtctttaaaagatagattcgatagatttatagattattttacggaggatgaggattcaagtctcccttatgaaaaaagagatgagcctgtgtttactccagtaaattcttcacaggaaccggctctcccaatgaatcaaccttcacagtcggctggtacaaaagagaacaatatcaccagacttcatgcaagacaacaggaattggcaaatcagagtcagcgtgcaacggataaggtcattatagatgttcgttatcctagaaaatatgaggatgcaacagaaattgttgatttattggcaggaaacgaaagtatcttgattgattttcagtatatgacagaggtgcaggctcgtcgttgtttggactatttggatggagcttgtcatgttttagctggaaatttgaaaaaggtagcttctaccatgtatttgttgacaccagtgaatgttattgtaaatgttgaagatatccgtttaccagatgaagatcaacagggtgagttcggttttgatatgaagcgaaatagagtacgataa

SEQ ID NO: 37928 - DNA, 672 bp, Streptococcus pneumoniae
atgaatgtaaaagaaaatacagaacttgtttttcgagaagttgcagaggctagtctgagtgctcatcgagagagtggttcggtctctgtcattgcagttatcaagtatgtagatgtaccgacagcggaagccttgcttccgctaggtgttcatcatatcggtgaaaatcgtgtagataagtttctggaaaaatatgaagctttaaaagatcgagatgtgacttggcatttgattggtaccttgcaaagacgtaaggtgaaagatgtcattcaatacgttgattatttccatgcattggactcagtaaagctagcaggggaaattcaaaaaagaagtgaccgagtcatcaagtgtttccttcaagtaaatatttctaaagaagaaagcaaacacggtttttcgagagaggaactgctggaaatcttgccagagttagccagactagataagattgaatatgttggtttaatgacgatggcaccttttgaggctagcagtgagcagttgaaagagattttcaaggcggcccaagatttacaaagagaaattcaagagaaacaaattccaaatatgcctatgaccgagttaagtatgggaatgagtcgtgattataaagaagcgattcaattcggttccacttttgttcgtataggtacatcattttttaagtag

SEQ ID NO: 37929 - DNA, 1260 bp, Streptococcus pneumoniae
atgacattttcatttgatacagctgctgctcaaggggcagtgattaaagtaattggtgtcggtggaggtggtggcaatgccatcaaccgtatggtcgacgaaggtgttacaggcgtagaatttatcgcagcaaacacagatgtacaagcattgagtagtacaaaagctgagactgttattcagttgggacctaaattgactcgtggtttgggtgcaggaggtcaacctgaggttggtcgtaaagccgctgaagaaagcgaagaaacactgacggaagctattagtggtgccgatatggtcttcatcactgctggtatgggaggaggctctggaactggagctgctcctgttattgctcgtatcgccaaagatttaggtgcgcttacagttggtgttgtaacacgtccctttggttttgaaggaagtaagcgtggacaatttgctgtagaaggaatcaatcaacttcgtgagcatgtagacactctattgattatctcaaacaacaatttgcttgaaattgttgataagaaaacaccgcttttggaggctcttagcgaagcggataacgttcttcgtcaaggtgttcaagggattaccgatttgattaccaatccaggattgattaaccttgactttgccgatgtgaaaacggtaatggcaaacaaagggaatgctcttatgggtattggtatcggtagtggagaagaacgtgtggtagaagcggcacgtaaggcaatctattcaccacttcttgaaacaactattgacggtgctgaggatgttatcgtcaacgttactggtggtcttgacttaaccttgattgaggcagaagaggcttcacaaattgtgaaccaggcagcaggtcaaggagtgaacatctggctcggtacttcaattgatgaaagtatgcgtgatgaaattcgtgtaacagttgtcgcaacgggtgttcgtcaagaccgcgtagaaaaggttgtggctccacaagctagatctgctactaactaccgtgagacagtgaaaccagctcattcacatggctttgatcgtcattttgatatggcagaaacagttgaattgccaaaacaaaatccacgtcgtttggaaccaactcaggcatctgcttttggtgattgggatcttcgccgtgaatcgattgttcgtacaacagattcagtcgtttctccagtcgagcgctttgaagccccaatttcacaagatgaagatgaattggatacacctccatttttcaaaaatcgttaa

SEQ ID NO: 37930 - DNA, 1374 bp, Streptococcus pneumoniae
atggctagagaaggcttttttacaggtctagatattggaacaagctctgtcaaggtgcttgtggccgagcagagaaatggtgaattaaatgtaattggcgtgagtaatgccaaaagtaaaggtgtaaaggatggaattattgttgatattgatgcagcagcaactgctatcaagtcagccatttcccaagcggaagaaaaggcaggcatttcgattaaatcagtgaatgtcggcttgcctggtaatcttttgcaggtagaaccaactcaggggatgattccagtaacatctgatactaaggaaattacggatcaagatgttgaaaatgttgtcaaatcagctttgacaaagagtatgacacctgaccgtgaagtcattacctttattcctgaagaatttattgtggatggtttccaagggattcgtgacccacgtggcatgatgggggttcgccttgaaatgcgtggtttgctttatacaggacctcgtactatcttgcacaatttgcgtaagacggttgagcgtgcaggtgttcaggttgaaaatgttatcatttcaccactagcaatggttcagtctgttttgaacgaaggggaacgtgaatttggtgctacagtgattgatatgggggcaggtcaaacgactgtcgctacaatccgtaatcaagaactccagttcacacatattctccaagaaggtggagattatgtaactaaagatatctccaaggttttgaaaacctctcgcaaattagcggaaggcttaaaactgaattacggggaagcctatccgcctcttgcaagcaaagaaaccttccaagtagaggttattggagaagtagaagcagtcgaagtgacggaagcctacttgtcagaaattatttctgcacgaatcaagcacatccttgaacaaatcaagcaagaattagatagaaggcgtctattggacctccctggtggtattgtcttaatcggtgggaatgccattttaccaggtatggttgagcttgctcaggaagtctttggcgtccgtgtcaagctttatgttccaaatcaagttggtatccgtaatccagcctttgcgcatgtgattagtttatcagaatttgcgggtcaattaacagaagttaatcttttggctcagggagcgataaaaggtgagaatgacttaagtcatcagccaattagttttggtgggatgctgcaaaaaacagctcagtttgtacaatcaacgcctgttcaaccagctcctgctccagaagtagagccggtggcgcctacagaaccaatggcggatttccaacaagcttcacaaaataaaccgaaattagcagatcgtttccgtggcttgatcggaagcatgtttgacgaataa

SEQ ID NO: 37931 - DNA, 1374 bp, Streptococcus pneumoniae
atgaaattaacaatccatgaaattgcccaagttgttggagccaaaaatgatatcagtatctttgaggacactcagttagaaaaagctgagtttgatagtcgtttgattggaactggagatttatttgtgccacttaaaggtgcgcgtgatggccatgactttattgaaacagcctttgaaaatggtgcagcagtaaccttgtctgagaaagaggtctcaaatcatccttacattttagtagatgatgttttgacagcctttcaatccctagcatcctactatcttgaaaaaacgactgttgatgtctttgctgttacaggttcaaatggcaagacaacgactaaggatatgttggcgcatttactgtcaacaagatacaagacctacaaaacacaaggcaattacaataatgagattggccttccttacacagttcttcatatgcctgaaggaacagaaaagttggttttggagatgggacaggatcacttgggagatattcatctcttgtctgaattggctcgtccaaaaacagccatcgtgaccttggttggagaagctcatttggcctttttcaaagatcgttctgagattgctaaaggaaaaatgcaaattgcagacggaatggcttcaggttccttgcttttagcgccggctgaccctatcgtagaggactatttgccaattgataaaaaggtggttcgttttggtcaaggagcagagctggaaattactgacttggttgagcgtaaggacagtctgacctttaaggctaatttcttggaacaagcccttgatttgccagtaactggcaagtacaatgcgacaaatgctatgattgcatcctatgttgccttgcaagaaggagtttcagaggagcaaattcgtttggcattccaacatcttgaattgacgcgtaaccgtaccgagtggaagaaagcagccaatggagcagatatcctgtcagatgtttacaatgccaatccaactgctatgaaactgattttagagactttctctgccattccagccaatgaaggtggcaagaaaattgcagtgttggcggatatgaaggagcttggtgaccagtctgttcaacttcataatcagatgattttgagcctctccccagatgtgcttgatatcgttattttctatggagaagatattgctcagttggctcaattggccagtcaaatgttcccaatcggccacgtttactacttcaagaaaacagaagaccaggatcaatttgaagacctagtcaagcaggtcaaggaaagccttggagcccatgaccaaatcctgctcaaaggctctaactctatgaatctagccaagttggtagaaagtttagaaaatgaagacaagtga

SEQ ID NO: 37932 - DNA, 1044 bp, Streptococcus pneumoniae
atgaaacaaacgattattcttttatatggtggacggagtgcggaacgcgaagtctctgtcctttcagctgagagtgtcatgcgtgcggtcgattacgaccgtttcacagtcaagactttctttatcagtcagtcaggtgactttatcaaaacacaggaatttagtcatgctccggggcaagaagaccgtctcatgaccaatgaaaccattgattgggataagaaagttgcaccaagtgctatctacgaagaaggtgcagtggtctttccagtccttcacgggccaatgggagaagatggctctgttcaaggattcttggaagttttgaaaatgccttacgttggttgcaacattttgtcatcaagtcttgccatggataaaatcacgactaagcgtgttctggaatctgctggtattgcccaagttccttatgtggctatcgttgaaggcgatgatgtgactgctaaaatcgctgaagtggaagaaaaattggcttatccagtcttcactaagccgtcaaacatggggtctagtgtcggtatttctaagtctgaaaaccaagaagaactccgtcaagccttaaaacttgccttccgatatgacagccgtgtcttggttgagcaaggagtgaatgcccgtgaaattgaggttggcctcttgggtaactacgatgtcaagagcacgctacctggagaagttgtcaaggacgttgccttttatgactacgatgccaagtatattgataacaaggttactatggatattcctgccaaaatcagtgatgatgtggtggctgtcatgcgtcaaaatgcagaaacagccttccgtgccattggtggccttggtctatctcgttgcgatttcttctatacagataagggagagatttttctcaacgagctcaataccatgccaggtttcacccagtggtctatgtacccactactttgggaaaatatggggatcagctacccagaactaatcgagcgtttggttgaccttgccaaggaaagttttgacaagcgcgaagcgcatttgatataa

SEQ ID NO: 37933 - DNA, 597 bp, Streptococcus pneumoniae
atgctttatccaacacctattgccaagttgattgacagttattctaagttaccaggtatcgggattaagacggctacgcgtctggccttttatacgattgggatgtctgctgatgatgtcaatgaatttgcaaaaaatctcctttctgctaagagagaattgacatattgttctatttgtggacgtttgacagacgacgatccttgttctatctgtactgatccgactcgtgaccagacaacaattttagttcttgaggatagtagagatgtggcagccatggaaaatatccaagaataccatggactctatcatgtccttcatggcctcatttctcctatgaatggtatcagtccggacgatatcaatctcaagagccttatgactcgtcttatggatagtgaggtttcagaagtgattgtggcgactaatgctacagcggatggtgaagcgacttccatgtatctttcacgtttgctcaagccggctggtatcaaggttacgcgtctagcacgaggtctcgctgtgggagcggacattgagtatgcggacgaagtgacactcttacgagccattgaaaatcggacagagttgtaa

SEQ ID NO: 37934 - DNA, 2058 bp, Streptococcus pneumoniae
atgagactgatttgtatgagaaaatttaacagccattcgattccgattcggcttaatttattgttttcaatcgtcattttactctttatgaccattattggtcgtttgttgtatatgcaggttttgaacaaggatttttacgaaaaaaagctagcctcagctagtcagaccaagattacaagcagttcagcccgtggggaaatttatgatgctagtggaaaacctttggtagaaaatacgttaaagcaggttgtttcctttacgcgtagcaataaaatgacggctacagacttaaaagaaacagctaaaaagttactgacttatgtgagcatcagttctccaaatttgacagaacgccagctggcggattactatttggctgatcctgaaatctataaaaaaatagtggaagctctcccaagcgagaaacgcttggattcagatggcaatcgtctatccgaatcagaactgtataacaatgcggtcgatagtgtacaaacgagtcaactaaactatacagaggatgaaaagaaagaaatctatctttttagtcagttaaatgctgttggaaactttgcgacaggaaccattgctacagatcctctaaatgattctcaggtggctgttattgcctctatttcaaaggagatgcctggcattagtatttctacttcttgggatagaaaggttttggaaacttccctttcttctatagttgggagtgtatccagtgaaaaagctggtctcccagcggaagaagcagaagcctatcttaaaaaaggctattctctaaatgaccgtgtaggaacctcctatttggaaaagcaatatgaagagaccttacaaggaaaacgctcggtaaaagaaatccatctggataaatatggcaatatggaaagcgtggatacaattgaggaaggtagtaagggaaacaatatcaaactgaccattgatttggctttccaagatagcgtggatgctttactgaaaagttatttcaattctgagctagaaaatggtggagccaagtattctgaaggtgtctatgcagtcgcccttaacccaaaaacaggtgcggttttgtctatgtcagggattaaacatgacttgaaaacgggagagttgacgcctgattccttgggaacggtaaccaatgtctttgttccaggttcggttgtcaaggcggcgaccatcagctcaggttgggaaaatggagtcttgtcaggaaaccagaccttgacagaccagtccattgtcttccaaggttcagctcccatcaattcttggtatactcaggcttacggttcattccctatcacagcggtccaagctctggagtattcatcaaatacctatatggtccaaacagccttaggtcttatggggcaaacctatcaacccaatatgtttgtcggcaccagcaatctagagtctgctatggagaaactgcgttcaacctttggcgaatatggcttgggtactgcgacaggaattgacctaccagatgaatctactggatttgttcccaaagagtatagctttgctaattacattactaatgcctttgggcagtttgataactatacgccgatgcagttggctcagtatgtagcaactattgcaaataatggtgttcgtgtggctcctcgtattgttgaaggcatttatggtaataatgataagggaggactgggtgacttgattcagcaactgcaaccgacagagatgaataaggtcaatatatccgactccgatatgagcatcttgcaccaaggtttttatcaggttgcccatggtactagtggattgacaactggacgtgccttttcaaatggtgccttggtatccattagcggaaaaacaggtacagccgaaagctatgtggcagatggtcagcaagcaaccaataccaatgcggtggcctatgccccatctgataatccccaaatcgctgtcgcagtggtctttcctcataataccaatctaacaaatggtgtaggaccttccattgcgcgtgacattatcaatctgtatcaaaaataccatccaatgaattag

SEQ ID NO: 37935 - DNA, 852 bp, Streptococcus pneumoniae
atggacaaaccagatatcgcaactatcattgattcacattttgaagaaatgacagacccagagcaagaaatcgctcgctattttttgcaagctgaaacgattacagatgatttatcttctcaacaagtcacccaaaaattacatatttctcaagctgctttgacccgctttgctaaaaagtgtggctttactggctaccgagaatttattttccaataccaacatcaggcagaaaatcaagccaaccaagtttccaagcacagtccactgaccaaacgagtcctcagaagttatagcaatatgagggaacaaacacaagacttgattgacgaaatccaactagaacgaattgcccagctaatcgaagatgctgagcgtatctacttctttggaacagggagttctggcctcgtcgcccgtgaaatgaaattacgttttatgcgattaggtgtggtctgcgaagctttgacagaccaagacggctttgcctggacaaccagcatcatggatgaaaattgtctagtactgggcttctcactttcaggctcaactccttctattttagatagtctattagatgccaaggagatgggggcaaagactgtactctttacaagtgttcccaataaaaatagccagacctatacagagactgttcttgtagccacccacagccaaccctcctatatccaacgaatatccgctcaacttcctatgctcttctttatcgatttgatttatgcctactttttggaaatcaatcgcgaaagcaaggaaaaaatctttaatagctactgggaaaataaaaaactcaacggctatcgtagacaaaaacgtgtaagaaaatcctag

SEQ ID NO: 37936 - DNA, 885 bp, Streptococcus pneumoniae
atgacatactacgttgcaattgatatcggtggaactaacatcaagtatggtttggttgatcaagaggggcaacttcttgaatcacatgaaatgccaacagaggcgcataagggtggacctcatatcttacaaaagaccaaagatatcgtagctagttatttagaaaaaggcccagtagcaggtgttgccatatcttctgctgggatggtggatccggataagggtgagattttctatgctgggccgcaaatccctaactacgcaggcacccagttcaaaaaggaaatcgaagaaagctttactattccttgtgagattgaaaatgatgtcaactgtgcaggtcttgctgaggcagtatctggttcaggcaagggagcaagtgtgacactttgcttgaccattggaaccggtatcggtggttgcttgattatggataggaaagtcttccatggttttagtaattcagcctgtgaagtcgggtatatgcatatgcaggatggagcttttcaggatctcgcttctacaacagctttagtgaaatatgtagctgaagcccatggagaagatgttgatcagtggaatggccgacgtatctttaaggaagctactgaaggaaacaaaatctgcatggaaggtattgaccgtatggttgactatctaggaaaaggtctggcaaatatttgctacgttgccaatccagaagtggtcattcttggtggtggtatcatggggcaagaggctatcctcaaacctaagatccgcacagccttgaaagaggctttggtaccaagtttagcagaaaaaacacgattagaatttgcccatcaccaaaatacagcagggatgttgggtgcatattatcattttaagacaaaacaatcctag

SEQ ID NO: 37937 - DNA, 1533 bp, Streptococcus pneumoniae
gtgagggggagttttatgtttaaagttttacaaaaagttggaaaagcttttatgttacctatagctatacttcctgcagcaggtctacttttggggattggtggtgcactttcaaacccaaccacgatagcaacttatccaatactagacaatagtatttttcaatcgatattccaagtaatgagctctgcaggagaggttgtattcagtaatttgtcactacttctctgtgtgggattatgtattggcttagcgaaacgagataaaggaaccgctgcgttagcaggagtaactggttacttagttatgactgcaacgatcaaagctttggtaaaactttttatggcagaaggatctgcaattgatactggagttattggagcattagttgtcggaatagttgccgtatatttgcacaaccgatataacaatattcaattaccttccgctttaggattctttggaggttcacgcttcgttcctattgttacatcgttctcttctatcttgattggctttgtcttctttgttatttggccacctttccaacaacttcttgtttctacaggtggatatatttctcaggcgggtccaattggaacttttctatatggatttttaatgagactttctggagcagtaggcttacatcatataatttaccctatgttttggtatactgaacttggtggtgttgaaactgttgcaggacaaacagtggttggagctcaaaaaatattttttgctcaattagccgatccggcccattctggattatttacagaaggaacaaggttttttgcaggtcgtttctcaacaatgatgttcggtttaccggctgcctgtttagcgatgtaccatagtgttcctaaaaatcgtcgtaaaaaatacgcgggtttgttttttggagttgctttaacatcttttattaccggtattacagaaccaattgaatttatgtttctattcgtcagtccggttctatatgttgttcacgcattccttgatggtgttagcttctttattgcagacgtcttaaatatttcaataggaaacacattttcaggaggtgtaatcgatttcacattatttggaattttgcaggggaacgctaagacgaattgggttcttcagattccatttggacttatttggagtgttttgtattatattatttttagatggttcattactcaattcaacgttctaacgccaggacgaggagaagaagtagattctaaagaaatttctgaatccgcagattcaacttcaaatactgcagattatttaaaacaggatagcctacaaattatcagagccttgggtggatcaaataatatagaagatgtagatgcttgtgtgacacgtttacgtgtagctgtaaaagaagttaatcaagttgataaagcacttttaaaacaaattggtgcagttgatgtcttagaagtgaagggtggcattcaagcaatctatggagcaaaagcaatcttatataaaaatagtattaatgaaattttaggtgtagatgattaa

SEQ ID NO: 37938 - DNA, 1104 bp, Streptococcus pneumoniae
atggttaaatacggtgttgttggagcagggtattttggagctgaattggctcgctacatgcaaaaaaatgatggagcagagattactcttctctatgatccagataatgcagaggcgattgcagaagaattgggagcaaaagtagcaagttccttagatgagttggtttctagcgatgaagtagactgtgttatcgtcgcaactccaaataatcttcataaggaaccggttattaaggctgcacagcatggtaaaaatgttttctgtgaaaaaccaattgcgctttcttatcaagattgtcgcgagatggtagatgcgtgtaaagaaaacaatgtaacctttatggcaggacatattatgaatttctttaatggtgttcatcatgcaaaagaactcattaatcaaggagttatcggagacgttctatattgtcatacagctcgtaatggttgggaagaacaacaaccgtcagtatcatggaaaaaaattcgtgaaaaatcaggtggtcacttgtatcaccacatccatgaattggattgcgttcaattccttatggggggcatgcctgaaactgtaaccatgacaggtggaaatgtggcccatgaaggtgaacatttcggtgatgaagatgatatgatttttgtcaatatggaattttctaataagcgttttgccttgttagaatggggttcagcttatcgttggggtgaacattatgtcttaatccaaggaagcaaaggtgccatccgcttagacttattcaactgtaaaggaactcttaagctagatgggcaagaaagctatttcttgattcacgaatcgcaagaagaagatgatgatcggactcgtatctatcatagtacagagatggatggagcaattgcttatggtaaaccaggtaaacgtactccattatggctatcatctgtcattgataaagaaatgcgctatctgcatgagattatgcaaggagctccagtatcagaagaatttgcaaaacttttgacaggtgaagctgccctagaagcaattgctactgcagatgcttgtacccagtctatgtttgaagatcgcaaagtaaaattgtcagaaattgtaaaataa

SEQ ID NO: 37939 - DNA, 1125 bp, Streptococcus pneumoniae
gtgtcattttggaggaaaatcatgaaagctagtccacatagaccaaccaaggctctgattcatctgggagctattcgacaaaatattcagcaaatgggggctcatatccctcaaggaacgctcaagttggctgtggttaaggccaatgcttatggtcatggagctgttgccgttgccaaggcaattcaagatgatgttgatggcttttgcgtttccaatatcgatgaagccattgaactcagacaagctggactcagcaagccaatcctcattttaggagtttctgaaatcgaagctgttgctctagctaaagaatatgacttcaccttgacagtggctggactggagtggattcaagcactcttagataaggaagtggacctaactggattgacagtccacctcaagattgattcagggatgggacggattggttttagagaggcaagtgaggttgagcaggctcaagatttgctccaacaacacggtgtttgtgttgaaggaatctttacccactttgctactgctgatgaggaatcagatgactattttaatgcccagttagaacggtttaaaactattttagctagtatgaaggaagttccagagctggttcatgctagcaattctgcaacgactctttggcatgtagagactattttcaatgcggttcgtatgggagatgccatgtatggtctcaatccaagtggagcggtcttggatttgccttatgatttgataccggccttgaccttggagtctgctctggttcatgtcaagacagttccagctggagcttgcatgggctatggagcaacttatcaagcggatagcgagcaagtcatcgcgaccgtgccaatcgggtatgcagatggatggacaagagacatgcaaaatttctctgtcttggtagatggccaagcttgcccaattgtcggcagggtttcgatggaccaaatcactattcgattgcctaagctttatccgctaggaaccaaggtaaccttgattggctccaatggggataaggaaatcactgcaactcaggtagcgacctaccgcgtaaccattaactatgaggtggtttgcctcctcagcgaccgtattccgagagaatattattag

SEQ ID NO: 37940 - DNA, 363 bp, Streptococcus pneumoniae
atgatagttggacacggaattgacatcgaagaattggcttcgatagaaagcgcagttacacgacatgaaggatttgctaagcgtgtactgaccgctcaggaaatggagcgcttcaccagtctcaaaggacgcaggcaaatagaatatttagctggtcgctggtcggctaaggaggccttttccaaggctatgggaacgggcattagcaagctcggttttcaggatttggaagtcttgaacaatgaacgtggggcgccttattttagtcaggcaccattttcaggaaagatttggctgtctatcagccacaccgatcagtttgtgacagccagtgtcattttggaggaaaatcatgaaagctag

SEQ ID NO: 37941 - DNA, 2514 bp, Streptococcus pneumoniae
atggctaatattttaaaaacaattatcgaaaatgataaaggagaaatccgtcgtctggaaaagatggctgacaaggttttcaaatacgaagaccaaatggctgctttgactgacgaccaactaaaagcaaaaacagttgaatttaaggaacgttatcaaaatggagaatcactggattcattgctttacgaagcatttgcggttgtccgtgaaggtgccaaacgtgtcctaggtctcttcccttataaggttcaggtcatgggggggattgttcttcaccatggtgacgtgccagagatgcgtacaggggaagggaaaaccttgactgcgaccatgccggtatacctcaatgccctttcaggtaaaggggttcacgtagttacggttaatgaatacctgtcagaacgtgacgcgactgagatgggtgaattgtactcttggcttggtttgtcagtagggattaacttggctaccaaatctccaatggagaaaaaagaagcctatgagtgtgatattacttactcaactaactcagaaatcggatttgactaccttcgtgacaatatggtcgttcgcgctgaaaatatggtacaacgtccgcttaactatgccttggtcgatgaggttgactctatcttgattgacgaggctcgtacacctttgattgtatcaggtgccaatgcggttgaaaccagtcagttgtatcacatggcagaccactatgtaaaatctttgaacaaagatgactacatcatcgatgtgcagtctaagactattggtttgtctgattcagggattgacagggctgaaagctacttcaaacttgaaaacctctatgacatcgaaaacgtggctttgactcactttatcgataacgcccttcgtgccaactacatcatgcttctcgatattgactatgtggtgagcgaagagcaagaaatcttgattgtcgaccaatttacaggtcgtaccatggaaggtcgtcgttattctgatggattgcaccaagctattgaagccaaagaaggtgtgccaatccaggatgaaaccaagacatctgcctcaatcacgtaccaaaaccttttccgtatgtacaaaaaattgtctggtatgacgggtacaggtaagactgaggaagaagaatttcgtgaaatctacaacattcgtgttattccaatcccaacaaaccgtcctgttcaacgtattgaccactcagaccttctttatgcaagtatcgaatctaagtttaaagcggttgtcgaagacgttaaggctcgttaccaaaagggtcaacctgtcttggttggtacagtagcggttgaaactagtgactacatttctaagaaattggttgcagctggtgttcctcacgaagtcttgaatgccaaaaaccactatagagaagcccaaatcatcatgaatgctggtcaacgtggtgccgttaccatcgcaaccaacatggcgggtcgtggtaccgacatcaagcttggtgaaggtgttcgtgaacttggaggactttgtgttattggtacagaacgtcatgaaagtcgtcgtatcgataaccagcttcgtggacgttcaggtcgtcaaggagatccaggtgagtcacaattctacctatctcttgaagatgatttgatgaaacgttttggttctgaacgcttgaagggaatctttgaacgtctcaacatgtctgaagaggccattgagtctcgcatgttgacgcgtcaggttgaagcagctcagaaacgtgtcgaaggaaataaccacgatacccgtaaacaagtccttcaatacgatgatgtcatgcgtgaacaacgtgagattatctatgctcaacgttacgatgtcatcactgcagatcgtgacttggcacctgaaattcaggctatgatcaaacgcacgattgaacgtgtcgttgatggtcatgcgcgtgccaaacaagatgaaaaactagaggcaattttgaactttgctaagtataacttgcttccagaagattctattacgatggaagacttgtcaggcttgtctgataaggccatcaaggaagagcttttccaacgtgccttgaaggtttacgatagtcaggtttcaaaactacgcgatgaagaagcagttaaagaattccaaaaagttttgattctacgagtggtggataacaagtggacagatcatatcgatgcccttgatcaattgcgtaacgcggttggacttcgtggctatgctcagaacaaccctgttgttgagtatcaggcagaaggtttccgtatgtttaatgatatgattggttcgattgagtttgatgtgacacgcttgatgatgaaagcacaaattcatgaacaagaaagaccacaggcagaacgtcatatcagtacaacagcgactcgcaatatcgctgctcaccaagcaagtatgccagaagatttggatttgaaccagattggacgcaatgaactttgcccatgtggttctggtaagaaatttaaaaactgtcacggtaaaagacaataa

SEQ ID NO: 37942 - DNA, 1311 bp, Streptococcus pneumoniae
atggccctaccaactattgccattgtaggacgtcccaatgttgggaaatcaaccctatttaatcggatcgctggtgagcgaatctccattgtagaagatgtcgaaggagtgacacgtgaccgtatttatgcaacgggtgagtggctcaatcgttcttttagcatgattgatacaggaggaattgatgatgtcgatgctcctttcatggaacaaatcaagcaccaggcagaaattgccatggaagaagcagatgttatcgtctttgtcgtgtccggtaaggaaggaattaccgatgcagacgaatacgtagcccgtaagctttataagacccacaaaccagttatcctcgcagttaacaaggtggacaaccctgagatgcgaaatgatatctatgatttctatgccctcggtttgggtgaaccactgcctatctcatctgtccatggtatcggtacaggggatgtactagatgcgattgtggaaaaccttccaaatgaatatgaagaagaaaatccagatgtcattaagtttagcttgattggtcgtcctaacgttggaaaatcaagcttgattaatgctatcttgggagaagaccgtgtcattgccagtcctgttgctggaacaactcgtgacgctattgatacccactttacagatacagatggtcaagagtttaccatgattgatacggctggtatgcgtaagtctggtaaggtttatgaaaatactgagaagtactctgtcatgcgtgccatgcgtgctattgaccgttcagatgtggtcttaatggtcatcaatgcggaagaggggattcgtgaatacgacaagcgtatcgctggatttgctcatgaagctggtaaagggatgattatcgtggtcaacaagtgggatacgcttgaaaaagataaccacactatgaaaaactgggaagaagatatccgtgagcagttccaatacctgccttacgcaccgattatctttgtatcagctttaaccaagcaacgtctccacaaacttcctgagatgattaagcaaatcagcgaaagtcaaaatacacgtattccatcagctgtcttgaacgatgtcatcatggatgccattgccatcaacccaacaccgacagacaaaggaaaacgtctcaagattttctatgcgacccaagtggcaaccaaaccaccaacctttgtcatctttgtcaatgaagaagaactcatgcacttttcttacctgcgtttcttggaaaatcaaatccgcaaggcctttgtttttgagggaacaccgattcatctcatcgcaagaaaacgcaaataa

SEQ ID NO: 37943 - DNA, 366 bp, Streptococcus pneumoniae
atgtcctggacatttgacaacaaaaaacccatctatttacagattatggaaaaaatcaagcttcagattgtttcccatacactggaacccaatcaacaacttccaaccgtgagggagctagctagcgaggctggtgtcaatcccaataccatccaaagagccttatcagaccttgaacgagaaggatttgtctacagcaagcgaacaactggacgatttgtgactaaggataaggagctaatcgcccagtcacgcaaacaattatcagaagaagaattggaacacttcgtttcctccatgacccattttggctatgaaaaagaagaactaccaggcgtagtcagtgattatattaaaggagtttaa

SEQ ID NO: 37944 - DNA, 723 bp, Streptococcus pneumoniae
gtgattatattaaaggagtttaagcctatgtcattactagcatttgaaaatgtatccaaatcatatggagcaacaccagcccttgaaaatgtttctcttgacattccagctggaaaaattgtcggccttcttgggccaaacggctcaggaaaaacaaccctgattaaactaattaatggcctcttacaaccagatcaaggacgtgtcctcatcaacgacatggacccaagcccagcaaccaaggccgttgtagcttatttgcctgatacgacctatctcaatgagcaaatgaaggtcaaagaagccctaacctacttcaagaccttctataaagatttcaatcttgaacgcgcccatcatctacttgcagacctgggcattgatgaaaatagtcgtctcaagaaactatcaaaaggaaacaaagaaaaggttcaactgattttggttatgagccgtgatgctcgtctctatgttttggatgaacccattggtggggtggatccagcagcccgtgcttatatcctcaataccattatcaacaactactcaccaacttctaccgttttgatttctacccacttgatttctgatatcgagccaatcttggatgaaattgtcttcctaaaagacggaaaagtcgtccgtcaaggaaatgtagatgatattcgctacgagtcaggtgaatccattgaccaactcttccgtcaggaatttaaggcctaa

SEQ ID NO: 37945 - DNA, 894 bp, Streptococcus pneumoniae
atgctagaagtaagaagtctagagaaaagttttggctccaagcaagttttgtttggtattgactttcaagcgcgaccaggtcgtattttgggactagtcggaaaaaatggtgctggaaaaacaacgattttccatagtattttgaaattcctagaatatcagggagaaatcggtctggatggtcaggatattcgtcaggagacctatgctcggattggttatctgcctgaagaacgcagtctcatgcctaaattgacagttcttgaacaagttcgctacttggcgactctaaaaggcatggatgccaaagaagtcaaagaaaaactccctcaatggatgaagaggttgaaagtgaaaggaaagctgacagataaaatcaagagtctgtcaaaaggaaatcagcagaagattcagctcattattactctgattcatgaaccagacctgattatcttggatgagccttttagtggattggacccagttaatacagaattgctcaaacaagtcatttttcaggaaaaagagcgcggagcaaccattatcttttctgaccatgtcatgaccaatgttgaggaactttgtgacgatattctgatgatccgagatggccgtgtggtcttgcacggaccagttcaggatgtccgcaatcaatacgggaaaacgcgtctctttgtttcaagtgaacgaagcaaggaagaattggaaaatcttcctcatgtcaaacaggtgagcttgaccaaacaaggcagttggaaattgattttggaggatgagagcgctggaagggaactcttcccaatcttgactcaaggtcaatatatcgcaacatttgaccaacaagcgccaactatcgatgaaatctttaaactagaatcaggagtggaagtatga

SEQ ID NO: 37946 - DNA, 1275 bp, Streptococcus pneumoniae
atgaagataagttggaatggattttctaaaaaatcataccaagagcgcctcgagctgctaaaagctcaggcgctccttagtcctgagagacaagctagtctggagaaggatgaacagatgagtgtgactgtggcagaccagctgagtgagaatgtggtgggaactttttctctgccttattcgctggttccggaggtacttgtcaacggtcaggaatacaccgttccctatgtgacagaagaaccctctgtggttgcggcggccagctatgccagcaaaatcatcaagcgtgcaggtggttttactgcacaagtccatcagcgccagatgattgggcaggtagccctttatcaagttgctaatcctaaactagcgcaagagaagattgccagcaagaaagcggagctcttggagcttgccaatcaagcctatccttctatcgttaaacgtgggggtggggcgcgtgatctgcatgtcgagcagataaaaggcgaaccagactttctcgttgtttatattcatgtcgatacccaggaagccatgggtgccaatatgctcaacaccatgctggaagccttgaaaccagtcttagaagaactcagtcagggacagagtctcatgggaatcctgtccaactacgcgactgattctctggtgactgcaagctgtcgcatcgcctttcgctacttgagccgccaaaaggatcaaggacgagagattgcggagaaaattgcgttggctagtcagtttgcgcaggctgatccttaccgagctgctactcataataaaggaatttttaatggtattgatgcgattttgattgccactggtaatgactggcgtgccatcgaagctggggcccatgcctttgccagtcgagatggacgctatcaaggtcttagctgctggacgctggaccttgaaagagaagaattggtcggtgagatgaccctgcccatgcctgtagcgactaagggtggctctatcggcctcaacccacgtgtagctctcagtcatgatctactaggaaatccttctgccagagaattagcccagattatcgtgtccatcggtcttgctcaaaattttgcagccctcaaagccttggtaagtacgggcatccagcaaggccacatgaaactacaggccaaatccctagctctcctagctggggctagtgaatctgaagttgctcccctagtagagcgcctcatctcagataaaacctttaacctagagacagcccagcgctatctcgaaaatttaagatcataa

SEQ ID NO: 37947 - DNA, 1980 bp, Streptococcus pneumoniae
atgatccaaatcggcaagatttttgccggacgctatcggattgtcaaacagattggtcgaggaggcatggcggatgtctacctagccaaagacttaatcttagatggggaagaagtggcagtgaaggttctgaggaccaactaccagacggacccgatagctgtagctcgttttcagcgtgaagcgagagctatggcagatctagaccatcctcatatcgttcggataacagatattggtgaggaagacggtcaacagtatcttgcaatggagtatgttgctggactagacctcaaacgctatatcaaggaacattatcctctttctaatgaagaagcagtccgtatcatgggacaaattctcttggctatgcgcttggcccatactcgaggaattgttcacagggacttgaaacctcaaaatatccttttgacaccagatgggactgccaaggtcacagactttgggattgctgtagcctttgcagagacaagtctgacccagactaactcgatgttgggctcagttcattacttgtcaccagagcaggcgcgtggttcgaaggcgactgtgcagagtgatatctatgccatggggattattttctatgagatgttgacaggccatatcccttatgacggggatagcgcggtgaccattgccctccagcatttccagaaccccctgccgtccgttattgcagaaaattcatctgtacctcaggctttagaaaatgttattatcaaggcaactgctaaaaagttgaccaatcgctatcgctcggtttcagagatgtatgtagacttgtctagtagcttgtcctacaatcgtagaaatgaaagtaagttaatctttgatgaaacgagcaaggcagataccaagaccttgccgaaggtttctcagagtaccttgacatctattcctaaggttcaagcgcagacagaacacaaatcaatcaaaaacccaagccaggctgtgacagaggaaacttaccaaccacaagcaccgaaaaaacatagatttaagatgcgttacctgattttgttggccagccttgtattggtggcagcttctcttatttggatactatccagaactcctgcaaccattgccattccagatgtggcaggtcagacagttgcagaggccaaggcaacgctcaaaaaagccaattttgagattggtgaggagaagacagaggctagtgaaaaggtggaagaagggcggattatccgtacagatcctggcgctggaactggtcgaaaagaaggaacgaaaattaatctggttgtctcatcaggcaaacaatccttccaaattagtaattatgtcggccggaaatcttctgatgttatcgcggaattaaaagagaaaaaagttccagataatttgattaaaattgaggaagaagagtcgaatgaaagtgaggctggaacggtcctgaagcaaagtctaccagaaggtacgacctatgacttgagcaaggcaactcaaattgttttgacagtagctaaaaaagctacgacgattcaattagggaactatattggacggaactctacagaagtaatctcagaactcaagcagaagaaggttcctgagaatttgattaagatagaggaagaagagtccagcgaaagcgaaccaggaacgattatgaaacaaagtccaggtgccggaacgacttatgatgtgagtaaacctactcaaattgtcttgacagtagctaaaaaagttacaagtgttgccatgccgagttacattggttccagcttggagtttactaagaacaatttgattcaaattgttgggattaaggaagctaatatagaagttgtagaagtgacgacagcgcctgcaggtagtgtagaaggcatggttgttgaacaaagtcctagagcaggtgaaaaggtagacctaaataagactagagtcaagatttcaatctacaaacctaaaacaacttcagctactccttaa

SEQ ID NO: 37948 - DNA, 1317 bp, Streptococcus pneumoniae
ttggtgactaaagtagaaacggctagaagtttagctctagcagtgctagaggatgtttttgtgaaccaagcatattcaaatatcgccttaaataaacacctcaaggggagtcagctctctgcagcagacaagggcttagtgaccgagctagtctatggaacggtagcccgtaaactgactctggaatggtacctatcccactttatcgaagacagagaccagttagacagctggctctatgtccttcttctcatgagtgcctaccaactccgctatttggacaagattccagatcatgctgtggtcaatgaagcagtggaattggccaaactccgtaaaaaaggcagtgaaaaattggtcaacgctgtccttcgccgtatcttgcgtgaagactggccagatattgctagcatcaagcgaaaaaacaagcgtgactccattgcctattctctcccagtttggctagttgccaaactcaaggaagaatacggagaggagagagcaaaagccatctttgaaagcctgttagtgcgaaacaaagccagtattcgtgtaacagacctaagtcgaaaagaggaaatccaagccttgttggaggcgaataattcccttttagcaaccactggtctggttaaggagcaggggcattttgcagggcataatttgtttgcggatggagccattaccatccaagatgagtccagtcagctggttgctccgacgcttgatttacaaggtgatgagcgagtgcttgatgcctgtgcggctccaggtgggaaaacagcccatatagcctcttatcttacgacaggtcaggttactgctctggacttgtacgaccacaagttggatttaattcaagaaaatgcccaacgtctgggagttgaagatcgggttcaaactcaaaaattggatgccagaaaggtgcatgagttttttgaccaggattcctttgataagattttggtggatgctccttgttcaggaatcggtcttttgcgccgaaaaccagatatcaaatacaataaagaaacggcagatttcgcgtccttgcaggaaattcagttagaaatattaggtagtgtttgtcaaatactaggcaaaggtggtataataacttatagcacctgcactatcgtctcagaggagaattttcaagtcgttaaggcctttttagagagtcatcccgagttcgagcaggtaaaactagaacatgaatgtaaggatatcatgaaagacggctgtatcctcattacacctgaattgtatggaagtgatggattcttcatcagtcaatttcgcaagatatcggattag

SEQ ID NO: 37949 - DNA, 315 bp, Streptococcus pneumoniae
atgatgttaaaaccctctattgataccttgctcgacaaggttccttcaaaatattcactcgtaatcttggaagcaaaacgtgcccacgaattggaagcaggtgccccagcaactcaaggtttcaagtctgaaaaatcaactcttcgcgctttagaagaaatcgaatcaggaaacgttacaattcacccagatccagaaggaaaacgtgaagcagtgcgtcgccgtatcgaagaagaaaaacgccgcaaagaagaagaagaaaagaaaatcaaagagcaaattgctaaagaaaaagaagatggtgaaaaaatttaa

SEQ ID NO: 37950 - DNA, 1614 bp, Streptococcus pneumoniae
atggaaatcatgtcgcttgcgattgctgtttttgccgtcatcattggtttagtcattggatatgtcagcatctcagctaagatgaaatcatctcaggaagctgcggagttgatgcttttaaatgctgaacaagaagcaactaatttacgtggacaagctgagcgtgaagcggatttacttgttaatgaagctaaacgtgaaagcaagtctcttaaaaaagaagcactattggaggccaaagaagaagccagaaaataccgtgaagaagtggacgctgaattcaaatcagaacgtcaagaactcaaacaaatcgaaagtcgtttgacagagagagctactagccttgaccgtaaggacgacaatttgacgagtaaagaacaaacacttgaacaaaaagaacaaagtatttctgatagagcgaaaaaccttgatgcgcgtgaagagcaattagaggaagtcgaaagacaaaaagaagcagaactagagcgtattggtgctctgtctcaggcagaagcacgagatattatcttggctcagacagaggaaaacttgaccagggagattgccagtcgcattcgcgaagctgagcaagaggtcaaggaacgttctgacaaaatggctaaggacatcttggttcaagctatgcaacgtatcgctggtgaatatgtagcggagtcaacaaactcaacagttcatctgccagacgatactatgaagggacgcattattggtcgtgaaggtcgtaacattcgtacctttgaaagtttgacaggggtcgatgtgattatcgacgatacaccagaagtggtgaccttgtcaggatttgatccgattcgtcgtgagattgcccgtatgactatggaaatgttgctcaaagatggtcgtatacatccagctcgtatcgaagagttggttgagaaaaaccgtcaagagattgacaataagattcgtgaatacggtgaggctgctgcctatgaaattggtgcgccaaaccttcatccagacttgatgaagattatgggacgtttgcagttccgtacttcatatggacaaaatgttttgcgccattcgattgaggttgctaagttggctggtatcatggcgagcgaacttggtgaaaatgcggctcttgcccgtcgtgctggattccttcacgatatcgggaaagccattgaccatgaggttgaaggtagccacgttgaaatcggtatggaattggcccgtaagtacaaggaacccccagttgtggtgaatacgattgctagtcaccacggagatgttgaagctgagagcgtgatagcagttatcgtcgctgcagcagatgccttgagcgcagcccgtccaggtgctcgtagtgagtctcttgaaagctacatcaagcgtctccatgatttggaagaaattgctaacggctttgaaggagtgcaaactagctttgcccttcaagcaggacgtgaaattcgtatcatggtcaatccaggaaaaatcaaggacgacaaagtcacaatcttggctcacaaagttcgtaagaaaattgaaaacaatctcgattatccaggaaatatcaaggtaaccgtgattcgcgagcttcgtgcagtagattatgctaaataa

SEQ ID NO: 37951 - DNA, 594 bp, Streptococcus pneumoniae
atgtcctatcaagactatatcaactgctcccgtgaggccttgttggaaaaaatggcagagcttctacctgagaaacgtctaacccattgtctaggtgtggagcgtgccgctatggaattagctcagcgctttggtgtagatgttgagaaagcaagtctagcaggtcttcttcatgactatgctaaaaagttgtcagatcaggaatttctagacttgattgaccgttatcagctagatttcgacctcaaaaactggggtaataatgtctggcatggtatggtcggaatttacaaaattcaggaagatttggatttgcatgattctgaaattctgcgagccattgaaattcatacagtcggagctggtcaaatgacagacctagataaggtcatctacgtcgcagactatatcgagcacaatcgggcatttcctggagtggatgtggcgcgtgagattgcaagtctatcgctcaataaggcggtggcctacgaaacagctcgtaccgtggagtatctagctcatcagggattccccatctatccccaaacccttgaaacctataacgcctttgtgcactatttgaaagagaactaa

SEQ ID NO: 37952 - DNA, 1107 bp, Streptococcus pneumoniae
atggaagaaattctctgtattggttgtggagcaaccattcagacgacagataaggctggtcttggttttaccccccagtcggcacttgaaaaaggtttggagactggcgaagtctattgccaacgctgtttccgtctccgccactacaatgaaatcacagatgtccagttgacggacgatgatttcctcaagctcttgcacgaggtgggagacagtgatgctttagtggtcaatgtcattgatatctttgattttaatggatctgtcatcccaggtttaccacgtttcgtctcgggcaatgatgtcctcttggtaggaaataaaaaagatatccttcctaagtcagttaagtctggtaagattagccagtggctcatgaaacgtgcccatgaagaaggtcttcgtccagtcgatgtggtcctaacttcagcacaaaataaatatgccattaaggaagtcattgataagattgaacactaccgtaagggccgcgatgtctatgtggtcggtgtgaccaacgttggaaaatcaactctaatcaatgctattatccaagaaatcacgggtgatcagaatgtcatcactacttcacgctttccagggacaaccttggacaaaatagagattccgcttgacgacggatcttatatttacgatacgccgggaattatccaccgccaccagatggctcactacttgacggccaaaaacctcaagtatgtcagtcctaaaaaggaaatcaagcctaagacctatcagcttaatcctgagcaaaccctatttttaggtggtttgggacgctttgactttatagcaggagaaaagcaaggatttactgctttctttgataatgaactcaaactccatcgtagcaagcttgaaggagctagtgctttctacgataagcacctgggaactcttctgacaccaccaaatagcaaggaaaaagaagatttcccaaggctagtccagcatgtctttaccattaaagataagacagacctagtcatttcaggcctaggctggattcgtgtaacaggcatagcaaaagtcgccgtctgggcaccagaaggcgtcgccgtcgtcacacgaaaagcaattatttaa

SEQ ID NO: 37953 - DNA, 606 bp, Streptococcus pneumoniae
atgagactgatgaaaatatggtataatgaaataaaggagttttatatgcaaaaatttattcaggcttatattgaaaagctagatgtgacaaccattatcgagaatattctaaccaaggtcatttctcttttactgcttttgattgtattttatattgctaaaaaaatgcttcataccatggtgcagagaattgtcaaaccttctctaaaaatgtctcgtcatgatgtcggacgccaaaaaaccatctcacgtttactagaaaatgtgtttaattatacgctatatttctttttactctactgcattttgtcgattttaggtttgccagtttctagtttgctggctggagctggtattgctggggtagcgattggtatgggagcccaaggctttctgtctgatgtcatcaatggctttttcatcctctttgaacgtcaactggatgtgggagatgaggtcgttctgacaaatggaccgattactgtatcgggtaaggttgtcagtgtgggaattcgtacgacacagcttcgtagcgaggagcaagtccttcactttgtccctaaccgaaatatcacagttgttagcaatttctcacgcacagactag

SEQ ID NO: 37954 - DNA, 954 bp, Streptococcus pneumoniae
atgtctattagccaacgtacgaccaagctcatcttagctacctgtcttgcctgcctgtttgcttattttctcaatctttcgtcagcagtttcggctggaattatcgctctcttgagcctatctgatacgcgtagaagtactttaaaactggctcgcaatcgtcttttttctatgcttctagctctggctatcggtgttctagcttttcacttgagcggatttcatatctggagtctcggcctctatctggccttctacgttcctttagcctacaagatgggctgggaaattggcatcacaccaagcactgttttggttagccatctcttggttcaagagtcaacctctccagaccttctagtcaatgaattccttctctttgctatcggtacaggatttgctttactggtcaatctctacatgccttcacgagaagaggaaatccagcactaccacacgctggtggaagaaaagttaaaagatatcctccagcgcttcaaatactatttatccagaggagacggacgcaaccgagcacagctggtagcagaattagacacgcttttgaaagaagccctcagactggtctatttggatcactctgaccacctctttcaccagaccgactaccatatccactactttgagatgagacagcgacaaagtcgtatcctgagaaacatggcccaacagattaacacttgtcaccttgccgccagtgaaagcctgatcttagcgcaactcttttcaaaaattgcaggtcaactgagccagaccaatcctgcttctgatttgctagatgaaattgaacgttatctggaagtcttccggaaccgcagtctgcccaagacaagagaagaatttgaaacccgcgccacccttcttcaactcctacgtgaagccaaaaccttcatccaagtaaaagttgatttttaccaaaaatatagacagtaa

SEQ ID NO: 37955 - DNA, 426 bp, Streptococcus pneumoniae
atggactttcttctattttatgactctaaaaagaaaggagacactatgacctatttggaaaaatggtttgacttcaatcggcgtcagaaagaaattgaaagtctcttggaagagaccattgcccaacagagcgagcaaagtctgaccttgaaagagttctacctgctctactatctggacttggctgaagaaaaatctctacgccagattgacctgccagataagcttcatctgagcccgagcgcagtttctaggatggtggctcgcttggaagctaaaaattgcggtctactcagtcgcatgtgttgccatcaagatagacgctctagttttatctgcctgacaaatgatgggcaaaagacactggcctcgctacaaaagactgtcgaagaaagcttggaagcaggtttggatttcttgatttaa

SEQ ID NO: 37956 - DNA, 669 bp, Streptococcus pneumoniae
atgaaaaaatttgttgctgagttaatcggtacgttcatgcttgtattcgtcgggacaggagctgttgtttttggaaatggtcttgatggccttggtcaccttggaatcgcctttgcctttggtttggcaatcgtggtggcagcctactcaatcggaactgtttcaggtgctcacttgaacccggctgtttcgattgctatgtttgtaaacaaacgtttgtcatcttcagaacttgtaaactacatccttggtcaggttgttggagctttcatcgcttctggcgctgtcttcttcctcttggctaactcaggtatgtcaactgctagtcttggtgaaaatgccttggcaaacggtgtcactgtctttggtggtttcttgtttgaagtcatcgcaactttcttgtttgtattggttatcatgactgtgacttcagaaagtaagggcaatggcgcgattgctggtttggtaatcggtttgtcattgatggcgatgattcttgtcggattgaagattactggactttcagtaaacccagctcgtagcttggcaccagctgtcttggtaggcggcgcagcccttcaacaagtttggattttcatccttgcaccaatcgctggtggagttcttgcagcccttgttgcaaaaaatttccttggaacagaagaataa

SEQ ID NO: 37957 - DNA, 756 bp, Streptococcus pneumoniae
ttggaggctagcatgcagcagtattttgtaaaaggcagtgctatctctcctgtcactatcgaggacaaggaaaccagtaagcatatgtttcaggttatgcgcttgaaagaagaggatgaggttaccttagtctttgatgatggcatcaagcgcttggcgcgcgtgctggatatggaaaatcgtcagtttgagttggtccaagaattaaatgacaatgtggaactaccagttcaagtgaccatcgcatctggatttcccaagggagacaagctggagttcatcgctcaaaaagtaaccgaactgggtgctagccaaatctgggcctttcctgcagactggtcagttgccaagtgggatggcaagaaattgggtaaaaaagttgaaaaactagaaaaaattgcccttggagcagccgagcaaagcaagcgtaatattgtaccaagtattaaacttttcgagaaaaaagcagattttctagctcagctggaccagtttgactctatcatagtagcctatgaagaatcagctaaagaaggagaagccgctgcgcttctgcaagcagtcactggtcttgaaacaggagccaaactgctctttatctttggtccagaaggcggtctctcacctgcagaaatcgaaagttttgaagctaaaggagccgttttggcaggcctaggtcctcgtattttgcgagcagaaacagcaccgctttacgctttatcagcccttagtgttttagtagaattagagaaataa

SEQ ID NO: 37958 - DNA, 1272 bp, Streptococcus pneumoniae
atgccagacaatctcgcgcttcgcatgcgccctaaaaccatcgaccaggtcatcggtcaggagcatctggtcggacctggaaaaatcatccgccgcatggtggaagccaaccgcctgtcctccatgattctatatggccctccgggaatcggcaaaaccagtattgcctctgccatcgctggaacgaccaagtatgcctttcgaactttcaatgcgacagttgatagtaaaaagcgactgcaagaaatctcggaagaagctaaattttctggtggtctcgtcctattgctagacgaaattcatcgactagataagaccaagcaagacttcctcttgcctctcttggaaagtggactggtcatcatgattggagcaacgactgaaaatcctttcttctctgtcactcctgccattcgtagccgtgttcaaattttcgagttggaacctctgtctaaccaagacgtcaaagaggccctgcagatagctctaagtaaccctgaacgtggttttgattttccaatagaactagatgaggatgcgctggatttcatcgcaacctctacaaacggagaccttcgctctgcctttaactcactggacttggctgttctctctacccctgagaatgacgagggcattcgccacatcaccttagacatcatggaaaatagtcttcagagaagctacatcactatggacaaggatggagacggtcactatgatgttctatctgccctgcaaaagtctatccgtggctcagatgtggatgccagtctccactatgctgcccgcttgattgaggctggggatctgcctagtctcgctcgtcgcttgactgttatcgcctatgaagatatcggcttagccaatcctgaggcccagattcataccgtgactgctctggatgctgcccagaagattgggtttccagaagcccgcattctcattgccaatgtcgtgattgatttggccctttctccaaaatccaactcagcctatgtagctatggataaggcacttgctgacctcaaaacatcagggcacttgcctattccgcgacacctgcgtgatgggcactacagtggaagcaaggaactggggaatgcccaagactatctctatccacacaactatcctggaaattgggtcaagcaagactatctgccagaaaaaattcgtaatcatcactatttccaagcagaagatactggtaaatatgaacgggctttggctcaaagaaaggaagctatcgaccgtttgcgaaaaatctga

SEQ ID NO: 37959 - DNA, 171 bp, Streptococcus pneumoniae
atggaatggcttaaacaatatcgatatccaattatcgctggtctcataggcgtatttctggcttgtttgattgtctcctttggcttcttcaaaacaatatttgtattgattttaggagcactgggagttgcagctggattatatatcgaaaaaaactatatagataaataa

SEQ ID NO: 37960 - DNA, 204 bp, Streptococcus pneumoniae
atgtcagtagaagaaaaattaaatcaagctaaaggttctattaaagaaggtgttgggaaagccatcggtgatgaaaaaatggaaaaagaaggagcagctgaaaaagttgtttctaaagtaaaagaagttgccgaagacgctaaagacgctgtagaaggtgctgtagaaggtgttaaaaacatgttgagtggcgacgataaataa

SEQ ID NO: 37961 - DNA, 1224 bp, Streptococcus pneumoniae
atggcatatcaagaaccaaataaagatggattttacggaaaatttggcggacgttttgtcccagaaacattgatgacagcagttttggagttggagaaggcctaccgtgaaagtcaggcagacccaagtttccaagaggaattaaaccaacttttgcgccagtatgtgggacgtgaaactcccctttactacgcaaaaaacttgacccagcatatcggcggagccaagatttatctcaaacgggaagaccttaaccatacaggagcccacaagattaacaatgccttaggacaagtttggcttgccaaacgcatgggtaaaaagaaaattatcgcagaaacgggtgctggtcagcacggtgtggcaactgcaactgctgcagccctctttaatatggaatgtatcatctacatgggtgaggaagatgtcaaacgccaagctctcaatgtcttccgtatggagcttttgggagctaaggtcgaggccgtgacagatggttcgcgcgtgctcaaggatgcggtcaatgcagcccttcgttcatgggtagctaatatcgatgatacccactatatccttggttctaccttggggcctcatccatttccagaaatcgttcgtgacttccaaagtgtcatcggtcgagaggctaaacaacagtaccgtgacttgacaggacaaaatctgccagatgccctagtagcctgtgttggtggtgggtcgaatgccatcggtctcttccatccctttgtagaagatgagtctgtagctatgtatggggctgaagcagctggacttggtgtggatacggagcaccacgcagctaccttgaccaagggtcgtccaggtgtccttcacggttccctcatggatgtgctccaagatgcccatggtcaaattcttgaagccttctctatctcagcaggtttggactatcctggtatcggtccagagcattctcactaccacgatattaaacgtgccagctatgtccctgtgacagacgaagaagccttggaaggattccaactcttgtctcgtgtggaagggattatcccagccttggaatctagccatgctatcgcttttgcggtgaaattggccaaagaacttggaccagaaaagtctatgattgtctgcctatcaggtcgtggggacaaggatgtggttcaagtcaaagaccgcttggaagcagatgcagcaaagaagggagaagctcatgcctaa

SEQ ID NO: 37962 - DNA, 768 bp, Streptococcus pneumoniae
atgagtcaggaatttttagcacgaatcttagagcagaaggcgcgtgaggtggagcagatgaagctggagcaaatccagcctctgcgccagacctatcgcttggcagaatttttgaagaatcatcaggactgcttgcaggtaatcgctgaggtcaagaaagctagccctagtttgggagatatcaatctcgatgtggatattgtgcaacaggcccagacttatgaagaaaacggagcagtgatgatttcggtgttgacagatgaggttttctttaaagggcatttggattatctacgggaaatttccagtcaggtagagattccgacgctcaacaaagactttatcatagatgaaaagcaaatcatccgcgctcgcaatgcaggtgcgacagttatcttgctcattgtggcagccttgtccgaagaacgcctcaaggaactgtatgactacgcgacagagcttggtctggaagtcttggtggagactcacaatctagctgaactagaggtagcccacagacttggtgctgagattatcggggtcaacaaccgcaacttgactacctttgaggtcgacttgcagaccagtgtagatttagccccttactttgaggaaggtcgctattacatttctgaatctgccattttcacagggcaggatgcggaacgactagccccatactttaatggaattttggtagggacagctcttatgcaggcagaaaatgtggtccagagaatcaaggagttgcagattgacaaaggttaa

SEQ ID NO: 37963 - DNA, 1005 bp, Streptococcus pneumoniae
atgaaagagattattgaaaaactagcaaaatttgaaaatttatcaggtgtggaaatgacggatgtcattgagcgtatcgtaactgggcgtgtaactgaagcgcagattgcttctctcctcttagctcttaagatgaagggggaaacacctgaagaacgcacagccattgcccaagtcatgagaggacatgcccagcatattccaactgagattcatgatgccatggacaactgtggtacaggtggggacaagtctttcagttttaatatttccacaactgcagcctttgtcttggctggtggcggtattcacatggccaagcatggtaaccgctcgatttcttctaaatctggttccgcagatgtcctcgaagccttgggaatcaatcttgacctcaaaccagctgaactaggtaaggtctttgataaaactggaatcgtctttctcttcgctaaaaatatgcacccagctatgaaatacatcatgccagctcgtttggaattgggaattccaacgattatgaacttgactggtccactgattcatccaatggctttagaaacacagcttcttggaattagtcgtccagaactcctagaaagtacagctcaggttttgaaaaatatgggtcgcaaacgtgccatcgtggttgctggaccagaagggttggatgaagctggcttgaacggaacaaccaagattgcacttcttgaaaatggcgaaatcagcttgtcaagctttactccagaggatttgggaatggaaggctatgctatggaagatattcgtggtgggaatgctcaggaaaatgcagaaattttgcttagcgttctgaaaaacgaagcaagtccattcttggaaacgacagtcttgaatgctggtcttggtttctatgctaatggtaagattgatagcatcaaggaaggagttgccttggcccgtcaagtgattgctagaggcaaggcccttgaaaaactcagactgttacaggagtaccaaaaatga

SEQ ID NO: 37964 - DNA, 495 bp, Streptococcus pneumoniae
gtgtactattctagtttcaatatactatattatcgcttaccaacatttgcttttatatttgctaaactttcagaaaaaaagttggagtatatgatgctaggtgactgcgtcatgttagtaaacgaaatggaaataacggatcatagagtagataacttatttgaaaaagggaaaaatgagataaaagatccaattggtacaaatagtgttttaaataaaaaaattattttacaaaaaatcagaaaattatctaatcaaccgagtgggtactggataggttcgttggatgagagatttttagaccatgctattattaatcaaatagatgttactagtgaacaaattgttttaatgagcgatggcttttatgaattctatcaaaataatcaaaataaaacttttgaagagttaattaagatgagatttaattcttctgctattgatccaatctatggaaagaaagatgatgcaagtattgtagttattgatgtttga

SEQ ID NO: 37965 - DNA, 1752 bp, Streptococcus pneumoniae
atgcagaataaacaagaacaatggactgtattgaagcgcttgatgtcctatctcaagccttatggactccttacctttttggcactcagttttctcctagcgacgacggtcattaaaagtgtcattccccttgtggcttcccactttatcgaccagtatctcagcaatcttaaccaactagccgtgaccgttttgctggtctactatggtctctacatcctacaaactgtagttcagtatgtcggcaatcttctctttgcgcgcgtgtcttacagtattgttagggatattcgtcgggatgcctttgccaatatggagaaactgggcatgtcttactttgacaagacgccagcaggttctatcgtttctcgtttgaccaacgataccgagacgattagtgatatgttttctgggattttatccagctttatctcagcagtttttatctttctgacaaccctttataccatgttggtgctggattttcgtttgacagcattagtcttgctctttctccccttgattttccttttggtcaatctctatcgaaaaaagtcagtgaaaatcatcgagaaaaccagaagtctcttgtcagatatcaatagtaagctggcagagaatatcgagggaatcaggattattcaggcttttaatcaagagaagcgcctgcaggcagaatttgatgaaatcaaccaagagcacttggcctatgccaaccgttctgtagccttggatgccctctttttgagacctgccatgagtttgttgaaacttctaggttatgctgtcttgatgacctattttggctatcgtggtctttctatcgggataacggccgggaccatgtatgcttttatccagtacatcaaccgcctctttgaccctttgattgaggtgacgcaaaacttttcaacactgcaaacgtctatggtttctgcaggccgtgtctttgccttaatcgatgagaggacctatgagccccttcaagaaaatgggcaagccaaagtcaaagaaggcaatatccgttttgaacatgtgtgtttctcgtatgacggtaaacatccgattctggatgacatttctttctctgttaataagggtgaaaccattgcctttgtaggtcatacaggttcagggaaatcgtctattatcaatgtcctcatgcgcttttatgaattccagtcagggagagttctcttggatgatgtggatatcagggatttcagtcaagaagagctgagaaaaaacatcggtttggttttacaggaacccttcctctatcatggaactattaagtccaatatcgccatgtaccaagaaatcagtgatgagcaggttcaggctgcggcagcctttgtggatgcagattcctttattcaagaacttcctcaggggtacgactcccctgtttccgagcgtggttcgagcttctctactgggcagcgccagcttcttgcctttgctagaacagtcgccagccagcctaaaatcctgattttggatgaagcgacagccaatattgactctgaaacagaaagtttggttcaagcttctctggcgaagatgagacagggccgaacaactattgctatcgctcaccgcctttctactattcaagacgccaactgcatctatgtcttggataagggacgcattatcgagagtggaacccatgaggaactcttgactctgggaggaacctatcacaagatgtatagtttgcaggcaggggccatggcctatactctttga

SEQ ID NO: 37966 - DNA, 1521 bp, Streptococcus pneumoniae
atgactaatttaattgcaacttttcaggatcgttttggtgattggttgacagccctatctcaacatttgcagttgtcacttttgaccttgttactagctattttgcttgcgattcccttggctgtttatcttcgctatcatgagaagttggcggattgggtcttacagattgcagggattttccagaccatcccgtctctggccttgttgggactctttattcccttgatgggaattgggactttaccggcattgacagctctagtgatttatgcgatttttccgattttacaaaatactattactgggctgaagggaattgatccgagtcttcaagaggctgggattgcctttgggatgaccagatgggagcgtctcaagaagtttgaaattccacttgccatgcctgttatcatgtctggaattcggacggcagcggtcttgattatcggtacggctaccttggcgaccttgattggggcagggggactgggttcctttatcctgttgggaattgaccgtaataatgccagtttgattttgattggggccctttcttctgcagtgctagctattgcctttaacttcctactaaaagtaatggaaaaagcgaaattgcggacgattttctctggttttgccttgatggctttattactgggtctgtcttatagtccagcccttttggctcaaaaagagaaggaaaacttgattattgctgggaaaataggcccagaaccagaaattttggctaatatgtataaattgctgattgaagaaaataccagcatgactgcgactgttaaaccgaattttgggacgacaagtttcctttatgaagctctgaaaaaaggtgatattgacatttatcctgaatttaccggtacggtgactgaaagtttgcttcaaccatcacccaaggtgagtcatgagccagagcaggtttatcaagtggcgcgtgatggcattgccaagcaggatcatctagcctatctcaaacctatgtcttatcaaaatacctatgctgtagctgttccgaaaaagattgctcaagaatatggcttgaagaccatttcggatttgaaaaaagtggaagggcagctgaaggcaggctttacgcttgagtttaacgaccgtgaagatggaaataagggcttgcaatcaatgtatggtctcaatctcaatgtggcgactatgcagccagctcttcgttatcaggcaattcattcaggggatattcaaatcacggatgcctattcgactgatgcggaattggagcgttatgatttacaggtcttggaagatgacaagcaactcttcccaccttatcaaggggctccactcatgaaagaagctcttctcaagaaacacccagagttggaaagagttcttaatacattggctggtaagattacagaaagccagatgagccagctcaactaccaagtcggtgttgaaggcaagtcagcaaagcaagtagccaaggagtttctccaagaacaaggtttgttgaagaaatga

SEQ ID NO: 37967 - DNA, 975 bp, Streptococcus pneumoniae
atgaaaggacggggtatgaaactttctcattatttaattggcttacttctactcctagtctttctctctattagcattgggaccagtgatttttcatggggaaagctatttgatttcgaccagcagacctggctcctctttcaagagtcccgtctcccaagaactatcagtattctcctgactgcctctagtatgagtatggcaggccttctcatgcagactattacccaaaatcagtttgctgcaccgagtacagttggaacgactgaagccgccaaactgggaatggtgctgagcctttttgtctttccatcggctagtctgacccaaaagatgctcttcgcttttgtttcatccatcgtattcaccctcttcttcctagcctttatgaccatttttactgtaaaggaaaggtggatgttgcctctgattgggatcatctatagcgggattatcggctcagtcacagaagttatcgcctatcgtttcaatctggttcagagtatgactgcctggacccagggctccttctccatgattcagacccatcagtatgagtggctcttcttaggcctcatcatcctgataaccgtttggaaattatcccaaaccttcaccatcatgaatctagggaaagaaaccagcgagagtttggggatttcctactccctacttgaaaaactggccctctttctggtggcgctaacgacaagcgtcaccatgattaccgtgggtggcctaccatttctcggagttatcgttcccaatcttgttcgcaagcgctatggagataatctaagtcaaaccaaactcatggtcgcactggttggtgccaatctagttctggcttgcgatatcctatcccgagttctgattaggccctatgagttgtctgtcagtctcttgctaggaatcatcggtagtctcgtctttatcctacttctctggagagggggacgaaaagatgcagactaa

SEQ ID NO: 37968 - DNA, 723 bp, Streptococcus pneumoniae
atgagaatcaataagtatattgcccacgcaggtgtggccagtaggagaaaagcagaagagctgatcaagcaaggtttggtgacagttaacggacaagtggtgcgtgaactagcaaccactatcaagtcaggcgacaaggtcgaagttgaaggtcaacctatctacaacgaagaaaaggtctattatctgcttaacaaaccacgcggtgtcatttccagtgtaacagatgacaagggtcgcaagacggttgtcgacctcttgcccaatgtcaaagagcgcatttaccctgtgggtcgtttggactgggatacatcaggagtcttgattttgaccaatgatggggactttacagacgagatgattcaccctcgtaatgagattgacaaggtttatgtcgcgcgtgttaaaggtgtggccaataaggacaatcttcgccccttgacccgtggtcttgagattgatggtaagaaaaccaagccagctgtttatgaaattctcaaagtggacccagtcaaaaatcgctctgtggtgcagttgaccatccatgaagggcgtaaccatcaggttaaaaagatgtttgaagctgttggtctccaagtagataagttgtctcggactcgtttcggacacctagacttgacaggactccgtccaggagaatcccgtcgtcttaataaaaaagaaatcagccaactacacaccatggctgtaactaagaaataa

SEQ ID NO: 37969 - DNA, 1011 bp, Streptococcus pneumoniae
atggctggaaaaagagattcatgtggagcatgtagaattatgacaaataaaatttatgaatataaggatgaccagaactggtatgttgggtcttatagtatttttggtggcgttaacagtttgagcgactataaggcagattttcctctgtttgaattctccaaaatatttggagatgaagagtatggtttcccgctttcagttactgttttacgctatggttctacctaccgtttgttctcctttgtggtagacatgcttaatcaagaaatgggacgaaacttggaagttattcaacgtcatggggccctgctcttggttgaaaatgggcaactcttgtatgtagaattgcctaaagaaggggtcaatgttcatgatttctttgagacaagcaaggtcagagaaaccttgttgattgcgactcgtaacgaaggtaaaaccaaggaattccgagctatctttgataagttaggctacgatgtggaaaatcttaatgactaccctgacctgcctgaagtagcagaaacaggtatgacctttgaagaaaatgcccgccttaaggcagaaaccatttctcaattaacgggcaagatggttttggcagatgattctggtctcaaagtcgatgtccttggtggcttaccaggcgtctggtcagctcgtttcgcaggtgtgggagcaactgaccgtgaaaataatgccaaactcttgcacgaattggccatggtctttgaactcaaggaccgctcggctcagttccacacaaccctagtcgtagccagcccaaataaggaaagtttagttgttgaagcagactggtcaggttatattaactttgaacctaagggtgaaaatggctttggctatgatcccctcttccttgtaggagagacaggtgagtcatcagctgaattaaccctggaagaaaaaaatagtcaatctcaccgtgccttagccgttaagaaacttttggaggtatttccatcatggcaaagcaaaccatcattgtaa

SEQ ID NO: 37970 - DNA, 795 bp, Streptococcus pneumoniae
atggataatcgaccaattggttttttggattcgggtgtcgggggcttgaccgttgtgcgcgagctcatgcgccagcttccccatgaagaaatcgtctatattggagattcggcgcgggcgccctatggcccccgtcctgctgagcaaattcgtgaatatacttggcagctggtcaactttctcttgaccaaggatgtcaaaatgattgtcattgcttgtaacactgcgactgcggttgtctgggaagaaatcaaggctcaactagatattcctgtcttgggtgtaattttgccaggagcttcggcagccatcaagtccagtcaaggtgggaaaatcggagtgattggaacgcccatgacggtacaatcagacatataccgtcagaaaatccatgatctggatcccgacttacaggtggagagcttggcctgtcccaagtttgctcccttggttgagtcaggtgccctgtcaaccagtgttaccaagaaggtggtctatgaaaccctgcgtcccttggttggaaaggtggatagcctgattttgggctgtactcattatccactccttcgccctattatccaaaatgtgatggggccaaaggttcagctcatcgatagtggggcagagtgcgtacgggatatttcagtcttactcaattattttgaaatcaatcgtggtcgcgatgctggaccactccatcaccgtttttacacaacagccagtagccaaagttttgcacaaattggtgaagaatggctggaaaaagagattcatgtggagcatgtagaattatga

SEQ ID NO: 37971 - DNA, 711 bp, Streptococcus pneumoniae
atgaagaaataccaacaattatttaagcaaatccaagaaaccattcaaaacgagacttacgctgtcggagattttcttcctagcgagcacgaccttatggagcaatatcaagtgagtcgtgataccgtccgaaaggccctgtctctcctccaagaggaaggattgatcaaaaagataagagggcaaggttctcaagtcgtcaaagaagaaaccgtcaatttccctgtatccaacctaaccagctaccaagaactagttaaagaacttggactgcgctctaaaaccaacgtggtcagtctggacaagattattattgataaaaaatcctcactgataaccggtttcccagagtttcggatggtttggaaggtggtccgccagcgtgtggtggatgatctggtatccgttctggatacggactatctggatatggaactaatcccaaatctcactcgccaaatcgctgagcagtctatctattcttatatagaaaatggcctcaaactccttattgattatgctcagaaggaaatcaccattgaccactcaagcgaccgagacaagattctcatggacattggcaaagacccttatgtcgtttcgattaaatcaaaagtctatctccaagacggacgccaatttcagtttaccgaaagtcgccataagttagaaaaatttagatttgtagattttgcaaaacgcaagaaataa

SEQ ID NO: 37972 - DNA, 1068 bp, Streptococcus pneumoniae
atgacaaaagaaaaaaatgtaattttgactgctcgcgatattgtcgtggaatttgacgttcgtgacaaagtattgacagccattcgcggcgtttcccttgaactagtcgaaggagaagtattagccttggtaggtgagtcaggatcaggtaaatctgttttgacaaagaccttcacaggtatgctcgaagaaaatggtcgtattgcccaaggtagtattgactaccgtggtcaggacttgacagctttatcttctcacaaggattgggaacaaattcgtggtgctaagattgcgactatcttccaggacccaatgactagtttggaccccattaaaacaattggtagtcagattacagaagttattgtaaaacaccaaggaaaaacagctaaagaagcgaaagaattggccattgactacatgaataaggttggcattccagacgcagatagacgttttaatgaatacccattccaatattctggaggaatgcgtcaacgtatcgttattgcgattgcccttgcctgccgacctgatgtcttgatctgtgatgagccaacaactgccttggatgtaactattcaagctcagattattgatttgctaaaatctttacaaaacgagtatcatttcacaacaatctttattacccacgaccttggtgtggtggcaagtattgcggataaggtagcggttatgtatgcaggagaaatcgttgagtatggaacggttgaggaagtcttctatgaccctcgccatccatatacatggagtctcttgtctagcttgcctcagcttgctgatgataaaggggatctttactcaatcccaggaacacctccgtcactttatactgacctgaaaggggatgcttttgccttgcgttctgactacgcaatgcagattgacttcgaacaaaaagctcctcaattctcagtatcagagacacattgggctaaaacttggcttcttcatgaggatgctccaaaagtagaaaaaccagctgtgattgcaaatctccatgataagatccgtgaaaaaatgggatttgcccatctggctgactag

SEQ ID NO: 37973 - DNA, 1194 bp, Streptococcus pneumoniae
ttgaaatcaataggctttattgaaaagctgaaggggttgtctagtaaagagctgattttattgggaattatcctaagtatctttttacccttttatctttttgtagttgtactctgtttatatattatcagtttgatttttacaggagacatgaaaagtattcttcagaaaatgggggagcatccgatgctgcttctttttcttagctatagtactgttatatccattcttgcacaaaattggatgggtcttgtggcttcagtaggaatgtttctatttactattttctttttgcactatcagtcgattttatcccataaattctttcgattgattttgcagttcgtcttgtttggtagtgtcttgtcagctgcttttgccagtttagaacatttccaaattgtgaagaaatttaactatgcttttctttcacccaatatgcaggtgtggcatcagaaccgggcagaagtgaccttctttaatcctaattattatggaattatttgttgtttctgtattatgattgctttctatctgtttacaacgaccaagttgaattggttgaaagtattctgtgtgattgcaggctttgttaatctctttggtttgaactttactcaaaatcgaactgcctttcctgctattatcgctggagcaattatctatctctttacgactattaaaaactggaaggccttttggcttagtattggggtcttcgcgattggtttgagtttcctcttttctagtgatttgggagttcgaatgggtactttagactcttctatggaagaacgcatttctatctgggatgctgggatggccttgtttaagcaaaatcctttttggggtgaagggccattgacctatatgcactcttatcctcggatacatgctccttatcatgaacatgcccacagtctttatattgatacgattctgagttacggaattgtgggtaccattttattagttttgtcttctgttgctcctgttcgcttgatgatggatatgagtcaggagtcggggaaacgtccgattatcggcctttatctatctttccttacagtggttgctgtgcacggaatttttgacttggctctcttctggattcagtcaggctttattttcttgctagttatgtgcagtattccattggagcatcgaatgttggtatcggacatgacggattaa

SEQ ID NO: 37974 - DNA, 1260 bp, Streptococcus pneumoniae
atggaatggtataaaaaaatcggacttcttgcaactacaggtttagctttgtttgggctcggcgcttgctccaactatggtaaatctgcggatggcacagtgaccatcgagtatttcaaccagaaaaaagaaatgaccaaaaccttggaagaaatcactcgtgattttgagaaggaaaaccctaagatcaaggtcaaagtcgtcaatgtaccaaatgctggtgaagtattgaagacacgcgttctcgcaggagatgtgcctgatgtggtcaatatttacccacagtccatcgaactgcaagaatgggcaaaagcaggtgtttttgaagatttgagcaacaaagactacctgaaacgcgtgaaaaatggctacgctgaaaaatatgctgtaaacgaaaaagtttacaacgttccttttacagctaatgcttatggaatttactacaacaaagataaattcgaagaactgggcttgaaggttcctgaaacctgggatgaatttgaacagttagtcaaagatatcgttgctaaaggacaaacaccatttggaattgcaggtgcagatgcttggacactcaatggttacaatcaattagcctttgcgacagcaacaggtggaggaaaagaagcaaatcaataccttcgttattctcaaccaaatgccattaaattgtcggatccgattatgaaagatgatatcaaggtcatggacatccttcgcatcaatggctctaagcaaaagaactgggaaggtgctggctataccgatgttatcggagccttcgcacgtggggatgtcctcatgacaccaaatgggtcttgggcgatcacagcgattaatgaacaaaaaccgaactttaagattgggaccttcatgattccaggaaaagaaaaaggacaaagcttaaccgttggtgcgggagacttggcatggtctatctcagccaccaccaaacatccaaaagaagccaatgcctttgtggaatatatgacccgtccagaagtcatgcaaaaatactacgatgtggacggatctccaacagcgatcgaaggggtcaaacaagcaggagaagattcaccgcttgctggtatgaccgaatatgcctttacggatcgtcacttggtctggttgcaacaatactggaccagtgaagcagacttccataccttgaccatgaactatgtcttgaccggtgataaagaaggcatggtcaatgatttgaatgccttctttaacccgatgaaagcggatgtggattag

SEQ ID NO: 37975 - DNA, 861 bp, Streptococcus pneumoniae
atgctagttttttcagaataccagactggaacaattgaccttgccctaagcttttatggatatgaggaatgcacacctaattactcttttggtccagccattcgtgatacatacgtcctacattacattagtaaaggacaaggaaaatttcattacaagggtaaaattgttgatttaaaagaaggagatttctttctattaaaaccagaggaactaaccttttatcaagcagatagtaaagaaccttgggcctactactggttaggaatcactggagggaaatcccctgattattttgctctttctcaaatttctgatcaatcctatctcatccaatctgaaacttgtcatacccagactactgcaaaactcatctcagacattgtccgcttcgctcagattacaaaatcaagtgaattagctcaactccatatcatgggacaacttcatgaactgatgtttcatctgggaactattgctcccaatcagaaaaaaaagaatatttcatcaacccaccaactctatcttgaatgcaaacgattaattgatagccactatcctcaatcacttacaattcaagatttagcaaaagaactatccgttcacagaagctacttatcaagcgtattcaaagaatttaataccttatcacccaaagaatacctactctacgttcgaatgcaccgagctagacaacttctcgaaaatacccaagagtccatcaaggtaattgcatactcggtaggtttttcagatccactccatttttcgaaagcttataaacaatactttaatcagtctccaagtcatacaagaaaagaatactctcaataccaactagtgagaaaggcaacattatga

SEQ ID NO: 37976 - DNA, 861 bp, Streptococcus pneumoniae
atgcgcttgatttttaatggtattttttgtttcactttcagattcatacccctatcttatcacattttgagttataatagagctatgaaaatcacaaaacttgaaaagaaaaaaagactctatctgatggagcttgataatggcgacaaatgctatatcaccgaagatacaattgttcgttttatgttatcgagagataaggtgataagcgaagaggaattgaaagagattcaagactttgctcaattttcttatggtaagaatctggccctctaccacttatcctttaaagcacgcactgaaaaagaagtcagagaatatctgaaaaaatacgatattgataaaaacatcgtttctcaagttattgctaatcttaaagaagataagtggattaatgatggtcagtacgcttatgctatcatcaataccaatcaactttcaggagacaagggtccttatgtgctgactcagaaactagctcaaaaagggatttcaaaatctactatagaagagaacttgaaagaatttgatttttctgaagttgctcaacgtgtagctaataaactattgaaaaaatatgagggaaaacttccagctcgtgccttgcaagataagattatccagaacttgactaacaagggcttctcttattctgatgctaaaattgcctttgacgacttagatagccaagttgaccaagaaacgactcaagaactcatcttcaaggaacttgataagcaatatactaagtatgctcgaaagtatgaaggatacgaactgaagcagcgtttaactcaagttttagcacgaaagggctacgatttttcggatatagcaagcgctcttagagaatatctttaa

SEQ ID NO: 37977 - DNA, 1623 bp, Streptococcus pneumoniae
atgtcaaaagaaattaaattttcatcagatgcccgttcagccatggttcgtggtgtcgatatccttgcagacactgttaaagtaaccttgggaccaaaaggtcgcaatgtcgttcttgaaaagtcattcggttcacccttgattaccaatgacggtgtgaccattgccaaagaaatcgaattggaagaccattttgaaaatatgggtgctaagttagtatcagaagtagcttctaaaaccaatgatatcgcaggtgacgggactacgactgcaacagtcttgacccaagctatcgtccgtgaaggaatcaaaaacgtcacagcaggtgcaaatccaatcggtattcgtcgtgggattgaaacagcagttgccgcagcagttgaagctttgaaaaacaacgccatccctgttgccaataaagaagctatcgctcaagttgcagccgtatcttctcgttctgaaaaagttggtgagtacatctctgaagcaatggaaaaagttggcaaagacggtgtcatcaccatcgaagagtcacgtggtatggaaacagagcttgaagtcgtagaaggaatgcagtttgaccgtggttacctttcacagtacatggtgactgatagcgaaaaaatggtggctgaccttgaaaatccgtacattttgattacagacaagaaaatttccaatatccaagaaatcttgccacttttggaaagcattctccaaagcaatcgtccactcttgattattgcggatgatgtggatggcgaggctcttccaactcttgttttgaacaagattcgtggaaccttcaacgtagtagcagtcaaggcacctggttttggtgaccgtcgcaaagccatgcttgaagatatcgccatcttaacaggcggaacagttatcacagaagaccttggtcttgagttgaaagatgcgacaattgaagctcttggtcaagcagcgagagtgaccgtggacaaagatagcacggttattgtagaaggtgcaggaaatcctgaagcgatttctcaccgtgttgcggttatcaagtctcaaatcgaaactacaacttctgaatttgaccgtgaaaaattgcaagaacgcttggccaaattgtcaggtggtgtagcggttattaaggttggagccgcaactgaaactgagttgaaagaaatgaaactccgcattgaagatgccctcaacgctactcgtgcagctgttgaagaaggtattgttgcaggtggtggaacagctcttgccaatgtgattccagctgttgctaccttggaattgacaggagatgaagcaacaggacgtaatattgttctccgtgctttggaagaacccgttcgtcaaattgctcacaatgcaggatttgaaggatctatcgttatcgatcgtttgaaaaatgctgagcttggtataggatttaacgcagcaactggcgagtgggttaacatgattgatcaaggtatcattgatccagttaaagtgagtcgttcagccctacaaaatgcagcatctgtagccagcttgattttgacaacagaagcagtcgtagccaataaaccagaaccagtagccccagctccagcaatggatccaagcatgatgggcgggatgatgtaa

SEQ ID NO: 37978 - DNA, 627 bp, Streptococcus pneumoniae
atgatttttacgtataacaaagaacatgtcggtgatgtccttatggtcatcgtgaaaaatagcggagatgccaaactgaatgtggaacgtaaaggcaaggtagcccgtgttttcctcaaagaaaatggggaaacagtagcttggaacatttttgaggtttcgagcttgtttgaaattgcagagcgcggtcaagtctttttatcagatgagcaagtcgctcgtttgaaccaagaattacaggcggaaggttttacagaagaaattgttaatgataaggaacctaagtttgttgttggtgaaattgtcgagatggtagctcatccagacagtgaccacctcaacatctgccaagttgcagtcgcaagtgacaagatagtgcaaatcgttgcaggagcacctaatgcgcgtgttgggttgaaaaccattgtggctcttcctggtgccatgatgccaaaagggaatttcattttcccaggcgaacttcgtggtgaaaagagttttgggatgatgtgtagtcctcgtgaattgcatttgccaaatgctccgcaaaaacgtggggtgcttgaattatcagaagaccaagttgtcggaacaccgttcgacccagcgaaacactggactgcctag

SEQ ID NO: 37979 - DNA, 717 bp, Streptococcus pneumoniae
atgggacgtaaatgggccaatatcgtagccaagaaaacggctaaagatggagccaactctaaagtatatgcaaaatttggtgtagaaatctatgtagcagctaaaaaaggtgatccagatccagaatcaaactcagctttgaaattcgttatcgaccgtgctaaacaagcccaagtgccaaaacacattatcgataaagcgattgataaagccaaaggaaacacagacgaaacctttacagaaggacgttacgaaggttttgggccaaatggctctatgctaattgtggatactttgacttctaacgttaaccgtacagcagccaatgtccgtgcagcctttggtaaaaacggcggaaacatgggcgcttcaggttctgtttcttacctttttgacaacaaaggtgttattgtatttggaggtgaagatgcggacgcagtctttgagcaattgctcgaagcggatgtggatgtggatgacgtagaagcacaagaaggtacaatcacagtttacacagcgccaactgaccttcacaaggctatcgttgctctccgtgagtctggtattgaagaattccaagtgactgaattggaaatgattcctcagtcagaagtggaattgtcaggcgaagaccttgaaacctttgaaaaactttacagcgttcttgaagacgacgaagacgtccaaaagatttatacgaacgtagatgggttttaa

SEQ ID NO: 37980 - DNA, 1167 bp, Streptococcus pneumoniae
atggcgaaaaaaccaaaaaaattagaagaaatttcaaaaaaatttggggcagaacgtgaaaaggccttgaatgacgctcttaaattgattgagaaagactttggtaaaggatcaatcatgcgtttgggtgaacgtgcggagcaaaaggtgcaagtgatgagctcaggttctttagctcttgacattgcccttggctcaggtggttatcctaagggacgtatcatcgaaatctatggcccagagtcatctggtaagacaacggttgcccttcatgcagttgcacaagcgcaaaaagaaggtgggattgctgcctttatcgatgcggaacatgcccttgatccagcttatgctgcggcccttggtgtcaatattgacgaattgctcttgtctcaaccagactcaggagagcaaggtcttgagattgcgggaaaattgattgactcaggtgcagttgatcttgtcgtagtcgactcagttgctgcccttgttcctcgtgcggaaattgatggagatatcggagatagccatgttggtttgcaggctcgtatgatgagccaggccatgcgtaaacttggcgcctctatcaataaaaccaaaacaattgccatttttatcaaccaattgcgtgaaaaagttggagtgatgtttggaaatccagaaacaacaccgggcggacgtgctttgaaattctatgcttcagtccgcttggatgttcgtggtaatacacaaattaagggaactggtgatcaaaaagaaaccaatgtcggtaaagaaactaagattaaggttgtaaaaaataaggtagctccaccgtttaaggaagccgtagttgaaattatgtacggagaaggaatttctaagactggtgagcttttgaagattgcaagcgatttggatattatcaaaaaagcaggggcttggtattcttacaaagatgaaaaaattgggcaaggttctgagaatgctaagaaatacttggcagagcacccagaaatctttgatgaaattgataagcaagtccgttctaaatttggcttgattgatggagaagaagtttcagaacaagatactgaaaacaaaaaagatgagccaaagaaagaagaagcagtgaatgaagaagttccgcttgacttaggcgatgaacttgaaatcgaaattgaagaataa

SEQ ID NO: 37981 - DNA, 1257 bp, Streptococcus pneumoniae
atgaaagcagaaatcattgctgttggaacagagattttgacaggacagattgtcaacaccaatgcccagtttttgtcggaaaaactagctgagattggggtagatgtatattttcagacggctgtaggagacaatgaagttcgtctcttgtctttgcttgagattgccagtcaacgtagcagtctggtgattttgacaggcggtttgggggcaactgaggacgacctaaccaaacaaaccctagctaaatttttagggaaagcattagtctttgatcctcaggctcaggagaagttggatatcttttttgccctgcgaccagactatgcccgaacaccgaataacgaaagacaagctcaaattgtagaaggagcgattccactgccaaacgaaacaggactggctgttggaggaaaattagaagtagacggagtgacctatgtcgtccttccaggtccgccaagtgaattgaaacccatggtcttaaaccaacttctacccaagttgatgacagggagcaagctgtattcccgagttcttcgtttctttgggattggcgagagccagttggttacgattttggctgatttaattgataatcagatcgatcctaccttggccccttatgccaagacaggagaagtcactctacgtctgtcaacaaaggctagcagtcaagaagaggcgaatcaagcgctggatatcttggaaaatcaaatcttggactgccagactttcgaaggaatttctttacgagacttttgctatggttatggggaagaaactagtttagccagcattgtggtagaagaactgaaaaggcaagggaaaaccatcgcggctgcagagagtttgacggcaggtcttttccaagctaccgtggcgaatttttctggagtttcaagtatatttgagggtggttttgtgacctatagcttggaggaaaaatcaaggatgttggatattcctgccaagaatttggaagaacatggtgtggtgtctgaatttacagctcagaagatggctgagcaggcacgaagcaagacccagtctgattttggaattagtttgactggagtggcaggaccagatagcctagaaggacacccagttgggacagtcttcataggcttggcgcaagatcaaggaactgaggttatcaaggttaatattggaggcagaagccgagcagatgtacgtcacattgcggttatgcatgcctttaacctagttcgcaaggctttattaagtgactaa

SEQ ID NO: 37982 - DNA, 1017 bp, Streptococcus pneumoniae
atggttaaaaaaattattggaatggtgctagctttactttctgtaactgtagtaggagtaggtgtttttgcttatactatttatcaacaagggacagaaaccttagctaaaacctataaaaaaatcggtgaagaaaccaaggttattgaagcgactgaacctctaaccattctgttaatgggagtggacaccggaaatgttgaacgaactgaaacttgggtcggtagaagtgatagcatgatcttgatgacagtgaatcctaaaacgaaaaaaacaacaatgatgagtttagagcgggatattctgacgcgcattgaatcagggaatggtcaggctcatgaagcgaaactgaactcagcatatgcagatggtggagcagagcttgctatagaaaccattcaaaaaatgatgaatatccatattgatcgctatgtgatggtcaatatgagagggttgcaaaaattagtggatgcagtaggaggtattacagtcaataatatcctaggtttcccaatttctatcagtgaccaagaagaatttaataccatttctatcggtgttggggagcaacatattgggggagaagaagccctagtctatgcacgaatgcgttaccaagatcctgagggggattatggtcgtcaaaaacgtcaacgtgaagttattcaaaaagtcatggaaaaagctctcagtttaaatagcattggtcattatcaagagattctaaaagctttgagtgacaatatgcagaccaatattgatttgtctgcaaaaagtatccctaacttgctaggctataaagattcatttaaaaccattgaaactcagcagttgcagggtgaaggagagatacttcaaggtgtttcttaccagattgtttcgagagcacatatgttggaaatgcaaaatatactccgacgttctttgggacaagaagaagttactcagcttgaaaccaatgcggttttatttgaagatttatttggcagagcacctgttggtgatgaagataattaa

SEQ ID NO: 37983 - DNA, 705 bp, Streptococcus pneumoniae
atgaataaaatatttatatatgcaggagtgcgaaatcataactctaagactttagagtatactaagagactttcaagtatcatttctagtagaaataatgttgatatatctttcaggacacctttcaattcagagctagaaatatctaattctgattcagaagagttgtttaagaaaggaattgataggcaaagtaatgctgatgatggaggtgttataaaaaaagagttattagagtctgatattataattatctcttctcctgtatatttacaaaacgtatctgtggacacaaaaaactttattgaaaggattggggggtggagccatctttttcgattagctggaaagtttgttgtaacattagatgttgctgagagtaacggctctgataatgtgtcagaatatcttagagatatattttcatatatgggaggacagatattacaccaagtttcaattaccaattcactcaaagatattgcagaggctcagttgatggaggcaacttataaaattgaagatgtacttgaagggaaaattaagtacaaaacaacggattatcaagaaagagcttaccagacattaaaattaattttagaaaattatgattccgaacattttgagaagatgtattgggagaaaaaacgcctttttgaagctaatagtttagaggaatggtattatgttgaaaatattaaataa

SEQ ID NO: 37984 - DNA, 3678 bp, Streptococcus pneumoniae
gtggttgatgtaaatcgttttaaaagtatgcaaatcaccctagcttctccaagtaaagtccgttcatggtcttatggagaagtcaaaaaacctgaaacaatcaattatcgtaccttgaaaccagaacgtgaaggactctttgatgaagtgatctttggtcctacaaaagactgggaatgtgcttgtggtaagtacaaacgcattcgttacagaggaattgtttgtgaccgctgtggggttgaagtaacgcgtacgaaagttcgtcgtgagcgtatgggacatatcgaattgaaagctcctgtatctcacatctggtacttcaaggggattccaagccgtatgggcttgacccttgatatgagccctcgtgccctcgaggaagttatctactttgcggcttatgtggtgattgatcctaaggatacaccacttgagcacaagtctatcatgacagagcgcgaataccgagagcgcttgcgcgaatatggttatggttcatttgttgctaagatgggtgcggaagccatccaagaccttttgaagcaagtagatcttgaaaaagaaattgctgaactcaaagaagaattgaaaactgctactggacaaaaacgtgtcaaagccatccgtcgtttggatgttttggatgccttttacaagtctggaaacaaacctgaatggatgattcttaacatccttccggttatcccaccagatcttcgtccaatgttgcagttggatggtggccgttttgcctcatctgacttgaatgacctttaccgccgtgttatcaaccgtaacaaccgtttggctcgtttgcttgagttaaatgcaccaggtatcatcgttcaaaatgagaagcgtatgcttcaagaagcagttgacgctttgattgacaatggtcgtcgtggtcgtccaatcacaggaccaggtagccgtccattgaaatcattgagccacatgcttaaaggtaaacaaggacgcttccgtcaaaacttgctcggtaaacgtgttgacttctcaggacgttccgttatcgccgttggtccaactcttaagatgtaccaatgtggtgtgccacgtgaaatggcgattgaactctttaaaccatttgtcatgcgtgaaatcgttgcccgtgatatcgtgcaaaacgtcaaagcagctaaacgcttggtggaacgcggagatgagcgtatctgggatatccttgaagaagtgattaaagaacacccagtgcttttgaaccgcgcaccgacccttcaccgtttgggtatccaagccttcgagccagtcttgattgatggtaaggctcttcgcttgcacccacttgtctgtgaagcctacaatgctgactttgacggggaccaaatggccatccacgtaccactttcagaagaagcacaagcagaagctcgtatcctcatgctagctgctgagcacatcttgaacccgaaagatgggaaaccggtagttactccatctcaggacatggttttgggtaactactacttgaccatggaagaagctggtcgcgaaggtgaaggaatggtcttcaaagaccgtgacgaagcggttatggcttaccgcaatggttatgttcacctccactcacgtgttggtatcgcaacagacagcctcaacaagccttggacagaagagcaaagacataaggtcttgcttacaacagttggtaaaattctcttcaacgatatcatgccagaggggctaccatacttgcaagaaccaaacaatgccaacttgacagaaggtgttccagctaaatacttcttgccacttggtggagctatcaaggaagctatcagcaatcttgagctcaaccctccattcaagaagaaaaacctcggaaatatcatcgctgaaatcttcaaacgtttccgtacgacagaaacttctgccctacttgaccgcatgaagaacctcggttaccaccactcaactcttgcaggattgacagtgggtattgccgatatcccagtcgttgatgacaaggctgaaatcattgaagaatcacacaaacgtgtcgaacaaatcaccaaacaattccgtcgtggtatgatcacagacgacgagcgttacaatgctgttacagctgaatggcgtgctgcccgtgaaaaacttgagaaacgcttgattgctaatcaagatcctaagaacccaatcgttatgatgatggactctggagcccgtggtaacatctcaaacttctcacagcttgccggtatgcgtggtctgatggctgctccgaatggacgtatcatggaattgccaatcctttcaaacttccgcgaaggtttgtcggtattggaaatgttcttctcaactcacggtgctcgtaaaggtatgaccgatacggcccttaagacagccgactcaggttacttgactcgtcgtttggtcgacgttgcccaagacgttatcatccgtgaggacgactgtggaactgaccgtggtctcttgatccgttctatcgcagaaggaaaagagatgatcgagtctctcgaagagcgtctcaacggtcgttacactaagaaaactgttaaacatccagaaactggtgcagtgattattggtccaaatgaattgattacagaagacaaggcgcgtgaaattgtcaatgctggtgtggaagaagtgactatccgttctgtatttacatgtaacactcgtcgcggtgtctgccgtcactgttacggtatcaacttggcgactggtgatgcggttgaagttggtgaagcagttggtacaatcgctgcccaatctatcggggaacctggtacacagcttacaatgcgtaccttccacacaggtggggttgcctcaaataccgatatcactcagggtcttcctcgtgtccaagaaatctttgaagcccgcaatcctaaaggggaagcggttattacagaggttaaaggacaagttactgctatcgaagaagatgcatcaactcgtaccaagaaagtctttgttaagggtgaaactggcgaaggtgaatatgtcgttccatttacagctcgtatgcgtgtcgaagttgggggccaagtagcgcgtggtgctgctctgacagaaggttctatccaaccaaaacgtctccttgcagttcgtgatgtcttgtcagttgaaacgtaccttctcggtgaagtacaaaaagtttaccgtagccaaggggtagaaatcggtgacaaacacatcgaggtaatggttcgtcaaatgatccgtaaagtccgtgtcatggatccaggtgatacagatcttctcatgggtaccctcatggatatcaatgactttacagatgccaacaaagatgtccttatcgcaggtggagttccagcgacaggtcgcccagtccttatgggaattaccaaagcctcacttgaaacaaacagtttcttgtcagcggcttccttccaggaaacaactcgtgtccttactgacgcagctatccgtggtaagaaagaccatctccttggacttaaagaaaatgttatcatcggtaagatcatcccagctggtactggtatggcccgttaccgtaaccttgaaccacatgctgtcaacgaagaagaataccttaatcctccagtagaggaagaaggaaatgaagaaacaacagaagtagttgtggatactgccgttgaaactgtggaagaaacagtagaataa

SEQ ID NO: 37985 - DNA, 3651 bp, Streptococcus pneumoniae
ttgacaaggcttggaacttatttacaaaggagaatcatcttggcaggacatgacgttcaatacgggaaacatcgtacccgtcgtagtttttcaagaatcaaagaagttcttgacttaccaaatttgattgaaattcaaactgactcattcaaagctttcctagaccacggtcttaaggaagtgtttgaagatgtattgccaatttcaaacttcacagacacaatggagttggaatttgttggatatgaaatcaaggaaccaaaatacacgctagaagaagctcgtatccacgatgctagctactcagcaccaatttttgtaaccttccgtttgatcaataaagaaacaggcgaaatcaagacccaagaagttttctttggtgatttcccaatcatgacagaaatgggtactttcatcatcaatggtggtgaacgtattatcgtttctcagttggtccgctcaccaggtgtttactttaacgacaaagtagacaaaaatggtaaggtgggctatggttcaactgttatccctaaccgtggagcttggttggaacttgaaagcgactcaaaagatatcacctacactcgtatcgaccgtactcgtaagattccatttacaaccttggttcgtgctcttggtttctcaggtgatgatgaaatctttgatatctttggtgacagcgaattggttcgcaacactgttgaaaaagatatccacaagaatccaatggactctcgtacagacgaagccttgaaagaaatttacgaacgccttcgtccaggtgagcctaagacagctgaaagctcacgtagcttgcttgtggctcgcttctttgacccacgtcgctatgacttggcagcagttggtcgttacaaaatcaataaaaaactcaatgttaaaacacgtttgctcaaccaaaccattgcagagccattggtagaccctgaaactggagaaatcttggtagaagctggtacgattatgactcgtagcgtgattgaaagcattgaaagccatttggatggcgacttgaacaagattgtctacatcccaaacgatgcagccgttgtgactgagcctgttgttcttcaaaaattcaaggttgttgctccaactgatccagatcgcgtcgtaacgatcattggtaatgctaacccagatgacaaggttcgtacggtgactcctgcagatatccttgctgagatgagctacttcctcaacttggctgaaggacttggccgtgtagatgatatcgaccaccttggaaatcgtcgtatccgtgcggttggtgaattgcttgccaaccaagtacgtttgggactttctcgtatggaacgtaatgtccgtgaacgtatgtctgttcaggacaatgaagtcttgacaccacaacaaattatcaatatccgtcctgtaacagctgcagttaaagaattctttggttcatcacagttgtcacagttcatggaccaacacaacccgctttctgagttgtctcacaaacgccgtttgtcagccttaggacctggtggtttgactcgtgaccgtgccggatatgaagtgcgtgacgtgcactacactcactatggtcgtatgtgtccaatcgaaacacctgaaggacctaacatcggtttgatcaataacttgtcatcttacggacacttgaacaaatatggttttgttcaaacaccataccgtaaggttgaccgtgaaacaggtgttgtcacgaacgaaattgtttggttgacagctgatgaagaagatgaatatactgtagctcaggctaactctcgtctgaatgaagatggaacctttgctgagaagattgtcatgggacgtcaccaaggggtcaaccaagagtatccagctaatattgttgactacatggacgtttcaccaaaacaggtagttgccgttgcgacagcatgtattcctttcttggaaaacgatgactccaaccgtgccctcatgggagccaatatgcaacgtcaggctgtgccattgattaatcctcaggcaccttacgttggtactggtatggaataccaagcagcccacgattctggtgcggctgtgattgctcagtatgatggtaaagttacttacgcagatgctgacaaggtagaagttcgtcgtgaagatggttcattggatgtttaccacatccaaaaattccgtcgttcaaactcaggtactgcttacaaccaacgcactctcgtaaaagttggtgatgtcgttgaaaaaggcgatttcatcgctgacggaccttctatggaaaatggagaaatggcgcttggacaaaacccaatcgttgcctacatgacttgggaaggttacaacttcgaggatgccgttatcatgagcgaacgcttggtgaaggacgatgtctacacatctgttcaccttgaagaatacgaatcagaaacgcgcgatacaaagcttgggcctgaagaaatcactcgcgaaattccaaacgttggtgaagatgccctcaaagaccttgacgaaatggggattatccgtattggtgctgaggttaaagaaggtgatattcttgtaggtaaagtaacacctaagggtgagaaagatctttcagctgaagaacgtctcttgcacgctatctttggagacaagtctcgtgaagtgcgtgatacttctcttcgtgtaccacacggtgccgatggtgtcgttcgtgatgttaagatctttacacgtgtaaatggagatgagttgcaatcaggtgttaacatgttggttcgtgtttacatcgctcaaaaacgtaagattaaggtcggagataaaatggccggacgtcacggaaacaaaggggttgtctctcgtatcgttcctgtagaagacatgccttaccttccagacggaactccagtcgacatcatgttgaacccacttggggtgccatcacgtatgaatatcggtcaggttatggagcttcaccttggtatggcagctcgtactcttggtattcacattgcgacaccagtctttgatggagcaagttctgaagatctttggtcaactgttaaagaagcaggtatggatagcgatgccaagacaatcctttacgatggacgtacaggtgaaccatttgataaccgtgtttctgttggagtcatgtacatgatcaaactccaccacatggttgacgataaattgcacgcgcgttcagtcggaccttactcaactgttacccaacaaccactcggaggtaaagctcagtttggtggacaacgtttcggtgagatggaggtttgggctcttgaagcctacggtgcgtcaaatgtccttcaagaaatcttgacttacaagtcggacgatatcaacggacgtttgaaagcctatgaagctattacaaaaggcaaaccaattccaaaaccaggtgttccagaatccttccgagttcttgtcaaagaattgcaatctcttggtcttgacatgcgtgtcctagacgaagatgaccaagaagtggaacttcgcgacttggatgaaggaatggacgaagatgtcatccacgtagatgaccttgaaaaagcccgcgaaaaagcagcccaagaggctaaagcagcctttgaagctgaagaagctgagaaagcaacaaaagcggaagcaacagaagaagctgctgaacaagaataa

SEQ ID NO: 37986 - DNA, 1332 bp, Streptococcus pneumoniae
atggaagacccaagtagtcagaatttgttgctacaatttgttttattgtttatcttgacggtattaaatgcctttttctcagccacagaaatggccatggtttctcttaatcgtgcccgagttgaacaaaaggcggaagaaggagacagacgctacatccgcctgctgaaggtactagaaaatcctaaccactttttatcaaccattcaggtaggaatcaccctgattacaatcttatcaggggcgagtttaactaatactctaggacgtgtgattgcctcttggcttgggaatggcgaaacagcacaagccgtggcaacttttctatccttggcatttttgacctatatttccatcgtttttggggaattatatcctaagagaatcgctcttaatctaaaggatgccttggcaattcgtacagcgccgattatcattgggatcggaaaactagtcagtccttttgtttggcttttagctgcttcgaccaatttcttgagccatttgactcctatgtcattcgatgatgcggatgaaaagatgacccgtgatgaaattgcctatatgctgacaaatagtgaagaaacattggatgctgatgagattgagatgctacaaggtgtcttttcgctcgatgaactgatggcacgagaggttatggtgcctcgaacggatgcctttatggtggatattcaggatgatagtcaagccattatccaaagtattttaaaacaaaattattctcgtatcccggtttatgatggggataaggacaatgtaattggaatcattcacaccaagagtctccttaaggcaggctttgtggacggttttgacaatattgtttggaagagaattttacaagatccactttttgtacctgaaactatttttgtggatgacttgctaaaagaactgcgaaatacccaaagacaaatggcaatcttgctggatgaatacggtggtatggctggtttggtgactttggaagacctcttagaggaaattgttggtgaaattgatgatgaaacggacaaagcagcaatagatgttcatcagattggcgaggatacctacattgttcaaggaactatgaccctcaatgatttcaataattactttgatgttgaactggaaagtgatgacgttgataccatcgctggttattatttgacaggagtgggaactattccaacgactgagaaactcagctatgaattggtcagccaaaacaaacagtttatcttaaccaatgataaagtgaagaatggacgtgttaccaaggtaaaagtccaaatcacagaagtcgaaatagaagaagaaacagaataa

SEQ ID NO: 37987 - DNA, 1284 bp, Streptococcus pneumoniae
atggataaaattgtggttcaaggtggcgataatcgtctggtaggaagcgtgacgatcgagggagcaaaaaatgcagtcttacccttgttggcagcgactattctagcaagtgaaggaaagaccgtcttgcagaatgttccgattttgtcggatgtctttattatgaatcaggtagttggtggtttgaatgccaaggttgactttgatgaggaagctcatcttgtcaaggtggatgctactggcgacatcactgaggaagccccttacaagtatgtcagcaagatgcgcgcctccatcgttgtattagggccaatccttgcccgtgtgggtcatgccaaggtatccatgccaggtggttgtacgattggtagccgtcctattgatcttcatttgaaaggtctggaagctatgggggttaagattagtcagacagctggttacatcgaagccaaggcagaacgcttgcatggcgctcatatctatatggactttccaagtgttggtgcaacgcagaacttgatgatggcagcgactctggctgatggggtgacagtgattgagaatgctgcgcgtgagcctgagattgttgacttagccattctccttaatgaaatgggagccaaggtcaaaggtgctggtacagagactataaccattactggtgttgagaaacttcatggtacgactcacaatgtagtccaagaccgtatcgaagcaggaacctttatggtagctgctgccatgactggtggtgatgtcttgattcgagacgctgtctgggagcacaaccgtcccttgattgccaagttacttgaaatgggtgttgaagtaattgaagaagacgaaggaattcgtgttcgttctcaactagaaaatctaaaagctgttcatgtgaaaaccttgccccacccaggatttccaacagatatgcaggctcaatttacagccttgatgacagttgcaaaaggcgaatcaaccatggtggagacagttttcgaaaatcgtttccaacacctagaagagatgcgccgcatgggcttgcattctgagattatccgtgatacagctcgtattgttggtggacagcctttgcagggagcagaagttctttcaactgaccttcgtgccagtgcagccttgattttgacaggtttggtagcacagggagaaactgtggtcggtaaattggttcacttggatagaggttactacggtttccatgagaagttggcgcagctaggtgctaagattcagcggattgaggcaaatgatgaagatgaataa

SEQ ID NO: 37988 - DNA, 1038 bp, Streptococcus pneumoniae
atgaaaaaaaagattagatggcccttatacgtcattgcggccttgattgtgactttcttggcatttgtagtgcccttgccttattatatagaggttccaggtggttcggaagatattcgccaagtccttaaagtaaatgacacagaagataaggaagctggtgcctatcaattcgttacggttggtgttcaacatgccactttagctcatatgatttatgcttggttgacaccttttacagatattcgtagtgctcaggagactacaggtggttcttccgatgttgaatttatgcgaatcaatcaattctacatgcaaacatcgcaaaatatggccaagtatcaaggactaaaaacagctggtaaggatatcgaactcaagtactttggagtttatgttttgaatgtgacggataattcaacctttaaagggattctcaatatctctgatacagtcacagcagtcaatgatcagacctttgatagttccaaagacttgattgattacgtcagttctcaaaaattaggggattccgtcaaggtcacctatgaagaggatgggcaaaccaagtctgcagaaggaaagattatcaccttggaaaatggcaaaaatggaattggaatcggcttgattgatcgtacagaggtaatcagcaatgtcccaattagcttttcaacagctggtattggcggcccaagtgctggtctcatgtttagtctagctatctatactcaaatagctcacccagatcttcgtaatggtcgtattgttgccggtacaggtaccattgaccgcgatggtaatgtgggagacattggaggcattgataagaaggttgtagcttcggctagggcaggtgctgctattttctttgctcctgataaccctgttagcgaagaagaacaaaaggcgcatccggacgcgaaaaacaactaccaaacagccctagaagcggctaaaacaatcaagacggatatgaaaatcgtgcccgttaaaaccctacaagatgcgattgattacttgaaaaacaatccctaa

SEQ ID NO: 37989 - DNA, 759 bp, Streptococcus pneumoniae
ttgtgttataatatttctatgactattataacctcaaaagccaattctgtggtaaaaaatgccaagaaattacaccaaaaaaaataccgcaagtctgcctatttgattgaaggctggcacttgtttgaagaagctgtccaagctggagtgacgattgagaaaatctttgccctagaaaattatcgagatcagttagctgcttttccgcaaactgtctggatttcagaggatattttgctagatttggcggattctcagactccacagggaattgtggcggtggttcaaaaagaagaagtaggacaagctgatttgagtcagggcaagttcttgtttttggaagatgtgcaagatcccggtaatgtaggaactatcattcgaactgcggatgcagcaggttttacaggagtgattgtttcagataagtcggcagacatctacagtctcaaaaccctacgttccatgcaaggtagtcatttccatctgcccatttaccggatgactagtccagcgcttcttgacgaaactaaaaaggtagctatcccagtgctagcaacaaccctatctaaagattctgttgattacagagaactgccttctatagaaaattttgtactagttatgggaaatgagggtcaaggaattagtccccttatggctgaaagtgcagaccagttggtccatattagcatgaaggggcaggccgagagtttgaatgttgcagttgcagccggtattttaatcttccatttaagctaa

SEQ ID NO: 37990 - DNA, 927 bp, Streptococcus pneumoniae
gtgaaatctattaaacgttttgcactctcagctatgggagcggctatgttgcttgtcttgactggttgtgtcaatgtcgataaaaccacaggtcagccaacaggatttatttggaataccatcggagcccctatggctgaagctatcaagtacttcgctactgataaaggtctaggctttggtgtcgctatcatcatcgtaaccattatcgtgcgcttgattatcttgccacttggtatctaccaatcatggaaggcaacgcttcactctgaaaagatgaacgccctcaagcacgtccttgagccacaccaaacgcgtctcaaagaagcgactactcaagaagaaaaactcgaagcccaacaagctctctttgctgctcaaaaagagcacggtatcagcatgtttggcggtgtaggatgtttccctatcctccttcaaatgcctttcttctctgctatctactttgctgcccaacatactgaaggggttgctcaagcaagctacctaggcattcctctaggttctccaagtatgattttggttgcctgtgctggtgtcctttactatcttcaatcgctcctttcacttcacggagtagaagatgaaatgcaaagagaacaaatcaagaaaatgatttacatgagcccactcatgatcgtcgtcttctccctcttctcaccagctagtgtcacactttactgggttgtcggtggtttcatgatgattctccagcaatttatcgtcaactatatcgttcgtccaaaacttcgcaaaaaagtccatgaagaactggcaaagaacccatcaaaagcaagtgctttctcaacaccaagtggacgaaaagacgttacccctgaacaaccaactgctattacaagcaagaaaaaacacaaaaatcgcaacgctggaaaacaacgttcgagataa

SEQ ID NO: 37991 - DNA, 1005 bp, Streptococcus pneumoniae
ttgagttgtcagaaggcgagcctgcgcttgatctactccattttcaagaaaatgaggaagaatatgaagattagtcacatgaaaaaagatgagctatttgaaggcttttacctaatcaaatcagctgacctgaggcaaactcgagctgggaaaaactacctagcctttaccttccaagatgatagtggcgagattgatgggaagctctgggatgcccaacctcataacattgaggcctttaccgcaggtaaggttgtccacatgaaaggacgccgagaagtttataacaatacccctcaagtcaatcaaattactctccgcctgcctcaagctggtgaacccaatgacccagctgatttcaaggtcaagtcaccagttgatgtcaaggaaattcgtgactacatgtcgcaaatgattttcaaaattgaaaatcctgtctggcaacggattgtccgaaatctctacaccaagtatgataaggaattctactcctatccagctgccaagaccaaccaccatgcctttgaaacgggcttggcctatcatacggcgaccatggtgcgtttggcagacgctattagcgaagtttatcctcagctcaataagagcctgctctatgcggggattatgttgcacgacttggctaaggtcatcgagttgacgggaccagaccagaccgagtacacggtcagaggcaatcttcttggacatatcgctctgattgatagcgaaattaccaagacagttatggaactcggcatcgatgataccaaggaagaagtcgttttgcttcgtcatgtcatcctcagtcaccacggcttgcttgaatatggaagtccagtccgtccacgtattatggaggcagagattatccatatgattgacaatctggatgcaagcatgatgatgatgtcaacagctctggctttggtggataaaggagagatgtccaataaaatcttcgctatggataatcgttccttctataaaccagatttagattaa

SEQ ID NO: 37992 - DNA, 1299 bp, Streptococcus pneumoniae
atggttatgtggtcgtactgcatagcaaggacaggaggtaggatggaaagtttacttattctattattaattgccaacctagctggtctctttctgatttggcaaaggcaggataggcaggagaaacacttaagtaagagcttggaggatcaggcagatcatttgtcagaccagttggattaccgctttgaccaagccagacaagccagccagttagaccaaaaagatttggaagtggctgtcagcgaccgtttgcaagaagtgcggattgaattgcaccaaggcctgacccaagtccgtcaagaaatgacagataatctcctccaaactagagacaagacagaccaacgtctccaagccttgcaggaatcaaatgagcaacgtttggaacaaatgcgccagacggtcgaggaaaaactagaaaagaccttgcagacacgcttacaggcttcctttgagatagtttctaaacaactggagtctgtcaatcgtggtcttggagaaatgcagacagttgcccgtgatgtcggagctcttaacaaggttctctctggaaccaagacgcgagggattctgggagaattgcaactggggcaaattattgaagacatcatgacacctgcccagtacgaacgagaatacgcaacggttgaaaactctagtgaacgagtggagtatgccatcaagttacccggacaaggcgaccaagaatacgtctatctgccaattgactctaagtttccactggcagattattaccgcttggaagaagcctatgagacaggtgacaaggatgagattgaacgctgtcgtaagtcactcctagcaagcgtcaagcgctttgccaaggatatcaagagcaagtacatagcaccgcctcggacaaccaattttggaatcttgtttgttccgacagaaggtctttattcagagattgtgcgcaatccggtcttctttgatgatttgagacgggaagaacagattatcgttgcaggaccaagtaccctatcagcccttcttaactccctatcagttggtttcaagacccttaatatccaaaagagtgccgaccatatcagcaagactcttgccagtgtcaagaccgagtttggcaagtttggtggtattctggtcaaggcacaaaaacatctccaacatgcctctggcaatattgatgaattattaaaccgtcgtaccatagctatcgagcggacgctccgtcacattgagttgtcagaaggcgagcctgcgcttgatctactccattttcaagaaaatgaggaagaatatgaagattag

SEQ ID NO: 37993 - DNA, 873 bp, Streptococcus pneumoniae
atgagaattgcagattatagcgtgaccaaggcagtgctggagcgtcacggttttacctttaaaaagtccttcgggcaaaatttcctgacggataccaatatccttcaaaaaattgtggatacggctgaaattgatgatcaggtcaatgtcatcgaaatcgggccaggtattggtgccttgacagaatttttggctgagcgtgcagcccaagtcatggcttttgagattgaccaccgtttggtgccaattttggcagataccctgcgtgattttgataatgtgaccgtagttaacgaagatattctcaaggttgatttggcgcaacatatccaaaattttaaaaatcctaacctgccaatcaaggtagtggctaatttgccttactacatcacgacgcctattctcatgcacttgattgagagtggcattccttttagtgagtttgtggtcatgatgcagaaagaagtagcggaccgcatttcagcccagcctaacaccaaggcttacggtagcttgtctatcgccgtgcagtattacatgacagccaaggttgcctttatcgtgcctcgtacggtctttgtgccagcgccaaatgtggattcagccatcttgaaaatggtgcgtcgtccagagccagccgtagcagtagaagatgagaactttttctttaaggtttccaaggctagttttacccatcgccgcaagaccttgtggaataacttgacaggttactttggtaagactgaagaggtcaaggacaagctgaccaaggctttggaccaggcaggcttgtcaccaagtgtgcgtggggaagctctcagcttggcagaatttgccggtctagcagacgcacttaaagggcaaggactctaa

SEQ ID NO: 37994 - DNA, 561 bp, Streptococcus pneumoniae
atgaaagagagaatttcccaagttatcgtggttgaaggtcgtgatgatacggtcaatctcaagcgttatttcgatgtggagacctatgagactcgaggttctgccatcaatgaccaggacatagagcggattcagcgtctacaccaacgtcatggagtcattgtctttacagacccagattttaatggggagcggattcggcgcatgattatgacggccattccaacagttcagcatgcctttctcaagcgagatgaagctgttcccaagtccaagaccaaggggcgttctctgggaattgagcatgccagctatgaagacctgaaaacggctctagctcaggtgacagaacaatttgaacatgagagtcagtttgacattagtcgtagcgatttgattcgccttggttttctagcaggggcagacagccgtaagcgtagagaatatctcggagagactctccgaatcggctattctaacggcaagcaactcctcaaacgcctagagttgtttggggttactttggcagaagtggaagaagctatgaaatcttatgagtag

SEQ ID NO: 37995 - DNA, 774 bp, Streptococcus pneumoniae
atgatttttgatacacatacacacttgaatgtagaagaatttgcaggtcgtgaggcagaagaaattgccttggctgctgagatgggtgtgacacagatgaatattgttggttttgataaaccgacgattgagcatgccttggagttggtagatgagtatgagcagctctatgcgactattggttggcatcctacagaagctggtacttatacagaggaagttgaggcttacttgttggataagttaaaacattccaaggttgtggctttaggtgaaattggcttagactaccattggatgacagcgcccaaagaggtgcaggagcaggtttttcgccgtcagattcagctatctaaggacttggatttgccttttgttgtccatacccgtgatgcgctggaagatacctatgagattatcaagagtgagggcgttggtcctcgtggtggtatcatgcattcattttcagggacgcttgagtgggcagagaagtttgtggatcttggtatgaccatttccttctcaggagtggtgaccttcaagaaggcaactgacctccaagaagcagctaaagagttacctttggacaagatgttggtagaaacagatgcgccttacttagcacctgtacccaagcgtggtcgtgaaaataaaacagcctatactcgctatgtggtcgactttatcgctgacttgcgtggtatgacgacagaagagctggcggtagcaacgactgcaaatgcagaacgcatttttggattggacagcaagtaa

SEQ ID NO: 37996 - DNA, 666 bp, Streptococcus pneumoniae
gtgacgattctaggaaaagatacagttcaacaatctgcgaaaggtgaatctgtaactcaagaagctacaccagagtataagctagaaaatacaccaggtggagataagggaggcaatactggaagctcagatgctaatgcgaatgaaggcggtggtagccaggcgggtggatcagctcacacaggttcacaaaactcagctcaatcacaagcttctaagcaattagctactgaaaaagaatcagctaaaaatgccattgaaaaagcagccaagaacaagcaggatgaaatcaaaggcgcaccgctttctgataaagaaaaagcagaacttttagcaagagtggaagcagaaaaacaagcagctctcaaagagattgaaaatgcgaaaactatggaagatgtgaaggaagcagaaacgattggagtgcaagccattgccatggttacagttcctaagagaccagtggctcctaatgctgctcctaagacaacaagtgcaccgcaagcaactgcaggaacaatgcaagatgttacctaccagtcacctgctggcaaacaattacctaacacaggttcagcatcaagtgcagcacttgctagtcttggtctagtggtggcaacaagtggttttgctttgctaggaagaaagactagacgtagaaaatag

SEQ ID NO: 37997 - DNA, 135 bp, Streptococcus pneumoniae
gtgaaacgtacttatcaaccaagtaaacttcgtcgtgcgcgcaaacacggattccgtaaccgtatgtcaactaaaaatggtcgtcgcgtattggcagctcgtcgtcgtaaaggacgcaaagttttggctgcataa

SEQ ID NO: 37998 - DNA, 516 bp, Streptococcus pneumoniae
ttgctttacttctatagtgaaaaggtttacaattatagtaagaaaatttcaggaggtttcattatggcacaacgttaccaaaatatcatggtcgcaatcgatggttctaaggaagcggacttggcttttgtcaagggagttcattctgctctacgaaacgacgctaaactcaccatcgtacatgtcattgacacacgcgctctccaaagcgtatccacctttgatgctgaagtttacgaagaactccaagtcgacgctgaaagtctgatgaaagagtacgaaaaacgtgctaaagatgctggggtagcagatgttcatatcgtcattgaaatgggaaatccaaagaccctgctagcacgtactattccagatgccgaggaagtggacctcatcctcgttggcgcaactggtctcaacgcctttgaacgcctcttagtcggctcttcatctgaatacatactccgccatgctaaggtcgatttgctggttgtgagagaacaagaaaaaaccttataa

SEQ ID NO: 37999 - DNA, 600 bp, Streptococcus pneumoniae
atgaaagtattagtcgcagaagatcaaagtatgttgcgagatgccatgtgtcaattgctcacgcttcaaccagatgtggagtctgtccttcaagccaagaatgggcaagaagcaatccaactattagaaaaggagtctgtagatatcgccatccttgacgtagaaatgcctgttaagacaggtcttgaagtcttggagtggatacgatcagaaaagcttgaaacaaaggtggttgtggtgacgaccttcaagcgtgctgggtattttgaacgtgcggtcaaggctggagtggatgcttatgtattaaaggaacgaagcattgcagacctcatgcaaaccttgcacaccgtcctcgaaggacgcaaggagtattcgcctgaattgatggaaatggtgatgacccgtcccaatccgttgacagaacaagagattgctgtcttaaagggaatcgcccggggcttatccaaccaagaaatcgcagatcagctttacctctcaaacggaactattcgaaactatgtcaccaatattctttcaaaactggatgctggtaatcgaacagaggcagctaatatcgcaaaagaatctggttggttatga

SEQ ID NO: 38000 - DNA, 1098 bp, Streptococcus pneumoniae
atgcttgaaagactgaaaagcatacattatatgttttggatcagtttaatttttatggttttccccatcctaactgtagtgactgggtggctttctgcctggcatttattgattgatattctatttgtagtggcgtatttgggtgttttaacaactaagagccagcgtctatcttggctatattggggcatcctgctgacttatgtagttgggaatactgcctttgtggctgttaattatatctggtttttctttttcctatccaatctcttaagctatcatttcagcgtaggtggtttaaagtctttacatgtctggacttttcttcttgctcaagtccttgttgtgggtcaactgttgatttttcagagaatcgaagttgagtttctattctatctacttgtaattcttgcttttgtcgatttaatgacttttggcttggttcggattcgaattgtggaggatttgaaagaagcacaggctaagcaaaatgcccagataaatctattgcttgctgaaaatgaacgcaatcgtatcggtcaagatttgcatgatagtctggggcatacctttgctatgcttagtgttaaaactgatctagccttgcagttatttcagatggaggcttatccacaggtggaaaaggaattaaaagaaattcaccagatcagcaaggattccatgaatgaagttcgaactatcgtggaaaatcttaagtctagaactttgacatccgaactagagactgtgaaaaagatgttagaaattgctggaattgaggtggaaacggataaccaactagatactgctagccttactcaagaattggagtcaatggcttctatgattttgcttgagttggtgaccaatatcatcaaacatgccaaagcgtctaaagcttacttaaaattagaacggacagagaaggaactcattttaacagtaagtgatgatggctgcggctttgcttttctaaaaggagatgagctccatacagtccgagatcgtgtttttccattttcaggagaagtaagtgtaatcagtcagaaacatccaacggaagtgcaagttcgactaccttataaggagagaaactaa

SEQ ID NO: 38001 - DNA, 552 bp, Streptococcus pneumoniae
atgaaaggaaatatcatggatagttttgataaaggatggtttgttttacaaacttattctggttatgaaaataaggtgaaagaaaatctattacaacgtgcacaaacctacaatatgttggataatattctacgcgttgaaattccaacacaaacagtgcaagttgaaaaaaatggaaagagaaaagaagtagaagaaaatcgctttccaggttatgttcttgtagaaatggtcatgacagatgaagcttggtttgttgttcgaaacacaccaaatgttacaggatttgtcggatcacacgggaacagatcaaaaccaactccattattggaacaagaaattcgtgacattttggtatctatgggacaaactgttcaagaatttgatttcgatgttgagattggtcaaactgtacgtattattgatggtgcttttgcagactacactggtaagattacagaaattgataataacaaagtgaaaatgattatctctatgtttggtaatgacacagttgcagaagtaaacctaaaccaaatcgcagaattataa

SEQ ID NO: 38002 - DNA, 1080 bp, Streptococcus pneumoniae
gtgatttgtagtgattcaagttactcttttcacaataaaaatttcatgattttcataaggaggaaatcactaatggtagttaaagttggtattaacggtttcggacgtatcggtcgtcttgctttccgtcgtatccaaaacgtagaaggtgttgaagttacacgcatcaacgaccttacagatccagttatgcttgcacacttgttgaaatacgacacaactcaaggtcgtttcgacggtactgttgaagttaaagaaggtggatttgaagttaacggtaaattcatcaaagtttctgctgaacgtgatccagaacaaatcgactgggctactgacggtgtagaaatcgttcttgaagctactggtttctttgctaagaaagaagcagctgaaaaacaccttaaaggtggagctaaaaaagttgttatcactgctcctggtggaaacgacgttaaaacagttgtattcaacactaaccacgacgttcttgacggtactgaaacagttatctcaggtgcttcatgtactacaaactgcttggctccaatggctaaagctcttcaagacaactttggtgttgttgaaggattgatgactactatccacgcttacactggtgaccaaatgatccttgacggaccacaccgtggtggtgaccttcgccgtgctcgcgctggtgctgcaaacatcgttcctaactcaactggtgctgcaaaagctatcggtcttgtaatcccagaattgaatggtaaacttgatggatctgcacaacgcgttccaactccaactggatcagttactgaattggtagcagttcttgaaaagaacgttactgttgatgaagtgaacgcagctatgaaagcagcttcaaacgaatcatacggttacacagaagatccaatcgtatcttcagatatcgtaggtatgtcttacggttcattgtttgacgcaactcaaactaaagttcttgacgttgacggtaaacaattggttaaagttgtatcatggtacgacaacgaaatgtcatacactgcacaacttgttcgtactcttgaatacttcgcaaagattgctaaataa

SEQ ID NO: 38003 - DNA, 2673 bp, Streptococcus pneumoniae
ttgaaagctatggaggaaaatatggctgataaaaaaactgtgacaccagaggaaaagaaactcgttgctgaaaagcacgtagatgagttggttcaaaaagctctagttgcccttgaagaaatgcgtaaattgaatcaagagcaagttgactacatcgttgccaaagcatcagtagcagctttggatgcccatggagaattggctttacatgcctttgaagaaacaggacgtggtgtatttgaagataaagcaactaagaacttgtttgcttgtgaacacgtagtaaacaacatgcgccacactaagacagttggtgttatcgaagaagacgatgtaacaggattgactcttattgctgaaccagttggtgttgtttgtggtattactccaacaacaaacccaacatcaacagcaatcttcaaatcattgatttcattgaagacacgtaacccaatcgtctttgccttccatccatcagcacaagaatcatctgctcatgcagctcgtatcgtccgcgatgcagctatcgcagctggtgctcctgaaaactgtgtgcaatggattactcaaccatctatggaagcaacaagtgcccttatgaaccacgaaggtgttgcgacaatccttgcaacaggtggtaatgccatggttaaagccgcatactcatgtggtaaaccagctcttggggtaggtgccggaaacgttccagcttatgttgaaaaatcagcaaacattcgtcaagcagcacacgatatcgtcatgtctaaatcatttgataacggtatggtctgtgcatctgaacaagcagttatcattgataaagaaatttacgatgaatttgtagcagagttcaaatcttaccacacttactttgtaaacaaaaaagaaaaagctcttcttgaagagttctgcttcggcgtcaaagcaaacagcaaaaactgtgctggtgcaaaattgaacgctgacatcgttggtaaaccagcaacttggattgcagaacaagcaggatttacagttccagaaggaacaaacattcttgctgcagaatgtaaagaagttggcgaaaatgagccattgactcgtgaaaaattgtcaccagttattgcagttttgaaatctgaaagccgtgaagatggtattactaaggctcgtcaaatggttgaatttaacggtcttggacactcagcagctatccacacagctgacgaagaattgactaaagaatttggtaaagctgttaaagctattcgtgttatctgtaactcaccttctacttttggtggtatcggggacgtttacaatgccttcttgccatcattgacacttggatgtggttcttacggacgcaactcagttggggataacgttagtgccattaacctcttgaatatcaaaaaagtcggaagacggagaaataacatgcaatggatgaaacttccttcaaaaacatactttgaacgtgattcaattcaataccttcaaaaatgtcgtgacgttgaacgtgtcatgatcgttactgaccatgccatggtagagcttggtttccttgatcgtatcatcgaacaactggaccttcgtcgcaataaggttgtttaccaaatctttgcggatgtagaaccggatccagatatcacaactgtaaaccgtggtactgagattatgcgtgccttcaaaccagataccatcatcgcactcggtggtgggtctccaatggatgctgccaaagtaatgtggctcttctacgagcaaccagaagtggacttccgtgaccttgtccaaaaattcatggatatccgtaaacgtgccttcaagttcccattgcttggtaagaagactaaattcatcgcgattccaactacatctggtacaggatctgaagtaacaccatttgccgttatctctgataaagcaaacaaccgtaaatacccaatcgctgactactcattgacaccaactgtggcaatcgtagatcctgctttggtattgacagttccaggatttgttgctgctgatactggtatggacgtattgactcacgcgacagaagcatacgtatcacaaatggctagtgactacactgatggtttagcacttcaagccattaaattggtctttgaaaatctcgaaagctcagttaagaatgcagacttccactcacgtgagaaaatgcataacgcttcaacaatcgctggtatggcctttgccaatgccttcctaggtatttctcactcaatggcccataagattggtgcgcaattccacacaatccacggtcgtacaaatgctatcttgcttccatacgttatccgttacaacggtacacgtccagctaagacagcaacatggcctaagtacaactactaccgtgcagatgaaaaataccaagatatcgcacgcatgcttggacttccagcttctactccagaagaaggggttgaatcttacgcaaaagctgtctacgaactcggtgaacgtattgggatccaaatgaattttagagaccaaggaattgacgaaaaagaatggaaagaacattctcgtgaattagccttcctggcttatgaagaccaatgttcaccagctaacccacgtcttccaatggtagaccatatgcaagaaatcatcgaagatgcatactatggctacaaagaaagaccaggacgccgtaaataa

SEQ ID NO: 38004 - DNA, 429 bp, Streptococcus pneumoniae
atgaaaaaattagtctttgtctgtctgggaaatatttgccgtagccctatggccgagtttgttatgaaatcaatgacagataactacgaaatccaaagtcgagcaacttcctcttgggaacatggcaatccgattcataaggggactcagggaatttttcaacagtatgagattccttatgacaagaacaagacatcgcttcagattagtaaggaagattttgaagcctttgattatattatcggaatggacgcttcaaatatttctgacttacgtcagatgtgtccagtagactgtcaagataagatttactcattttcatctgaaagtgttccagacccttggtatacaggagattttgaagaaacctatcgacgtgttcaagagggctgtcaagcttggttagaacgtttagaaaaggagagttaa

SEQ ID NO: 38005 - DNA, 1977 bp, Streptococcus pneumoniae
atgtcaaatctatctgttaatgcaattcgttttctaggtattgacgccattaataaagccaactcaggtcatccaggtgtggttatgggagcggctccgatggcttacagcctctttacaaaacaacttcatatcaatccagctcaaccaaactggattaaccgcgaccgctttattctttcagcaggtcatggttcaatgctcctttatgctcttcttcacctttctggttttgaagatgtcagcatggatgagattaagagtttccgtcaatggggttcaaaaacaccaggtcacccagaatttggtcatacggcagggattgatgctacgacaggtcctctagggcaagggatttcaactgctactggttttgcccaagcagaacgtttcttggcagccaaatataaccgtgaaggctacaatatctttgaccactatacttacgttatctgtggagacggagacttgatggaaggtgtctcaagcgaggcagcttcatacgcaggtttgcaaaaacttgataagttggttgttctttatgattcaaatgatatcaacttggatggtgagacaaaggattcctttacagaaagtgttcgtgaccgttacaatgcctacggttggcatactgccttggttgaaaatggaacagacttggaagccatccatgctgctatcgaaacagcaaaagcttcaggcaagccatctttaattgaagtgaagacggttattggatacggttctccaaacaaacaaggaactaatgctgtacacggcgcccctcttggagcagatgaaactgcatcaactcgccaagccctcggttgggactacgaaccatttgaaattccagaacaagtatatgctgatttcaaagaacatgttgcagaccgtggcgcatcagcttatcaagcttggactaaattagttgcagattataaagaagctcatccagaactggctgcagaagtagaagccatcatcgacggacgtgatccagtcgaagtgactccagcagacttcccagctttagaaaatggtttttctcaagcaactcgtaattcaagtcaagatgccttgaatgttgtggcagctaaattaccaaccttcctaggtggatcagctgaccttgctcactcaaacatgacttatatcaagacagatggacttcaagacgatgccaatcgcttgaatcgtaacattcagtttggtgttcgtgaatttgcaatgggaacaatcttgaacgggatggcccttcatggtggacttcgtgtatacggtggaactttcttcgtcttctctgactatgtgaaggcagctgtccgcttgtcagccttacaaggacttcctgtgacttatgtctttacccatgattcaatcgcagttggggaagatggtccgactcacgaaccagttgagcatttagcaggtcttcgtgctatgccaaatctaaatgttttccgtccagcagatgcgcgtgaaacgcaagcagcttggtaccttgcagtgacaagtgagaaaacaccaactgcccttgtcttgacacgtcaaaacttgactgttgaagatggaacagacttcgacaaggttgctaaaggtgcttatgttgtatatgaaaatgcagccgactttgataccatcttgattgcgacaggttcagaggttaatcttgctgtctcagctgctaaagaattggctagtcaaggcgaaaaaatccgcgtagtcagcatgccatctacagatgtctttgataaacaagatgcagcttacaaggaagagattcttccaaatgcagtccgccgtcgtgttgcagtcgaaatgggtgcaagtcaaaactggtacaaatatgttggtctcgatggtgccgttctaggtattgataccttcggagcctctgccccagcaccaaaagtattggcagaatatggctttactgtagaaaatcttgtaaaaattgttcgaaacttgaaataa

SEQ ID NO: 38006 - DNA, 705 bp, Streptococcus pneumoniae
atgaatcaagtaatcaatgctatgcgtaaacgagtctgtgatgccaatcaatcattgccaaaacatggacttgtcaaatttacctgggggaatgtatctgaagttaatcgcgaactcggtgtcattgttatcaaaccatcaggcgtggattatgacgaattgacacctgaaaacatggtagtgactgatctagatggtaagatcctagaaggggatttaagaccatcttccgacctcccaactcatgtgcaattatataaggcttggtcagaaattggtagtgtggttcacacccattcgacagaagctgttggttgggctcaggcaggtcgtgatattcctttctacggaacaacccatgcagattatttctacggttcaatcccttgcgcccgtagtttgaccaaggacgaagtagaagtggcctatgaaaaagatactggcctggttatcgtagaagaatttgaacatcgcggacttaacccggttgaagtaccaggaattgttgtacgcaatcacggtccattcacctggggcaaaaatccagagaatgctgtttatcactctgtcgtactagaggaagtatcaaagatgaatcgctttacagaacaaatcaatccaagagttggacctgctccccagtacatactagaaaaacactaccaacgtaaacatggaccaaatgcttattatggtcaaaagtaa

SEQ ID NO: 38007 - DNA, 831 bp, Streptococcus pneumoniae
atgggagtgaaaaagaaactaaagttgactagtttgctaggactgtctctgttaatcatgacagcctgtgcgactaatggggtaactagcgatattacagccgaatcggctgatttttggagtaaattggtttacttctttgcggaaatcattcgctttttatcgtttgatattagtatcggagtggggattattctctttacggtcttgattcgtacagtcctcttgccagtctttcaggtgcaaatggtggcttctaggaaaatgcaggaagctcagccacgcattaaggcgcttcgagaacaatatccaggtcgagatatggaaagcagaaccaaactagagcaggaaatgcgtaaagtatttaaagaaatgggtgtcagacagtcagactctctttggccgattttgattcagatgccggttattttggccctgttccaagccctatcaagagttgactttttaaagacaggtcatttcttatggattaaccttggtagtgtggatacaacccttgttcttccgattttagcagcagtattcacctttttaagtacttggttgtccaacaaagctttgtctgagcgaaatggcgctacgactgcgatgatgtatgggattccagtcttgatttttatctttgcagtttatgcgccaggtggagtcgccctatactggacagtgtctaatgcttatcaagtcttgcaaacctatttcttgaataatccattcaagattatcgcagagcgcgaggccgtagtacaggcacaaaaagatttggaaaatagaaaaagaaaagccaagaaaaaggctcagaaaacgaaataa

SEQ ID NO: 38008 - DNA, 372 bp, Streptococcus pneumoniae
ttgaagaaaaactttcgtgtaaaaagagagaaagattttaaggcgattttcaaggaggggacaagttttgctaatcgcaaatttgtggtctaccaattagaaaaccagaaaaaccattttcgagtaggtctatcagttagcaaaaaactggggaatgccgtcactagaaatcaaattaagcgacggattcggcatattatccagaatgcaaaagggagtctggtagaagatgtcgactttgttgtcattgctcgaaaaggagtcgaaaccttgggatacgcagagatggagaaaaatctactccatgtattaaaattatcaaagatttaccgggaaggaaatgggagtgaaaaagaaactaaagttgactag

SEQ ID NO: 38009 - DNA, 954 bp, Streptococcus pneumoniae
atggattttgaaaaaattgaacaagcttatacctatttactagagaatgtccaagtcatccaaagtgatttggcgaccaacttttatgacgccttggtggagcaaaatagcatctatctggatggtgaaactgagctaaaccaggtcaaggagaacaatcaaacccttaagcgtttagcactacgcaaagaagaatggctcaagacctaccagtttctcttgatgaaggctgggcaaacagaacccttgcaggccaatcaccagtttacaccggatgctattgctttgcttttggtgtttattgtggaagagttgtttaaagaggaggaaattactatcctcgaaatgggttctgggatgggaattctaggcgctattttcttgacctcgcttactaaaaaggtggattacttgggaatggaagtggatgatttgctgattgatctggcagctagcatggcagatgtaattggtttgcaggctggctttgtccaaggagatgccgttcgcccacaaatgctcaaagaaagcgatgtggtcatcagtgacttgcctgtcggctattatcctgatgatgccgttgcgtcgcgccatcaagttgcttctagccaagaacatacttacgcccatcacttgctcatggaacaagggcttaagtacctcaagtcagacggatacgctatttttctagctccgagtgatttgttgaccagtcctcaaagtgatttgttaaaagaatggctgaaagaagaggcgagtctggttgctatgattagtctgcctgaaaatctctttgctaatgccaaacaatctaagactatttttatcttacagaagaaaaatgaaatagcagtagagccttttgtttatccacttgctagcttgcaagatgcaagtgttttaatgaaatttaaagaaaattttcaaaaatggactcaaggtactgaaatataa

SEQ ID NO: 38010 - DNA, 1059 bp, Streptococcus pneumoniae
atgaaagcctatacttatgttaaaccaggacttgcttcttttgttgatgtagacaaaccagttattcgcaagccaacagacgctattgtgcgtattgtaaaaaccactatttgtggaacagacctccatattatcaaaggggatgttcctacttgccaaagtggtaccattcttggccacgaagggattgggattgttgaagaagttggggaaggagtttccaacttcaaaaaaggtgacaaggtcttgatttcttgcgtctgtgcctgtggtaaatgctactactgtaaaaaaggaatttatgctcactgtgaagacgaagggggctggattttcggtcacttgattgatggtatgcaggctgaatatctacgtgtccctcatgcagataatactctttaccatactccagaagacttgtcagatgaagctttggttatgctgtcagacattctgcctactggatatgaaattggtgtcttaaaagggaaagtagaacctggttgcagcgtagccattattggttcaggtccagttggattggctgctcttttaacagcccaattctattcaccagctaaattgattatggtagacctagacgataaccgcttggaaactgccctatcattcggtgcgactcataaggttaattcttcagaccctgaaaaagccattaaagaaatttatgatttgacagatggtcgtggtgtggatgtcgctatcgaagctgttggtattcctgcaacatttgatttctgtcaaaagattatcggtgtagacggaacggttgccaactgtggtgtgcatggtaaaccagttgaattcgatttagataaactttggattcgcaacatcaatgtaacaactggtttggtatctacaaatacgactccacaattgttgaaagcacttgaaagtcataagattgaaccggaaaaattggtaactcactatttcaaactcagtgaaattgaaaaagcctacgaagtcttcagtaaggcagcagaccaccatgccattaaggtcattatcgaaaacgatatctcagaagcctaa

SEQ ID NO: 38011 - DNA, 1152 bp, Streptococcus pneumoniae
atgcctaactatattaaagcggatcagtttttctacccacacggagttcgtcgaggtggttacttggaacttgtggacggcaagtttgggaaacatgtagagcagattcctgaaggggctgaggtgattgactatacaggttatagcattgccccaggtcttgtggatactcatattcatggatatgcaggtgtagatgtgatggacaacaacattgaaggtacattgcatactatgagtgaaggacttcttagtaccggtgttaccagtttcttacccacaactttaacagccacttatgagcaattgcttgcagtcactgaaaatcttggaaaccattataaagaagcaacaggtgctaagattcgtgggatttattatgaaggtccatatttcacagaaacttttaagggggcacaaaatccaacttatatgagagacccgggtgttgaggagtttcattcttggcaaaaagcggcaaatggcttgcttaataaaattgcccttgcaccagaacgtgatggggtggaagactttgttcgtacagttacgggcgaaggtgtgacggttgctcttggacattcaaacgcgacttttgatgaagccaaaaaagcagtcgatgctggagcgagtgtttgggtgcatgcctacaatggaatgcgtgggttgactcaccgtgaattggggatggttggagccatgtaccaattgccacatacctatgcagagttgatctgtgatggtcaccacgtagatccaaaggcttgcgaaattcttatcaaacaaaaaggaacagaaaacatcgctcttatcacagactgtatgacagctgggggattggaagacggagattatatgttgggagaattcccagttgtcgttgcaaatggaactgcacgcctcaaatcgacaggtaacttggcaggttctatcctcaaactcaaagatggtttgaagaatgtggtcgaatggggaattgcgaatccgcatgaagcagtcatgatggccagcttcaacccagctaaatccgttcacatcgatgacgtctgtggccaaatccgtgaaggctacgacgctgacttcatcgtattagataaagatttggaattggtagcaacctacctagatggcgtaaaacgttatcaagcataa

SEQ ID NO: 38012 - DNA, 1818 bp, Streptococcus pneumoniae
atgcgcattaaatggttttccttgattaggattataggtttacttttggtactcttgtatcacttctttcagacgatctttcctggaggatttttcggggtagatgtctttttcacattttcaggtttcctgattacagctctactcattgaagaattttctaagaacaatgagattgatttgataggattttttagaagacgcttttatcggattgtgccacctgtggttttgatggtcttggtgaccatgccttttactttcttggttcgccaagactatgttgctggaattggtggccagattgcgggcgtcttaggctttatgaccaacttctatgaactcctaacaggtgggagttatgaatctcagttcattcctcatttgtttgttcataattggagtttggcagttgaggttcactactatattctttggggattggcagtttggttcttatccaaacaagctaaatcaaatggtcagttgaaggggatggtctttctcttatctgctgttgccttcttgatcagtttcttctccatgtttattggtagttttctagtgacctcttattcctctgtttatttctccagtttaactcatgtctatccattctttttaggaagtatgttagcaactattgtaggcgttcgtcagacgacttccctcgtcaagcagttggataaaatctgggatttacgaaagactttggtagtttttggaggaggctttggtttcctagttcttttgactttctttgtcaaattcacttatctttttgcctatcttatcggcttcttacttgccagtcttgcagctcttgccatgattctggcggcgcgtgtcttacatgaaaagacacatcatatacaggagtcgaagattatcagctttttagcggatactagctatgcggtttatcttttccattggcctttctatatcattttctcacagttgacatcaaatcttcttgctgtattactgactctgatttgttcttatggctttgccagtctgtcattttatgtattggaaccttggattgcaggcaagaacacacctattgtccaaacccttcgtcccctgccttatattcacgcaattcttgcagcaggtacaggaatcttgaccatcattgtctgcacggtgaccttgttggcaccacaagtgggagcgtttgagacagacttgactgtcaatggcttgaagcaagctgcaacaaatattggccagaccaaggtgatggcagaacgggcagatgcaaacagtttgggaattgctgatggcactatgttaattggtgactcagtggctttaagggcaaatacagcactacagacagctcttcctggagcacagattaacgcgcaggtcagcgtaacaaccaagaccgcaaatgaaatcatgctaaataatagccagaataaatttttacctaagacggtggtcattgcgactggggtaaataatcctgagaattacaaggatgactgggacagtatcgtgaaaaatcttcctaagggacaccatatgattttggtgactccttatgagggagataagacaaaagagacctatgccatcgttgagaaggctgctgcctatatgagagaattggcagagaagacaccttacattacgatagcagattggaatcaagttgcgaaagagcatccagaaatttgggctggaacagaccaggttcatttcgggagtgagagtagcactatcgaagcaggagcaaaattgtatgcagatacgattgccacagctttgcagacagctcaagacaagccggttaaatcaaaataa

SEQ ID NO: 38013 - DNA, 1143 bp, Streptococcus pneumoniae
atgtcagattcaccaatcaaatatcgtttgattaagaaagaaaaacacacaggagctcgtctgggagaaatcatcactccccacggtacctttccgacacctatgtttatgccagttgggacacaagccactgtcaaaactcagtcacctgaagaattgaaggagatgggttcgggaattatcctatcaaacacctatcatctctggcttcgccctggagatgaactcattgcacgcgctggtggtctccacaagttcatgaattgggaccagcctatcttgacagatagtggtggttttcaggtttattctttagcagatagccgtaatatcacagaagaaggagtaacctttaaaaatcatctaaatggttctaagatgttcctatccccagaaaaagccatctctattcagaataatctgggttcagacatcatgatgtcctttgatgaatgtcctcagttttatcaaccttatgactacgttaagaaatcgatcgagcgtaccagccgttgggctgagcgtggtttgaaggctcaccgtcgtccacatgaccaaggtttgtttggaattgtgcaaggtgcaggatttgaagaccttcgccgccaatcagctcatgatcttgtcagcatggatttctcaggctactctatcggtggtttggcagtgggagaaacccatgaagagatgaatgcggtcttggactttacaactcaactgctgcctgaaaataaacctcgttatctgatgggtgtgggagcgccagatagcttgatcgatggggtcattcgtggggtggatatgtttgactgtgtcttaccgactcgaattgctcgtaacgggacttgtatgaccagtcaaggacgtttggttgtgaaaaatgcccagtttgctgaggactttacgccactggatcctgagtgtgattgctacacatgtaataactatacacgcgcttaccttcgtcacctgctcaaggctgatgaaacctttggtatccgcttgactagctaccacaatctttacttcttgcttaacctgatgaagcaagtgcgacaagccatcatggatgacaatctcttggaattccgtgagtattttgtggaaaaatatggctataataagtcaggacgtaatttctaa

SEQ ID NO: 38014 - DNA, 1485 bp, Streptococcus pneumoniae
atgacattagtttatcaatcaacgcgtgatgccaacaatacagtaactgccagccaagcaattttgcaaggtttggcgacggacggcggtttgtttacaccggttacttatccaaaggtagatttgaactttaacaaattgaaagatgcttcttaccaggaagttgctaagctagttttgtcagcatttttagatgactttacagctgaggagttggactactgtatcaacaatgcctacgatagcaaatttgatactccagctattgcaccattagtgaaattagatgggcaatacaatttggaacttttccatggttcaacgattgcctttaaggatatggccttgtctattttgccatactttatgacgactgctgctaagaaacatggtttggagaacaagattgttatcttgacagcgacatctggtgacacggggaaagctgctatggcggggtttgcggatgtgcctggtactgagattatcgtcttttatccaaaggatggtgtcagcaagattcaagagttacaaatgaccactcaaactggcgacaatactcatgttattgctattgatggtaactttgacgatgcgcaaacaaatgtgaagcacatgtttaacgacgtggctcttcgtgaaaaattgactaccaacaagttgcaattttcatcagctaactctatgaacattggtcgtctggtgccacaaattgtttattatgtttatgcttacgctcaattggtcaagactggtgagatcgtggctggtgataagattaacttcacagtaccaacaggaaactttggaaatatcttggctgccttttatgccaaacaaatcggtctcccagttggtaaattgatctgtgcttcaaatgacaacaatgttttgacagacttcttcaagacacgtgtctatgacaagaaacgtgagtttaaggtaacaaccagcccatctatggatatcttggtatcttcaaacttggagcgtttgattttccatcttttggggaatgatgcggttaagacggctgaactcatgaatgctttgaatagccaaggtcaatatgagttgactaattttgatgcagagattttggacctctttgcagctgaatatgcgactgaggaagaaactgcggcagaaatcaagcgtgtttatgagtcagattcttatatcgaggatcctcatacagcggttgcctcagcagtgtatagaaaataccaggcgactactggagatgcgactaagacagtgattgcttcaacagctagtccctacaagttcccagtagttgcagtagaagcgctaacagggaaagttggcttgactgattttgaagctttggctcaattacatgaaatctcaggcgttgcagtgccaccagcagttgatgggcttgagacagctcctgttcgtcacaagacaatagtggcagctgctgacatgcaagtagcggttgaggcttatttaggactttaa

SEQ ID NO: 38015 - DNA, 1461 bp, Streptococcus pneumoniae
atgtcaaaagatatccgcgtacgttacgcaccaagtccaacaggactactacacatcggaaatgctcgtacagcattgtttaattacttgtatgcgcgccatcatggtggaacatttctcatccgtatcgaagatactgaccgtaaacgccatgtcgaggatggtgaacgttcacaacttgaaaaccttcgctggttaggcatggattgggatgaaagtccagaatcacatgagaattatcgccagtctgagcgtttggacttgtatcaaaaatacattgaccaactattagctgaaggaaaagcctataaatcttacgttacagaagaagagttggcagctgaacgcgaacgccaagaagtagctggcgaaacaccacgctacatcaatgaataccttggtatgagtgaagaagaaaaagcagcttacatcgcagaacgtgaagcagcagggatcatcccaactgttcgtttggctgtcaatgagtcaggtatctacaagtggcatgatatggtcaaaggcgatatcgaatttgaaggtggcaatatcggtggtgactggattatccaaaagaaagacggttacccaacttacaactttgccgttgccatcgatgaccatgatatgcaaatctctcatgttatccgtggagacgaccatattgctaacacaccaaaacagctcatggtttatgaagcacttggttgggaagctccagagtttggtcacatgaccttgattatcaactctgagactggtaagaagttatctaaacgtgatactaatacacttcaatttatcgaagattaccgaaagaaaggttaccttccagaagcagtctttaactttattgctcttcttggttggaacccaggtggtgaagatgagattttctctcgtgaagaactcattaaactttttgatgaaaaccgcctcagcaagtcaccagcagcctttgatcagaaaaaactagactggatgagcaatgattatatcaagaatgcagaccttgaaaccatctttgaaatggcaaaaccattcttagaggaagcaggccgtttgactgacaaggctgaaaaattagttgagctctataaaccacaaatgaaatcagtagatgagattatcccattgacagatcttttcttctcagatttcccagaattgacagaagcagagcgcgaagtcatgacgggtgaaacagttccaacagttcttgaagcattcaaagcaaaacttgaagcgatgacagatgataaatttgtgacagaaaatatcttcccacaaattaaagcagttcaaaaagaaacaggtattaaagggaaaaatcttttcatgcctattcgtatcgcagtttcaggcgaaatgcatgggccagaattaccagatacaattttcttgcttggacgtgaaaaatcaattcagcatatcgaaaacatgctaaaagaaatctctaaataa

SEQ ID NO: 38016 - DNA, 1350 bp, Streptococcus pneumoniae
atgtcacatattaaatttgattattcaaaagttttagacaaatttgttgcaccacatgaagtggaatacatgcaatcacaagtaacagcagcagatgaattgatccgtaaaggaactggtgctggtagcgacttcttgggatggttggaccttcctgaaaaatacgaccgcgaagaatttgaccgcatcttgaaagctgctgagcaaatcaagtcagacagcgatgttttggttgtgatcggtattggtggatcttaccttggtgcaaaagcagcaatcgacttcttgaatcaccattttgctaacttgcaaacaaaagaagaacgcaaagctccacaaatcctttacgcaggaaactcaatctcatctacttaccttgctgacttggtagagtatgttgcagacaaagacttctcagtaaacgtaatttctaaatcaggtacaacaactgaaccagcgattgctttccgtgtctttaaagaactcttggttaagaaatacggtcaagaagaagctaacaaacgtatctatgcaacaactgaccgccaaaagggtgctgttaaggttgaagcagacgctaacggttggggaacatttgttgttccagatgatatcggtggacgcttctcagtattgacagccgttggtttgcttccaatcgcagcatcaggagctgacatcaaagctcttatggaaggtgcgaatgcagctcgcaaagactacacttcagacaaaatctctgaaaacgaagcttaccaatacgcagctgttcgtaacatcctttatcgtaaaggctatgcaactgagatcttggtaaactatgagccatcacttcaatacttctcagaatggtggaaacaattggctggtgaatcagaaggaaaagaccaaaaaggtatctacccaacttcagccaacttctcaactgacttgcactcacttggtcaatttatccaagaaggaactcgtatcatgtttgaaacagttgtccgtgttgacaaacctcgtaaaaacgtgcttattcctactttggaagaagaccttgacggacttggttaccttcaaggaaaagacgttgactttgtaaacaaaaaagcaactgacggtgttcttcttgcccacacagatggtgatgtaccaaacatgtatgtgactcttccagagcaagacgctttcactcttggttacactatctacttcttcgaattggcaattgccctttcaggttacttgaatgctatcaacccatttgaccaaccaggtgttgaagcttataaacgtaacatgtttgcccttcttggaaaaccaggatttgaagaattgagcaaagaacttaacgcacgtctataa

SEQ ID NO: 38017 - DNA, 2574 bp, Streptococcus pneumoniae
ttgctctcaagacttatttttgaaaaggagagacagaaaatggcgatagaaaagctatcacccggcatgcaacagtatgtggatattaaaaagcaatatccagatgcttttttgctctttcggatgggtgatttttatgaattattttatgaggatgcggtcaatgctgcgcagattctggaaatttccttaacgagtcgcaacaagaatgccgacaatccgatccctatggcgggtgttccctatcattctgcccaacagtatatcgatgtcttgattgagcagggttataaggtggctatcgcagagcagatggaagatcctaaacaagcagttggggttgttaaacgagaggttgttcaggtcattacgccagggacagtggtcgatagcagtaagccggacagtcagaataattttttggtttccatagaccgcgaaggcaatcaatttggcctagcttatatggatttggtgacgggtgacttttatgtgacaggtcttttggatttcacgctggtttgtggggaaatccgtaacctcaaggctcgagaagtggtgttgggttatgacttgtctgaggaagaagaacaaatcctcagccgccagatgaatctggtactctcttatgaaaaagaaagctttgaagaccttcatttattggatttgcgattggcaacggtggagcaaacggcatctagtaagctgctccagtatgttcatcggactcagatgagggaattgaaccacctcaaacctgttatccgctacgaaattaaggatttcttgcagatggattatgcgaccaaggctagtctggatttggttgagaatgctcgctcaggtaagaaacaaggcagtcttttctggcttttggatgaaaccaaaacggctatggggatgcgtctcttgcgttcttggattcatcgccccttgattgataaggaacgaatcgtccaacgtcaagaagtagtgcaggtctttctcgaccatttctttgagcgtagtgacttgacagacagtctcaagggtgtttatgacattgagcgcttggctagtcgtgtttcttttggcaaaaccaatccaaaggatctcttgcagttggcgactaccttgtctagtgtgccacggattcgtgcgattttagaagggatggagcaacctactctagcctatctcatcgcacaactggatgcaatccctgagttggagagtttgattagcgcagcgattgctcctgaagctcctcatgtgattacagatgggggaattatccggactggatttgatgagactttagacaagtatcgttgcgttctcagagaagggactagctggattgctgagattgaggctaaggagcgagaaaactctggtatcagcacgctcaagattgactacaataaaaaggatggctactattttcatgtgaccaattcgcaactgggaaatgtgccagcccactttttccgcaaggcgacgctgaaaaactcagaacgctttggaaccgaagaattagcccgtatcgagggagatatgcttgaggcgcgtgagaagtcagccaacctcgaatacgaaatatttatgcgcattcgtgaagaggtcggcaagtacatccagcgtttacaagctctagcccaaggaattgcgacggttgatgtcttacagagtctggcggttgtggctgaaacccagcatttgattcgacctgagtttggtgacgattcacaaattgatatccggaaagggcgccatgctgtcgttgaaaaggttatgggggctcagacctatattccaaatacgattcagatggcagaagataccagtattcaattggttacagggccaaacatgagtgggaagtctacctatatgcgtcagttagccatgacggcggttatggcccagctgggttcctatgttcctgctgaaagcgcccatttaccgatttttgatgcgatttttacccgtatcggagcagcagatgacttggtttcgggtcagtcaacctttatggtggagatgatggaggccaataatgccatttcgcatgcgaccaagaactctctcattctctttgatgaattgggacgtggaactgcaacttatgacgggatggctcttgctcagtccatcatcgaatatatccatgagcacatcggagctaagaccctctttgcgacccactaccatgagttgactagtctggagtctagtttacaacacttggtcaatgtccacgtggcaactttggagcaggatgggcaggtcaccttccttcacaagattgaaccgggaccagctgataaatcctacggtatccatgttgccaagattgctggcttgccagcagaccttttagcaagggcggataagattttgactcagctagagaatcaaggaacagagagtcctcctcccatgagacaaactagtgctgtcactgaacagatttcactctttgatagggcagaagagcatcctatcctagcagaattagctaaactggatgtgtataatatgacacctatgcaggttatgaatgtcttagtagagttaaaacagaaactataa

SEQ ID NO: 38018 - DNA, 1692 bp, Streptococcus pneumoniae
atgaatacaaaagaattgattgctagcgaattatctagcatcattgatagcctggaccaagaggctattttaaagttactggaaacccctaaaaactcagaaatgggagacattgctttccctgctttttctcttgcaaaagtcgaacgtaaagcaccacaaatgattgcggctgaactggctgaaaaaatgaacagccaagcctttgaaaaagttgtcgcaacaggaccttacgttaactttttccttgataaatctgccatttctgctcaagtattgcaagctgttaccactgaaaaagaacactatgctgaccaaaatattggcaaacaagaaaatgttgttatcgacatgtctagtccgaatatcgctaaaccattttctattggccacctgcgttcaactgttatcggagatagcttgtcacatattttccaaaaaatcggttatcaaacggtcaaggtcaaccatttgggagactggggtaaacaatttgggatgttgattgttgcctacaaaaaatggggcgacgaagaagctgtaaaagctcatccaatcgatgaactccttaaactctatgtccgcatcaacgctgaagctgaaaatgaccctagcttggatgaagaagcgcgcgaatggttccgtaaacttgaaaatggagatgaggaagctctcgctctttggcaatggttccgcgatgaaagtttagtggaatttaaccgcctttacaatgaattgaaggttgaatttgacagctataacggagaagccttctacaatgataagatggatgcagttgtagacattctttctgaaaaaggactacttcttgaatcagaaggtgcccaagttgtgaatcttgagaaatatggaattgaacatccagccctcatcaagaagtctgatggtgcaactctctatatcacacgtgacttggctgcagccctctaccgtaaaaatgaataccaatttgctaaatctatctacgtcgttggtcaagagcaatctgcccactttaaacaactcaaagctgtcttgcaagagatgggctacgattggagtgacgacattacccacgttccttttggtctggttacaaaagaagggaagaagctctctactcgtaaagggaatgtcatcttgctagagcctactgttgcagaggctgttagccgtgccaaggtccaaatcgaggctaaaaatcctgaactagaaaacaaagaccaagtagcacatgctgttggggttggagccattaaattctatgacctcaaaactgaccgtacaaatggatacgacttcgacctagaagctatggtatccttcgagggtgaaactggaccttacgttcaatatgcctacgctcgtatccaatctatcttacgcaaagccgatttcaaaccagaaacagctggcaactatagcttgaatgatactgaaagctgggaaatcattaaactcattcaagacttcccacgtattatcaaccgtgcggcagataactttgaaccttctatcattgctaaatttgcaattagcctggctcaatcctttaacaaatactatgcacatacacgtatcttggatgaaagcccagaacgcgacagccgtctagccctcagctacgcaaccgcagtcgttctcaaagaagcccttcgcttgcttggagtagaagcgccagagaagatgtaa

SEQ ID NO: 38019 - DNA, 753 bp, Streptococcus pneumoniae
atgggaacattttcagtcagacacctagacttattttacggggattttcaagccttaaaaaatatttcgattcaattaccagaaagacagattactgccttgataggcccatctggttgtggcaaatcaacttttctaaaaacccttaaccggatgaacgatttggttccttcttgccatattgaaggccaagtcctcttagatgagcaagatatttatagtagcaaattcaaccttaatcaactacgtaagcgtgtagggatggtttttcaacagcctaatccctttgccatgtctatctatgataacgtggcttatggcccaaggacacatggtattcgagacaaaaaacaattagatgccttagtggagaaatctttaaaaggggcagccatttgggaagaagtcaaagatgatcttaaaaagagtgccatgtccttatctggcggtcagcagcaacgcctttgcattgcgcgagctttagcagtagaacctgatattctgttaatggatgagccgacttcagccttagaccctatctccactttaaaaattgaagacctcattcagcaactaaaaaaggattatacgattatcattgttacccataacatgcaacaagcttcacgtatttcagataaaactgcttttttcttaacaggagaaatttgcgaatttggagataccgttgacgtgtttaccaatccaaaagatcagcgcacagaagactatatttcaggacggttcggataa

SEQ ID NO: 38020 - DNA, 1017 bp, Streptococcus pneumoniae
atggaaaaacaaaccgtcgccgtcttggggcctggttcttggggaaccgccctttcacaagtcttaaatgacaatggacacgaggtacgtatttggggaaatcttcccgagcaaatcaatgaaattaatacacaccatactaataagcactactttaaagatgtcgttctagacgaaaatatcattgcctacaccgacttagcagaaacattgaaaaatgtggatgcgattttgtttgttgtcccaacaaaagtgacacgacttgttgcccagcaagttgcacaaaccttggaccataaggttatcatcatgcacgcatcaaagggattagaacctgatagccataaacgattatcaaccattcttgaagaagaaattcctgaacatctccgtagtgatatcgtcgttgtttcagggcctagtcatgcagaagagaccattgtgcgtgacctaactttaataactgctgcttctaaagatttacaaacagctcaatacgttcaggagctatttagtaatcactacttccgactttataccaatacggatgttatcggggttgaaactgctggtgctcttaaaaatattattgctgtcggtgctggagctttacatggtcttggatttggtgataatgctaaggcagccatcatcgctcgaggtttagcagaaatcacccgcctaggggtagcactcggggccagtccattgacctatagcggcttatctggtgtgggagatttgatcgtaacgggaacttccatccactctcgtaactggagagctggagatgctctcggacgaggagaatccctagctgatatagaagctaatatgggcatggtaatcgaaggaatttcaacgactcgagcagcctatgaactagcccaagaacttggagtctatatgcccattacacaggctatttaccaagttatttatcacggaaccaatatcaaagatgccatttatgacatcatgaacaatgaatttaaagcagaaaatgagtggtcttaa

SEQ ID NO: 38021 - DNA, 900 bp, Streptococcus pneumoniae
atgacatcaaaagttagaaaggcagttatccctgctgctggactaggaactcgatttttaccagcaaccaaggcccttgccaaagaaatgttgccaatcgtagacaaaccaactatccagtttatcgtggaagaggctctcaaatcaggtattgaagatattctagttgtcactggtaaatcaaaacgttctattgaggaccacttcgattcaaacttcgaattggaatataacctcaaagaaaaagggaaaacagatcttttgaagctagttgatgaaacaactggcatgcgtctgcattttatccgccaaactcatccacgcggtctcggagatgctgttttgcaagccaaggctttcgtcggaaatgaaccttttgtcgttatgcttggtgatgacttgatggatatcacagacgaaaaggctgttccacttaccaaacaactcatggatgactacaagcgtacccacgcgtctactatcgctgtcatgccagtccctcatgacgaagtatctgcttacggggttattgctccgcaaggcgaaggaaaagatggtctttacagtgttgaaacctttgttgaaaaaccagctccagaggacgctcctagcgaccttgctattatcggacgctacctcctcacgcctgaaattttccaaatcctcgaaaaccaagctcctggtgctggaaatgaaatccaacttactgatgcaatcgatactcttaataaaacacagcgtgtttttgcccgtgaatttacaggagctcgttacgacgttggggataagtttggctttatgaaaacatctattgactacgccctcaaacatccacaagtcaaagatgatttgaagaattacctcatccaacttggaaaagaattgactgagaaggaataa

SEQ ID NO: 38022 - DNA, 546 bp, Streptococcus pneumoniae
ttgtctatgaaatcggaattacgcaagcaagtcttgcatgaaatgaaggctatatctcaagagcaaaaacaggctatagaccaagctttaaccgagcggcttttacaccatcccttctaccaagaagccaaggtcatcgcaacctacctctctttttctcatgagtttcaaacgcgggaactgattgagcaggcgctgaaggacggcaagaaggttttaatacccaaaacttatcccaaggggcgcatggagtttgtggcctatgatccgcaacagttggtaaaaacttcctttgccttactggagccacagggagatgtggaagtggtggatgcatctcagattgatttgattcatgttcctggtctggcttttacgacgaaaggatatcggataggatacggtggaggctattatgaccgctatctggaacatttttctggtcgtactttgagtacgatatatccttgtcaaattcaggactttatacctgaaaaccatgatattcctgttcaggaggtattaattgatgaaggaaatctttga

SEQ ID NO: 38023 - DNA, 699 bp, Streptococcus pneumoniae
atgactgctacaaaaatgaacgctcaagaaattatccaatttatcgccaatgctgaaaagaaaaccagtgtcaaagtaacctttgaggggcaactcgcaactgctgtgcctagctctgttgtcaaactaggaaatgtcctattcggagactggaaggacgtggctccgcttcttgaaggtttggtagaaaatcaagattatgttgtcgagcaagatgctcgtaattctgcagttcctttgctagataagcgtgctatcaacgctcgtatcgagccaggtgctattatccgtgaccaggtggaaattggtgacaatgctgttatcatgatgggagctgttatcaatatcggtgctgaaatcggtgctggaaccatgattgacatgggtgccatccttggtggccgtgccatcgttggaaaaaatagccacgttggtgcaggtgcagttttggcaggtgtgattgagccagctagtgctgaaccagtccgtgtcggagacaatgttctcatcggggctaatgcagtggttatcgaaggagtccaaatcggtagtggttcagttgtcgcagcaggagctattgttacccaagatgtcccagaaaacgtggtagtagcaggtgttccagctcgtattatcaaagaaattgatgctcaaactcaacaaaaaacagcgctagaggatgcgcttcgtaccttgtaa

SEQ ID NO: 38024 - DNA, 1257 bp, Streptococcus pneumoniae
atgcacatttttgatgagctaaaagagcgtggtttgatatttcaaacgactgatgaagaagctttgcgtaaagccctagaagaaggtcaagtttcttattatactggctacgatccaactgctgacagccttcacctaggccaccttgtcgcaatcttgacaagtcgtcgcttgcaactagcaggtcacaaaccttatgcgctcgttggcggtgctacaggtctcatcggagatccgtccttcaaagatgctgaacgtagtctccaaacaaaagacacagtagatggctgggtcaagtctatccaaggacaactttctcgttttcttgactttgaaaatggcgaaaacaaggctgtcatggtcaacaactacgactggtttggcagcatcagcttcattgacttcctccgtgatattggaaaatacttcacggtcaactacatgatgagtaaggaatctgttaaaaaacggatcgaaacaggaatttcttacactgagttcgcttaccaaatcatgcaagggtatgacttcttcgtccttaaccaagaccataatgtcactcttcaaatcggtggttctgaccagtggggaaatatgacagctggtaccgaattgcttcgtcgtaaggcggacaagactggtcacgttatcactgttccactaatcacagatgcaactggtaagaaatttggtaaatcagaaggaaatgccgtctggctcaatcccgaaaagacttctccatacgaaatgtaccaattctggatgaacgtgatggacgctgacgctgttcgcttcttgaaaatctttactttcttgtcacttgatgagattgaagatattcgtaaacaatttgaagcagcgccacacgaacgcttggctcaaaaagtcttggctcgtgaagttgttacacttgttcacggagaagaagcctacaaagaagcacttaacatcactgagcaactctttgcaggaaacatcaaaaacctttctgtcaaagagctcaaacaaggacttcgtggtgtgccaaactaccaagtacaggcagacgaaaacaacaatatcgtggaactgctcgtctcatctggtatagttaactcaaaacgccaagcccgtgaagacgtccaaaacggagccatctacgtaaacggcgaccgcatccaagagcttgactatgtcttgagtgacgctgataagttagagaatgaactgactgttatccgtcgtgggaagaaaaaatactttgtattgacttactaa

SEQ ID NO: 38025 - DNA, 1272 bp, Streptococcus pneumoniae
atgtcatctaaatttatgaagagcactgcggtgcttggaactgttacacttgctagcttgcttttggtagcttgcggaagcaaaactgctgataagcctgctgattctggttcatctgaagtcaaagaactcactgtatatgtagacgagggatataagagctatattgaagaggttgctaaagcttatgaaaaagaagctggagtaaaagtcactcttaaaactggtgatgctctaggaggtcttgataaactttctcttgacaaccaatctggtaatgtccctgatgttatgatggctccatacgaccgtgtaggtagccttggttctgacggacaactttcagaagtgaaattgagcgatggtgctaaaacagacgacacaactaaatctcttgtaacagctgctaatggtaaagtttacggtgctcctgccgttatcgagtcacttgttatgtactacaacaaagacttggtgaaagatgctccaaaaacatttgctgacttggaaaaccttgctaaagatagcaaatacgcattcgctggtgaagatggtaaaactactgccttcctagctgactggacaaacttctactatacatatggacttcttgccggtaacggtgcttacgtctttggccaaaacggtaaagacgctaaagacatcggtcttgcaaacgacggttctatcgcaggtatcaactacgctaaatcttggtacgaaaaatggcctaaaggtatgcaagatacagaaggtgctggaaacttaatccaaactcaattccaagaaggtaaaacagctgctatcatcgacggaccttggaaagctcaagcctttaaagatgctaaagtaaactacggagttgcaactatcccaactcttccaaatggaaaagaatatgctgcattcggtggtggtaaagcttgggtcattcctcaagccgttaagaaccttgaagcttctcaaaaatttgtagacttccttgttgcaactgaacaacaaaaagtattatatgataagactaacgaaatcccagctaatactgaggctcgttcatacgctgaaggtaaaaacgatgagttgacaacagctgttatcaaacagttcaagaacactcaaccactgccaaacatctctcaaatgtctgcagtttgggatccagcgaaaaatatgctctttgatgctgtaagtggtcaaaaagatgctaaaacagctgctaacgatgctgtaacattgatcaaagaaacaatcaaacaaaaatttggtgaataa

SEQ ID NO: 38026 - DNA, 987 bp, Streptococcus pneumoniae
atgcccgttacgattaaagacgtggccaaggctgctggtgtttcgccttcaaccgtaacccgtgttattcaaaataaatcaaccattagcgacgaaacaaaaaaacgcgttcgcaaagctatgaaggaactcaactaccacccaaacctcaacgctcgtagcttggtaagcagctatactcaggttatcggattagttcttcctgatgactcagacgccttctaccagaatcctttctttccatcggttctacgtggcatctctcaagtcgcatctgaaaaccactatgccattcagatagcaacagggaaagatgagaaggagcgtctcaacgctatttcacaaatggtctacggcaagcgtgtagatgggctaatctttctctatgcccaagaagaagaccctctcgtaaaactcgtcgcagaagaacagttccccttccttatcctaggtaaatctctatctcctttcatcccacttgtcgacaacgacaatgttcaagctggttttgatgcgactgaatatttcatcaaaaaaggctgcaaacgcattgcctttatcggaggaagtaaaaagctcttcgtgaccaaagaccgtttaacaggctatgaacaggcgcttaaacattacaaacttaccactgacaacaatcgcatctactttgccgacgagtttctggaagaaaagggctataaatttagcaagcgattattcaagcacgatccacaaattgatgctatcatcacaaccgatagcctcctagctgaaggtgtttgtaactatattgccaaacaccagctggatgtccctgttctcagctttgactcggttaatcccaagctcaacttggcagcctatgtcgatatcaatagtttagagcttggtcgtgtttcccttgaaactattctccagattattaatgataataaaaacaataaacaaatttgttaccgtcaattgatcgcccacaaaattatcgaaaaataa

SEQ ID NO: 38027 - DNA, 1764 bp, Streptococcus pneumoniae
atgaaacgtagtatgtatgctggtcgtgttcgtgaggaacacatcggacaagaaataaccttgaaaggatgggttggccgtcgtcgtgaccttggtggtttgatctttatcgatcttcgtgaccgtgaaggaatcatgcagttggttatcaaccctgaaaaagtatctgcagaggttatggcaacagctgaaagccttcgtagcgaatttgttattgaggtgactggtcaggtcgctgcgcgtgagcaagccaatgataagttgccaactggtgcggttgagttaaacgtgacagctcttattgtgcttaacacagctaagacaacaccatttgagattaaggatggcattgaggcaaatgacgatacacgtttgcgttaccgttaccttgaccttcgtcgtccagaaatgttggaaaatcttaaacttcgtgccaaggtgacccactctatccgcaactacttggatgagttggagtttatcgacgtggagacaccattcctttctaagtcaacgcctgaaggggcgcgtgattatttagtgccgtctcgtgttaataaggggcatttttacgctcttcctcaaagtccacaaatcacgaaacagctcttgatgaatgctggttttgaccgttactaccaaatcgttaaatgtttccgtgacgaggacttgcgtggagaccgccagcctgaatttactcaggtcgacttggaaacgtccttccttactgagcaagaaatccaagatattacagaaggcttgatcgcgcgcgtgatgaaggaaacaaaagacatcgaagtaacgctaccgttccctcgtatgaaatacgatgatgctatggctctttacggttctgacaagccagatactcgttttgacatgttgcttcaggacttgacagaagtggtcaaaggtgtagactttaaagtcttttcagaagcacttgctgtaaaagcgattgtggtcaaaggagctgcggacaactattcacgtaaagacatcgacaagatgacggaagtagccaaacagtatggtgccaaaggtcttgcttgggtcaaggtggttgatggagaattaaacggaccagttgccaagttcttgactggtatccaagaagaattgacaacagcgcttgctcttgaagataaggacttggttctctttgtggcggatacgcttgaagtggctaatgcaacactgggtgcccttcgtggacgtattgctaaagagcttggcttgattgataatgataagttcaacttcctttgggtggttgactggccgatgtttgaatggtctgaagaagaaggccgctacatgagcgcccaccatccattcacacttccacaggaagagactgctcacgaattagaaggtgatttggctaaggttcgtgccattgcttacgatatcgtcttgaacggttatgagcttggtggtggtagccttcgtatcaaccaaaaagaccttcaagaacgcatgttcaaggctcttggtttctcagctgaagaagccaatgaccagtttggtttccttcttgaagccatggactatggtttcccaccacacggtggtttggctatcgggcttgaccgttttgtcatgttgcttgctggagaagaaaatatccgtgaagtcattgcctttcctaagaacaacaaggcaactgacccaatgacacaagctccatcaacagtcgctctcaaacaactagaggaactcagcttacaagtagaagaagatgaaacaagcaaaacgaattaa

SEQ ID NO: 38028 - DNA, 1290 bp, Streptococcus pneumoniae
atgaaattacaaaaaccaaaaggaacgcaggatattttacctgctgaatctgctaagtggcagtacgttgagggctttgcccgtgagattttcaagcgctataactatgcagaagtgcgcacgcctatttttgagcattacgaggttatcagtcgctctgtcggagatacaacggatatcgtaaccaaggaaatgtacgatttttatgacaagggtgaccgtcatattaccctccgtccagaaggaactgcgcccgttgtccgttcctatgtggaaaataaactcttcgccccagaagtgcaaaagccaagcaagttctactatatgggacctatgttccgttatgagcgtccacaggcagggcgcttgcgccaattccaccagattggtgttgagtgttttggctctagcaatccagctaccgatgtggaaacaatcgctatggcagcccattttttgaaggaaatcggtattcaaggtgtcaaattgcacctcaacactcttggaaatcctgagagccgtgcagcctaccgccaagccttgattgactatttgacaccgctcaaggagaccttgtctaaggatagccaacgtcgcttggaggaaaatcctcttcgtgtcttggactctaaggaaaaagaagacaaggtggcagtagagaatgcgccgtctatcttggactttcttgatgaagaaagccaaactcattttgatgctgtgcgtcagatgttggaaaatcttggagtagattacatcatcgataccaatatggtgcgtggtctggactactacaaccacaccattttcgagtttatcacagagattgagggcaatgacttgacagtctgtgcgggtggtcgctacgatggtttggttgcttactttggaggccctgaaactgctggatttggttttgggcttggtgtagagcgcctgcttctcatccttgaaaaacaaggcgtggccctccctatcgaaaacgccctagatgtctatatcgcagtcttgggtgatggagcaaatgtcaaagccctagaactagtccaagctcttcgccaacaaggtttcaaagcagagcgtgattacctcaaccgtaagctcaaagctcagttcaagtcagcagatgtctttgcggctaagaccctcatcaccctaggagagagcgaagtcgaaagcggacaagtgacggtcaagaacaaccaaacccgagaagaagtgcaagtgtcacttgagacaatcagccaaaacttctcagaaatctttgaaaaactaggattttatactcaatga

SEQ ID NO: 38029 - DNA, 1704 bp, Streptococcus pneumoniae
atgactgaattagataaacgtcaccgcagtagcatctatgacagcatggttaaatcacctaaccgtgctatgcttcgtgcgactggtatgacagataaggactttgaaacatcgattgtgggagtgatttcgacttgggcggaaaatacaccatgtaacattcacttgcatgatttcgggaaactggctaaagaaggtgtcaaatctgcaggcgcttggcctgtacagtttggaaccattaccgtagcggacgggatcgctatgggaacgcctggtatgcgtttctctctaacatctcgtgacatcatcgcggactccatcgaggcggctatgagtggtcacaacgtggatgccttcgtcgctatcggtggctgtgacaagaacatgcctggatctatgattgctattgctaatatggatatcccagctattttcgcctatggtggaactattgcaccgggaaatcttgatggtaaagatatcgacttggtttctgtctttgaaggtatcggaaaatggaaccacggtgacatgacagctgaggacgtgaaacgtcttgaatgtaatgcctgccctggccctggtggctgtggtggtatgtatactgctaataccatggcaactgctatcgaagttctagggatgagtttgccagggtcatcctctcacccagctgaatcagctgataagaaagaagatatcgaagcagcaggccgtgctgttgttaagatgttggaacttggtctcaaaccatcagatatcttgactcgtgaagcctttgaagatgctatcactgtaacgatggctctcggtggttctacaaacgccactcttcacttgctcgccattgcccatgccgcaaatgttgacttgtcacttgaggacttcaatacgattcaagaacgtgtgcctcacttggccgacttgaaaccatctggtcagtatgtcttccaagacctctacgaagtcggtggtgtccctgcggttatgaagtacttgttggcaaatggtttccttcacggagatcgcatcacatgtactggtaagactgtagctgaaaacttggctgactttgcagacttgactccaggccaaaaagttatcatgccacttgaaaatccaaaacgtgcggatggtccgcttatcatcttgaacgggaaccttgctcctgacggtgcagttgccaaggtatcaggtgttaaagtgcgtcgtcacgttgggccagctaaggtctttgactcagaagaagatgcgattcaggccgttctgacagatgaaatcgttgatggcgatgtagtcgttgttcgttttgttggacctaaaggtggtcctggtatgcctgagatgctgtcactttcttcaatgattgttggtaaaggtcagggagataaggtggccctcttgacggacggccgtttctctggtggtacttatggtctggttgttggacatatcgctcctgaagctcaggatggtggaccaattgcctatctccgtaccggcgatatcgttacggttgaccaagataccaaagaaatttccatggccgtatccgaagaagaacttgaaaaacgcaaggcagaaacaaccttgccaccactttacagccgtggtgtcctcggtaaatatgcccacatcgtatcatctgcttcacgcggagccgtgacagacttctggaatatggacaagtcaggtaaaaaataa

SEQ ID NO: 38030 - DNA, 1347 bp, Streptococcus pneumoniae
atgatgaagttcatattggatattgttagtacaccagctattttagtagctttaattgcaattttaggattagttcttcagaagaagaaattacctgatattattaaaggtggaattaagacctttgttggtttcttagttgtatctggtggtgcaggaattgtacaaaattctttaaatccatttggtaccatgtttgagcatgcttttcatttatctggcgttgtgccgaataatgaagcaattgtagctgtagctttaacaacatatggctcagctactgcaatgattatgtttgcaggcatggtgttcaatatcttaatcgctcgttttactcgatttaaatatatctttttaacagggcaccacactctatatatggcgtgtatgattgcggtcattttatcagttgctggctttactagcttgcctcttatcttactaggaggattagcactcggtattattatgagtatttccccagcatttgtgcaaaaatatatggttcaattaactggaaatgacaaggtggctttaggtcatttcagttctttgggatattggttgagtggttttactggtagccttatcggtgacaaatcaaaatcaacagaggacattaaatttccaaagagtttagcttttttacgtgatagtactgttagtattactttatccatggcagttatttacattattgtagctatctttgcagggtcagaatatatagaaaaagaaatcagtagtggtacaagtggtctagtttatgctttacaattagcaggtcaatttgcagcaggggtatttgttattttagcaggtgttcgccttattttgggcgaaattgttccagcctttaaaggtatttcagagcgtcttgtacctaattcaaaacctgctttggattgtccgattgtttatacttatgcacccaatgcagttctaattggatttatctctagttttattggtggtttagtaagtatggcaattatgattgcttcaggaacggttgttatcttaccaggtgttgtgcctcatttcttctgtggagcgactgcaggtgtcattgggaatgcatctggtggtgttcgtggagccactattggagcatttttacaaggtattttaatcagttttcttccagtctttttaatgccagttttgggaggacttggtttccaaggatcaactttctcagatgcagattttggtctatcaggaattattttaggaatgttaaatcaatttggctcacaagcaggcattgtgattggtcttgttcttattctagcagttatgtttggagtatcctttattaaaaagccatctgcaaaggaggaataa

SEQ ID NO: 38031 - DNA, 2031 bp, Streptococcus pneumoniae
atgtttgattatagagcactagttattttgatgactttgatggatcattgtgagctatcattatatgaattatctgttaaggtgagcttacctataaaggaagtcaaagaaggaatagattatttagtgccttatctagctaataaagggatagtgctggataaaaaacaaggtcgctatagtttatcaaatcgtacgaagcagtctttgacagatattattaagtcggatgaattggttttaccaaagtcgactcgcttagctttaatctatctttacactttttgccgattagattttatatcgaataatcattaccaagactttttgaaagtaagtaagaatacaaccttatctgatattcaatcattaagaaagattatgttagataatgatttggagctagggtacagtagagcaaaaggttatactttacacggttcagagtggaataagcaccgcttagcttttcaaatggttagtgagttgctggaatcctccatagggatttgggatttggattatgttttatccagttgggggtattcattaacttatgatttgataaatcaggtagttaaagattattatgagaagctacaactagtacctattgttaatcaattaaaagtttgccttttcggtttagtattcattctgtgtaggtatcaaagggatgttgaaagagtatgtctttcagagacattagtatctcctgttattcaagatataaccactattttattggatacagtggttgatttgggaattatagatacggtgttttctgaggatgattatcgctatatcacagttttattatcaagttgctttgaaggtgaagtagatgttgctccggtttactttaatcaattaacagaggctattataagtagaatggaagatatttctttgttacattttaaacaaagggaaggattgagagaaaatcttcgccgccaccttataccggcttactatagattaaagttcggcctacctagttcaaatgaatatgtattgcatgttaaagaacattatcctgatttatttgaattagtcaaagattctttgatgcccttgatggacgctattgacaatcccatacctgatagtgaaacagcatattttgttatccatttcggaggttatttaaagaaagcagatactttgcctcaaaaatgctataaagcagcaatcatttgtcctaatggtgttagttcttcattgatgttaaaagagaatctattagcattatttcctcaaattgagtttatagcaacctcaaagattgatgatttacaggtgaaagctagtagtgactatgatatggttttttctaccataaaggtggagacagaaaagccaaattatctagtttcggttatgatgactgaagagcaagcaatacaactagtagaactagtgttaaaagattttccgaatttagagtatggagattttgagattgaacaaatcctgaatattgtcaaaagatatggaattattacacaagaattggaattaagattggcgttaaagaattatctttatcaaaaaaatgatagaaaggaaattgtaccagtgctagaacaacttattaccaaagaaacctatcaggttagttcgcaaaaattaggatggaaggaggcgattcgtttagcagctaaaccgcttttggatcaagataagataactgagaactaccctgaggcaatgattcaaaaagtagaagagtttggaccttttattaatttagggaagggagtagcaattcctcacgctcggccagatgaaggtgtgaatgaaataggaatgtcaatgttagttttggaagaaccgatttatttattggataatccagaacaagaggtaagattgttgatttgtattgcagccattgataatgagagtcatttaaaggctttgtcacatttaacaacaattttaagagataaaaatcatgttcaaactttaatatcatcaaaaaactatgatgacattaaaatgataattaaacaggaggattag

SEQ ID NO: 38032 - DNA, 150 bp, Streptococcus pneumoniae
atgcgcgtaaatattacacttgaacacaaagaatctggtgaacgcttgtaccttacttctaaaaacaaacgtaacactccagaccgccttcaattgaagaaatactcaccaaaacttcgcaaacacgttgtgtttacagaagtgaagtaa

SEQ ID NO: 38033 - DNA, 1017 bp, Streptococcus pneumoniae
atgacaaattcagtattccaaggacgcagcttcttagcagaaaaagactttacccgtgcagagttagaataccttattggtctttcagctcacttgaaagatttgaaaaaacgcaatattcaacaccactaccttgctggcaagaatatcgctctcctatttgaaaaaacatctactcgtactcgtgcagcctttacaactgcggctatcgaccttggtgctcacccagaatacctcggagcaaatgatattcagttgggtaaaaaagaatctactgaagatactgctaaagtattgggacgtatgtttgacgggattgaattccgcggattcagccaacgtatggttgaagaattggcagaattctcaggcgttccagtatggaacggtctaactgacgaatggcacccaactcaaatgctcgctgactacttgactgttcaagaaaacttcggtcgcttggaaggcttgacattggtatactgtggtgatggacgtaacaacgttgccaacagcttgctcgtaacaggtgctatccttggtgtcaatgttcacatcttctcaccaaaagaactcttcccagaaaaagaaatcgttgaattggcagaaggatttgctaaagaaagtggcgcacatgttctcatcactgaagatgctgatgaagcagttaaagatgcagacgttctttacacagacgtttgggtatcaatgggtgaagaagacaaattcgcagaacgtgtagctcttcttaaaccttaccaagtcaatatggacttagttaaaaaagcaggcaatgaaaacttgatcttcctacactgcttgccagcattccacgatactcacactgtttatggtaaagacgttgctgaaaaatttggtgtagaagaaatggaagtaacagacgaagtcttccgcagcaagtacgctcgccacttcgatcaagcagaaaaccgtatgcacactatcaaagctgttatggctgctacacttggtaacctttatattcctaaagtataa

SEQ ID NO: 38034 - DNA, 948 bp, Streptococcus pneumoniae
atggcaaatcgtaaaattgtagtagctttgggaggaaatgcgattctttcttctgacccatcagcaaaggctcaacaagaagctttagttgaaacagctaagcatcttgtaaaattgattaaaaatggagatgatctgattatcactcacggtaatggacctcaagttgggaatctcttgctccaacatttggcatcagactctgaaaagaaccctgccttcccactcgactcacttgtcgctatgacagaaggtagcatcggtttctggttgaaaaatgctttgcaaaatgctctcttggatgaaggcatcgaaaaaaatgttgcctctgttgtaacgcaagttgtcgtagataaaaatgatccagcttttgttaacttgagtaaaccaatcggtcctttctattcagaagaagaagcaaaagcagaagccgaaaaaagcggagcgactttcaaggaagatgctggccgtggctggcgtaaggtcgttgcctcaccaaaacctgttgacatcaaagaaattgaaaccatccgtactcttttaaataatggtcaagtcgtcgtagctgcaggtggtggcggtattcccgtcgtcaaagaaaacaatggacatttgactggtgtcgaagcggttattgataaagacttcgcttcccaacgtttggcagaattggttgatgcagacctcttcatcgttttgacaggtgtagattatgtatttgttaactacaacaagccaaaccaggaaaaattggaacatgtgaatgttgcccagctggaagaatatatcaaacaagatcagtttgcaccaggtagcatgcttccaaaagtagaagcagctatcgcttttgtcaatggtcgtccagaaggaaaagcagttattacttcccttgaaaatctaggcgccttgattgaatctgaaagcggaacaattattgaaaaaggataa

SEQ ID NO: 38035 - DNA, 1512 bp, Streptococcus pneumoniae
atgagtgaaaaagctaaaaaagggtttaagatgccttcatcttacaccgtattattgataatcattgctattatggcagtgctaacttggtttatccctgcgggggcctttatagaaggtatttacgagactcagcctcaaaatccacaagggatttgggatgtcctcatggcaccgattcgggctatgctaggtactcatccagaggaaggttcgctcattaaagaaacgagcgcagcgattgatgtagccttcttcatccttatggttgggggtttccttggcattgtcaacaaaactggtgctcttgacgtagggattgcctctatcgtgaagaagtataagggccgcgaaaaaatgttaattttggtactgatgcctttgtttgccctcggtggtacaacttatggtatgggggaagaaacaatggccttctatccactccttgtgccagttatgatggccgttggttttgatagcctgactggtgttgcaattattttgctcggttctcaaatcggctgtttggcatctactctgaatccatttgcgacaggtattgcttcagcgactgcgggagttggtacaggggacggtatcgtacttcgtctgatcttctgggttaccttgactgctcttagtacttggtttgtttaccgttatgcggataagattcaaaaagatccgactaagtcactggtttatagtactcgcaaagaagatttgaaacactttaacgtagaagaatcttcatctgtagaatctacacttagcagcaaacaaaaatcagttctcttcttatttgtgttgacattcattttgatggtattgagcttcattccatggacagaccttggcgttaccatttttgatgactttaatgcttggttgactggtcttccagttattggtaatattgtcggttcatctacttctgcactaggtacttggtacttcccagaaggcgcaatgctctttgcctttatgggtatcctgattggtgttatttatggtcttaaagaagataagattatctcttccttcatgaatggtgctgctgacttgctcagtgttgccttgatcgtagcgattgctcgtggtattcaagttatcatgaacgacggtatgattaccgatacaatcctcaactggggtaaagaaggcttgagcggtctatcttcacaagtctttatcgttgtaacttatatcttctatctacctatgtcattcttgatcccatcttcatctggtcttgccagcgcaactatgggtatcatggctccacttggagaatttgtaaatgtccgtcctagcttgattatcactgcttaccaatctgcttcaggtgtcttgaacttgattgcaccaacatctggtattgtgatgggagctcttgcacttggacgtatcaacattggtacttggtggaaattcatgggcaaactcgtagtcgctattattgtagtgaccatcgcccttcttctccttggaaccttccttccattcctataa

SEQ ID NO: 38036 - DNA, 900 bp, Streptococcus pneumoniae
atggcaatatttttcatgatttttctgattgtttgtgtgctcctattggtgatagtcacactgagtacagtttatgtggttcgtcagcagtcggtggcgattattgaacgctttgggaaataccaaaaggttgctaatagcggtattcatattcgcttgccttttgggattgactcgattgcagcacggattcagttgcgcttgttgcaaagtgatattgtggttgagactaagaccaaggacaatgtgttcgttatgatgaatgtagcgactcagtaccgtgtcaacgagcagagcgtgacagatgcttactataaactcatacgtccagaatctcagattaaatcttatatcgaagatgctcttcgctcttctgttccaaaattaaccttggatgaattgtttgagaaaaaagatgagattgcccttgaggttcaacaccaagtagcagaagaaatgaccacttacggctacattatcgtgaaaaccttgattaccaaggtcgaaccagatgcagaagttaagcaatctatgaatgaaatcaatgcggcgcaacgtaagcgggtcgcagcacaagaattggcggaagctgacaagattaaaattgtcactgcagctgaagccgaagcagaaaaagaccgccttcatggtgtggggattgcccaacaacgtaaggcgattgtggatggattggcagagtctatcaccgaactcaaggaagccaatgttggcatgacagaagaacaaatcatgtctatcctcttgaccaaccagtatttggataccttgaatacctttgcctctaaaggaaatcaaaccatctttttaccaaatactccaaatggtgtggatgatatccgtacacaaatcttgtcagcccttcgcgctgagaagaaataa

SEQ ID NO: 38037 - DNA, 441 bp, Streptococcus pneumoniae
atgttaaaacatataccgaaaaatatttctccagatttattgaagactttaatggaaatgggacatggagatgaaatagtattagctgacgcgaattatccttctgcctcatgtgcaaataagctaattcgttgtgatggtgtaaatattccagaattattagattccattctgtatttaatgccattagatagttacgtcgatagttcaattcagtttatgaacgttgtttcgggtgatgatattcctaagatatggggtacctatagacagatgattgaaggtcatggtacagatcttaaaacgattacttatcttagaagagaagacttttatgaacgtagtaagaaagcttatgctattgttgctacaggagaaacttcactttatgctaatattatccttaagaaaggagtagttgttgaaagagaaaatgtttaa

SEQ ID NO: 38038 - DNA, 1467 bp, Streptococcus pneumoniae
ttggggcaggaacacacttatggcgatttaaaggctgattcggatagtttggctgcagtcattgaccaactaggcttgcctgagaagtctcctgtggttgtttttggtggccaagaatatgaaatgttggcaacctttgtagcgctgactaagtcaggtcatgcctacattccaattgatagccattcggccttggagcgagtttcagctattttagaagtagcagagccaagcttgattattgccatttcagcctttcccttggagcaggtttctacaccaatgataaatctagctcaggttcaagaagcctttgcccaagggaataactatgaaatcacgcatccagtcaagggagatgataattactacattatctttacttctggtacgactggtaagcctaagggagtgcagatttcacatgataatctcctcagctttacaaactggatgattacggataaggaatttgcgacaccgagtcgtccgcaaatgctggcacagccaccttattcttttgacttgtctgtcatgtattgggcaccgaccttggcacttggtggtacgcttttcactcttccttcagtcatcactcaggactttaagcaactctttgcggctatcttttcattgccaatcgctatctggacatcaacaccatcctttgcagatatggccatgttgtctgaatacttcaacagtgagaaaatgcctggaatcacgcatttctactttgatggtgaagaattgacggtcaaaacagctcaaaaactgcgcgagcgtttcccaaatgcccgtatcatcaatgcttacggcccaacagaagcgacagtagctctgtcagcagttgccgtgacagacgagatgttagcgactctcaaacgcctaccaatcggctataccaaggctgattctccaacctttatcattgacgaggaaggaaataaactgccaaatggtgagcagggagaaatcattgtttctgggccagctgtttcaaaaggttatatgaacaatcctgaaaaaacagcagaagccttctttgagtttgaagatctgccagcctatcacacaggcgatgtgggaaccatgacagatgagggcttgcttctctacggcggacgcatggacttccagattaagtttaacggttaccgcattgagttagaagatgtctctcaaaacctcaacaagtctcgctttatcgaatctgctgtcgcagtaccgcgctataacaaggaccacaaggtacaaaatctattggcttatgtcatcttaaaagacggtgttcgtgagcagtttgagcgagatatcgatattaccaaggccatcaaggaagacctgacagacatcatgatgtcctatatgatgccatctaaattcctttaccgagacagtttgccactaactccaaatggaaagattgacatcaaaggattgattaacgaggtgaataagagatga

SEQ ID NO: 38039 - DNA, 993 bp, Streptococcus pneumoniae
atgagccccatttgtgaaccccatttctcagatacgagttatggtttcagaccaaataggtcatgtgaaaaagccatcatgaagctcttagaatacttaaatgacggctatgagtggatagtggatatagacctagagaaatttttcgatacagttcctcaagatagattgatgtccttagtacataacattatcgaagacggagatacggaatccttgattcgtaagtatcttcattcaggtgttatcattaatggtcaacgttataaaacactagttggtacaccacagggaggaaatttatctcctctcttatccaatatcatgcttaatgaattggacaaggaattagaaaagaggggacttcgatttgtgcgctacgcagatgattgtgtgattacggtcgtaagcgaggcagccgctaagcgtatgatgtattcagtcagtcgttttattgaaaaacggctaggtttgaaagtaaacatgaccaagactaagattaccagaccaagagagttgaaatatctaggttttgggttctggaaatcatcagatggttggaaaagtcgtccacatcaagatagtgttcggagatttaagcttaaattgaagaaactaacacagaggaaatggagtatagacctaacaagacgtattgagcaactgaatttgtctattcgaggatggataaactatttctcattgggaaatatgaaaagtatagtcgccagcatagatgagcgcttgcgtactcgcctacgagtgattatctggaagcaatggaagaagaaatcgagacgattatggggattgcttaagttaggagttcctaaatggatagcagataaggtatctggctggggcgaccattatcaattagtagctcagaagtcggtacttaaacgtgctatatcaaaaccagtcctggaaaaacgtggactggtttcgtgtttggattattaccttgaacgacatgcgttaaaagttagttga

SEQ ID NO: 38040 - DNA, 705 bp, Streptococcus pneumoniae
atgatgaatgaattatttggagaatttctagggactttaatcctgattcttctaggaaatggtgttgttgcaggtgtggttcttcctaaaaccaagagcaatagctcaggttggattgtgattactatgggttgggggattgcagttgcggttgcagtctttgtatctggcaagctcagtccagctcatttaaacccagctgtgaccatcggtgtggccttaaaaggtggtttgccttgggcttccgttttgccttatatcttagcccagttcgcaggggccatgctgggtcagattttggtttggttgcaattcaaacctcactatgaggcagaagaaaatgcaggcaatatcctggcaaccttcagtactggaccagccatcaaggatactgtatcaaacttgattagcgaaatccttggaacctttgttttggtgttgacaatctttgctttgggtctttacgattttcaggcaggtatcggaacctttgcagtgggaactttgattgtcggtatcggtctatcactaggtgggacaacaggttatgccttgaacccagctcgtgaccttggacctcgtatcatgcacagcatcttgccaattccaaacaagggagacggagactggtcttacgcttggattcctgttgtaggccctgttatcggagcagccttggccgtgcttgtattctcacttttctaa

SEQ ID NO: 38041 - DNA, 1509 bp, Streptococcus pneumoniae
atgtcacaagaaaaatacatcatggctattgaccagggaactacaagttctcgtgccatcattttcaacaaaaaaggggaaaaggttagctcgagtcaaaaagagtttacccagattttccctcaggcaggttgggttgagcacaatgccaatgaaatttggaactctgttcagtcagttattgcgggtgctttcattgaaagtggtgtcaagccaaatcaaatcgaggcaatcgggattaccaaccaacgtgaaacaacggttgtctgggataagaaaacaggacttcctatctacaatgctatcgtttggcagtcacgccagacagcacctttggctgagcaactaaaaagccaaggttatgtggaaaaattccatgaaaagactggtttgattattgatgcttacttctctgctaccaaggttcgttggattttggatcatgtagaaggtgctcaagagcgagcagaaaaaggggaattgctctttggtactatcgatacttggttggtttggaaattgactgacggtgcggctcacgtgactgactactcaaatgcagctcgtaccatgctttataacattaaagaactcaaatgggatgatgagattttggaaatccttaacattccgaaggctatacttccagaagttcgttctaactccgaaatctacggcaagacagctccattccatttctacggtggagaggtgccaatctcaggtatggctggggaccaacaagcagccctctttggacagttggcttttgagccaggtatggttaagaatacttatggaacaggctctttcatcatcatgaatactggggaagagatgcagttgtctgaaaacaacctcttgacaaccattggttacggaatcaacggtaaggtttattatgccttggaaggttctatcttcatcgcaggaagtgctattcagtggcttcgtgacggtcttcgcatggttgaaaattcaccagaatctgaaaaatacgctcgtgattctcacaacaacgatgaagtttatgtcgttccagcctttacaggtctaggcgctccatactggaaccaaaatgctcgtggttccgtctttggtttgactcgtggaacaagcaaagaagactttatcaaggcgactttgcaatctattgcttatcaagtgcgtgacatcatcgacactatgcaagtggatactcagactgccattcaagtactgaaggtggatggtggtgcagccatgaacaacttcctcatgcagttccaggcggatattttaggcattgacattgcacgtgctaaaaacttggaaacaacagctctaggagcggccttcctagcaggtttatcagtaggatactggaaagacttggacgagttgaaactcttgaacgagacaggagaactctttgagccatctatgaacgaatctcgcaaggaacaactctacaagggctggaagaaggctgtgaaagcaactcaagtctttgcggaagtagacgactaa

SEQ ID NO: 38042 - DNA, 873 bp, Streptococcus pneumoniae
atggataaaattattaaaactatatcagaaagcggagcctttcgtgcttttgtccttgatagcactgaaaccgtccgcactgctcaagaaaaacatcaaacccaagctagctcaactgtagcgcttggtcgaactcttatcgccagccagattctcgcagccaatgaaaaaggaaataccaaacttacagttaaggtgttgggatctagctctctaggtgctattatcaccgtcgctgataccaaggggaacgtcaaaggctatgttcaaaatcctggtgttgacatcaaaaagactgcgactggtgaagtcctagtcggaccttttgttggaaatggtcaattcctcgttatcacagactacggtactggaaatccttacaactctataactcccctcatctctggagaaatcggtgaagaccttgccttttaccttactgaaagccaacaaacgccttcagcggtcggcctcaatgtccttttggacgaggaagacaaggtcaaggttgcaggtggtttcctagttcaagtcttgccaggagccaagaaagaagagattgctcgctttgaaaaacgcatccaagaaatgccagctatctctactcttctcgaaagcgacgaccatatcgaagccctcctcaaggctatctacggggacgaagcctacaagcgtctttctgaagaagaaatccgtttccaatgtgactgtagccatgaacgctttatgaacgctcttgccagccttccaagctcagacttacaggaaatgaaagaggaagaccacggggcagaaatcacttgtcaattctgccaaactacttacaactttgatgaaaaggacctggaggaactcattcgtgacaaatcttaa

SEQ ID NO: 38043 - DNA, 1011 bp, Streptococcus pneumoniae
ttgatgaaaaggacctggaggaactcattcgtgacaaatcttaatacaccttttatgattggcaatattgagattcccaatcgtaccgttttagcgcctatggctggcgtgaccaactcagcctttcgtaccatcgcaaaagagctcggagctggactcgttgtaatggaaatggtctctgacaagggaatccaatacaacaacgaaaaaaccctgcatatgcttcatatcgatgagggcgaaaaccctgtctctatccaactttttggtagcgatgaagacagcctagcacgcgcagcagaattcatccaagaaaacaccaagaccgatatcgtcgatatcaacatgggctgccctgtcaacaaaatcgtgaagaacgaagctggagctatgtggctcaaggatcctgacaagatctactctatcatcaacaaggtccagtctgtccttgatatcccacttactgtcaaaatgcgtaccggctgggcggacccatctctggcagtagaaaatgccctcgctgctgaggctgcaggtgtttctgccctcgccatgcatggccgtacccgtgaacaaatgtatactggccacgcagaccttgagaccctttacaaggttgcccaagctctaaccaagattccattcatcgccaacggtgatatccgtactgtccaagaagccaagcaacgcatcgaagaagttggtgctgacgcagtcatgattggccgagctgccatgggaaatccttacctcttcaaccaaatcaaccattactttgaaacaggagaaatcctacctgatttgacctttgaagacaagatgaagatcgcctacgaacacttgaaacgattgattaacctcaaaggagaaaacgtcgcagttcgtgaattccgcggcctcgctcctcactatctccgtggaacatctggcgctgccaaactccgtggagccatttcgcaagctagcaccctagcagagattgaagccctcttgcaattggagaaggcttaa

SEQ ID NO: 38044 - DNA, 2106 bp, Streptococcus pneumoniae
atgtttgcatcaaaaagcgaaagaaaagtacattattcaattcgtaaatttagtattggagtagctagtgtagctgttgccagtcttgttatgggaagtgtggttcatgcgacagagaacgagggaagtacccaagcagccacttcttctaatatggcaaagacagaacataggaaagctgctaaacaagtcgtcgatgaatatatagaaaaaatgttgagggagattcaactagatagaagaaaacatacccaaaatgtcgccttaaacataaagttgagcgcaattaaaacgaagtatttgcgtgaattaaatgttttagaagagaagtcgaaagatgagttgccgtcagaaataaaagcaaagttagacgcagcttttgagaagtttaaaaaagatacattgaaaccaggagaaaaggtagcagaagctaagaagaaggttgaagaagctaagaaaaaagccgaggatcaaaaagaagaagatcgtcgtaactacccaaccaatacttacaaaacgcttgaacttgaaattgctgagttcgatgtgaaagttaaagaagcggagcttgaactagtaaaagaggaagctaaagaatctcgaaacgagggcacaattaagcaagcaaaagagaaagttgagagtaaaaaagctgaggctacaaggttagaaaacatcaagacagatcgtaaaaaagcagaagaagaagctaaacgaaaagcagatgctaagttgaaggaagctaatgtagcgacttcagatcaaggtaaaccaaaggggcgggcaaaacgaggagttcctggagagctagcaacacctgataaaaaagaaaatgatgcgaagtcttcagattctagcgtaggtgaagaaactcttccaagctcatccctgaaatcaggaaaaaaggtagcagaagctgagaagaaggttgaagaagctgagaaaaaagccaaggatcaaaaagaagaagatcgccgtaactacccaaccaatacttacaaaacgcttgaccttgaaattgctgagtccgatgtgaaagttaaagaagcggagcttgaactagtaaaagaggaagctaaggaacctcgagacgaggaaaaaattaagcaagcaaaagcgaaagttgagagtaaaaaagctgaggctacaaggttagaaaacatcaagacagatcgtaaaaaagcagaagaagaagctaaacgaaaagcagcagaagaagataaagttaaagaaaaaccagctgaacaaccacaaccagcgccggctactcaaccagaaaaaccagctccaaaaccagagaagccagctgaacaaccaaaagcagaaaaaacagatgatcaacaagctgaagaagactatgctcgtagatcagaagaagaatataatcgcttgactcaacagcaaccgccaaaaactgaaaaaccagcacaaccatctactccaaaaacaggctggaaacaagaaaacggtatgtggtacttctacaatactgatggttcaatggcaacaggatggctccaaaacaacggttcatggtactatctaaacgctaatggtgctatggcgacaggatggctccaaaacaatggttcatggtactatctaaacgctaatggttcaatggcaacaggatggctccaaaacaatggttcatggtactacctaaacgctaatggtgctatggcgacaggatggctccaatacaatggttcatggtactacctaaacagcaatggcgctatggcgacaggatggctccaatacaatggctcatggtactacctcaacgctaatggtgatatggcgacaggatggctccaaaacaacggttcatggtactacctcaacgctaatggtgatatggcgacaggatggctccaatacaacggttcatggtattacctcaacgctaatggtgatatggcgacaggttgggtgaaagatggagatacctggtactatcttgaagcatcaggtgctatgaaagcaagccaatggttcaaagtatcagataaatggtactatgtcaatggctcaggtgcccttgcagtcaacacaactgtagatggctatggagtcaatgccaatggtgaatgggtaaactaa

SEQ ID NO: 38045 - DNA, 2289 bp, Streptococcus pneumoniae
atgaactattcaaaagcattgaatgaatgtatcgaaagtgcctacatggttgctggacattttggagctcgttatctagagtcttggcacttgttgattgccatgtctaatcacagttatagtgtagcaggggcaactttaaatgattatccgtatgagatggaccgtttagaagaggtggctttggaactgactgaaacggactatagccaggatgaaacttttacggaattgccgttctcccgtcgtttgcagattctttttgacgaagcagagtatgtagcgtcagtggtccatgctaaggtgctaggtacagagcacgtcctctatgcgattttgcatgatggcaatgccttggcgactcgtatcttggagagggctggtttttcttatgaagacaagaaagatcaggtcaagattgctgctcttcgtcgaaatttagaagaacgggcaggctggactcgtgaagatctcaaggctttacgccaacgccatcgtacagtagctgacaagcaaaattctatggccaatatgatgggcatgccgcagactcctagtggtggtctcgaggactatacgcatgatttgacagagcaagcgcgttctggcaagttagaaccagtcatcggtcgggacaaggaaatctcacgtatgattcaaatcttaagccggaagactaagaacaaccctgtcttggttggggatgctggtgtcgggaaaacagctctggcgcttggtcttgctcagcgtattgccagtggtgacgtgcctgcggaaatggctaagatgcgcgtgttagaacttgatttgatgaatgtcgttgcagggacacgcttccgtggtgactttgaagaacgcatgaataatatcatcaaggatattgaagaagatggccaagtcatcctctttatcgatgaactccacaccatcatgggttctggtagcgggattgattcgactctggatgcggccaatatcttgaaaccagccttggcgcgtggaactttgagaacggttggtgccaccactcaggaagaatatcaaaaacatatcgaaaaagatgcggcactttctcgtcgtttcgctaaagtgacgattgaagaaccaagtgtggcagatagtatgactattttacaaggtttgaaggcgacttatgagaaacatcaccgtgtacaaatcacagatgaagcggttgaaacagcggttaagatggctcatcgttatttaaccagtcgtcacttgccagactctgctatcgacctcttggacgaagcagcagcaacagtgcaaaataaggcaaagcatgtaaaagcagacgattcagatttgagtccagctgacaaggccctgatggatggcaagtggaaacaggcagcccagctaatcgcaaaagaagaggaagtacctgtctacaaagacttggtgacagagtctgatattttgaccaccttgagtcgcttgtcaggaatcccagttcaaaaactgactcagactgacgctaagaaatatctaaatcttgaagcagaactccataaacgggttatcggtcaagatcaagctgtttcaagtattagtcgtgcgattcgccgtaatcagtcaggaattcgcagtcacaagcgtccgatcggttcctttatgttcctaggacccacaggtgtcggtaagaccgagttggccaaggctttggcagaagttctctttgatgacgaatcagcccttatccgctttgatatgagtgagtatatggagaaattcgcagccagccgtctaaatggagctcctccaggctatgtgggttacgaagaaggtggggagttgacagagaaggttcgcaataaaccctattccgttctcctctttgatgaggtagagaaggcccacccagatatctttaatgttctcttgcaggttctggatgacggtgtcttgacagatagcaagggacgcaaggtcgatttttcaaataccattatcattatgacatcgaatctaggtgcgactgcccttcgtgatgataagactgttggttttggggctaaggatattcgttttgaccaggaaaatatggaaaaacgcatgtttgaagaactgaaaaaagcttatagaccggaattcatcaaccgtattgatgagaaggtggtcttccatagcctatctagtgaccatatgcaggaagtggtgaagattatggtcaagcctttagtggcaagtttggctgaaaaaggcattgacttgaaattacaagcttcagctctgaaattgttagcaaatcaaggatatgacccatag

SEQ ID NO: 38046 - DNA, 1353 bp, Streptococcus pneumoniae
atggcagaagtagaagagttacgagtacaacctcaagatatcttagctgagcaatccgttttaggggctatctttattgatgagagtaaacttgtttttgtgcgagaatacattgagtctcgggacttttttaagtatgcccatcgtttgattttccaagccatggtcgatttatccgatcgtggtgatgccatagatgcaacaacggttcgtactatccttgataatcaaggtgatttacagaatattggtggcttgtcttacttggttgagattgttaattctgtgccaacttctgctaatgcggagtattatgctaagattgttgcagaaaaagcaatgctacgtcgtttaattgccaagttgacagagtctgtcaaccaagcttacgaagcgtcacaaccagctgatgaaattattgctcaggcagaaaaagggttgattgatgtcagtgaaaatgcaaatcgaagcgggtttaagaacattcgagatgtgttgaatctcaactttggaaatctggaagctcgctcgcaacaaacgaccgatattacaggtattgcgacaggttatcgtgatttggatcatatgacaacaggacttcatgaggaggagttgattatcttagcagctcgtccagcagttggtaagacagcatttgccttgaatatcgctcagaatattgggactaagttggacaaaacggttgctattttttcactcgaaatgggtgcggaaagcttggtagaccgtatgttagctgcagaaggcttggtggagtcacattctatccgtacagggcaattgacagatgaggagtggcaaaaatatactattgctcagggtaatctagctaacgccagtatctatatcgatgatacgccaggtattcggattacagagattcgttctcgttctcgtaaattggctcaagaaactggaaatcttggtttgattttgatagactatttgcaacttatcacgggaactggtcgagaaaatcgtcaacaagaagtttctgaaatttctcgtcagttgaaaatactagccaaggaattgaaggttccagtaatcgctctgagtcagctttctcgtggtgtagaacaacgtcaggacaagagaccggtcttgtctgatattcgtgaatctgggtctattgagcaggacgctgatatcgtagcttttctctatcgcgatgactactatgaacgtggtggtgaagaagaggagggtatcccaaataataaggtggaagttattatcgagaaaaaccgtagtggagctcgtggaacagtggaattgattttccaaaaagaatacaataaattttcaagtatctcaaagagggaggcataa

SEQ ID NO: 38047 - DNA, 453 bp, Streptococcus pneumoniae
atgaaagtaatctttttagcagatgttaaaggaaaaggtaaaaaaggcgaaattaaggaagtaccaacagggtatgcgcaaaactttcttatcaaaaagaatctagccaaagaagcgactgctcaagctgtaggtgaacttcgtggtaaacaaaaatcggaagaaaaagctcacgctgagatgattgcagaaggaaaagcaattaaagcacaacttgaagcagaagaaactgttgtagaatttgttgaaaaagttggtccagatggtcgtacctttggttctattaccaataagaagattgcagaagaattgcaaaagcaatttggaattaagattgataaacgtcatattcaagtacaagctccgattcgagcggttggtttgattgatgtgccagtgaaaatctatcaagatatcacaagtgtaatcaatcttcgtgtgaaagaaggataa

SEQ ID NO: 38048 - DNA, 1974 bp, Streptococcus pneumoniae
atgaaaaaattttatgtaagtccaatttttcctattctagtaggattgattgcgtttggagtcttatccactttcattatttttgttaataataatctgttgacggttttaattttgtttctttttgtaggaggctatgtttttttatttaagaaactgagagtgcattatacaaggagtgatgtagaacagatacagtatgtaaaccaccaagcggaagaaagtttgacagctctattggaacagatgcctgtaggtgttatgaaattgaatttatcttctggagaggttgagtggtttaatccctatgctgaattgattttgaccaaggaagatggtgattttgatttagaagctgttcaaacgattatcaaggcttcagtaggaaatccgtctacttatgccaagcttggtgagaagcgttatgctgttcatatggatgcttcttccggtgttttgtattttgtagatgtatccagggaacaagccataacagatgaattggtaacaagtcgaccagtgattgggattgtctctgtggataattatgatgatttggaggatgcaacttctgagtcagatattagtcaaatcaatagttttgtagctaattttatatcagagttttcagaaaaatacatgatgttttctcgtcgggtaagtatggatcgattttatctatttactgactacacggtgcttgagggcttgatgaatgataaattttctgttattgatgctttcagagaagagtcgaaacagagacagttgcccttgactttaagtatgggattttcttatggcgatggaaatcatgatgagatagggaaagttgctttgctcaatttgaacttggctgaagtacgtggtggcgaccaggtggttgttaaggaaaacgacgaaacgaaaaatccagtttattttggtggtgggtctgctgcttcaatcaagcgtacacggactcgtacgcgcgctatgatgacagctatttcagataagattcggagtgtagatcaggtttttgtagtcggtcacaaaaatttagacatggatgctttgggctctgctgtaggtatgcagttgttcgccagcaatgtgattgaaaatagctatgctctttatgatgaagaacaaatgtctccagatattgaacgagctgtttcattcatagaaaaagaaggagttacgaagttgttgtctgttaaggatgcaatggggatggtgaccaatcgttctttgttgattcttgtagaccattcaaagacagccttaacattatcaaaagaattttatgatttatttacccaaaccattgttattgaccaccatagaagggatcaggattttccagataatgcagtcattacttatatcgaaagtggtgcaagtagtgccagtgagttggtaacggaattgattcagttccagaattctaagaaaaatcgtttgagtcgtatgcaagcaagtgttttgatggctggtatgatgttggatactaaaaatttcacctcgcgagtaactagtcggacatttgatgttgctagctatctcagaacgcgcggaagtgatagtattgctatccaggaaattgctgcgacagattttgaagaatatcgtgaggttaatgaacttattttacaggggtgtaaattaggttcagatgtactaatagcagaggctaaggacacgaaatgctatgatacagttgttattagtaaggcagcagatgccatgttagccatgtcaggtattgaagcgagttttgttcttgcgaagaatacacaaggatttatctctatctcagctcgaagtcgtagtaaactgaatgtacaacggattatggaagagttaggcggtggaggccactttaatttggcagcagctcaaattaaagatgtaaccttgtcagaagcaggtgaaaaactgacagaaattgtattaaatgaaataaaggaaaaggagaaagaagaatga

SEQ ID NO: 38049 - DNA, 921 bp, Streptococcus pneumoniae
atgtctatttataacaacattactgaattaatcggtcaaacaccgattgttaaacttaacaacatcgtgccagaaggtgctgcagacgtctatataaagcttgaagcatttaatcctggttcatctgtaaaagaccgtattgcccttagcatgattgaaaaagctgaacaagatggtattctgaaacttggttctactattgttgaagcaacaagtggaaacaccggtattggactttcatgggtaggtgctgctaaagggtataaagtcgtcatcgttatgcctgaaactatgagtgtagaacgacgtaaaattatccaagcttatggtgctgaactcgtcctaactcctggtagcgagggaatgaaaggtgctattgctaaggctcaagaaatcgctgctgaacgtgatggtttccttcctcttcaatttgacaatccagctaatccagaagtacacgaaagaacaacaggagctgagatactagctgctttcggtaaagatggattagatgcctttgttgctggagtaggtactggtggaacgatttctggtgtttctcatgcactcaaatcagaaaattctaacattcaagtttttgcagtagaagcagatgaatctgctattctatctggtgaaaaacctggtcctcacaaaattcaaggtatctcagctggatttattcctgatacacttgatactaaagcctatgatggtatcgttcgtgtaacatcagatgacgctcttgcactcggacgtgaaattggtggaaaagaaggcttccttgtagggatttcctcagctgcagctatctacggagccatcgaggttgccaaaaaattaggtacaggtaaaaaagtccttgccctagcaccagataacggtgaacgttatctctctacagcactttatgaattgtaa

SEQ ID NO: 38050 - DNA, 1041 bp, Streptococcus pneumoniae
atggcagaaattacagctaaacttgtaaaagagttgcgtgaaaaatctggtgccggtgttatggacgctaaaaaagcgcttgtagaaacagacggtgacatcgaaaaagcgattgaattgcttcgtgaaaaaggtatggctaaggcagctaagaaagctgaccgtgttgctgcagaaggtttgactggtgtttatgttaacggtaatgttgcagcagttattgaagtaaacgctgaaactgacttcgttgcaaaaaacgctcaattcgttgaattggtaaatactacagctaaagtcattgctgaaggaaaacctgctaataatgaagaagctcttgctttgataatgccttcaggtgaaactcttgaagctgcatacgtatctgcaacagcaactatcggagagaaaatctcattccgtcgctttgcattgattgaaaaaacagacgcacaacactttggagcataccaacataacggtggacgtatcggtgttatttcagttgttgaaggtggagacgaagcacttgctaaacaattgtcaatgcacatcgcagcgatgaaaccaacagttctttcttacaaagaattggatgagcaattcgttaaagatgagttggcacaattgaatcacgttatcgaccaagacaacgaaagccgtgcaatggttaataaaccagctcttccacacttgaagtatggatcaaaagctcaattaactgatgatgttattgctcaagctgaagctgacatcaaagctgaattggctgcagaaggcaaaccagaaaaaatctgggacaaaattatcccaggtaaaatggaccgcttcatgcttgataatactaaagttgaccaagcttacacacttcttgcacaagtttacatcatggatgacagcaagacagttgaagcataccttgaatcagttaacgcttcggtagttgagtttgctcgctttgaagttggtgaaggtatcgagaaagctgcaaacgacttcgaagctgaagttgcagctacaatggcagcagccttgaataactaa

SEQ ID NO: 38051 - DNA, 780 bp, Streptococcus pneumoniae
atggcagtaatttcaatgaaacaacttcttgaggctggtgtacactttggtcaccaaactcgtcgctggaatcctaagatggctaagtacatctttactgaacgtaacggaatccacgttatcgacttgcaacaaactgtaaaatacgctgaccaagcatacgacttcatgcgtgatgcagcagctaacgatgcagttgtattgttcgttggtactaagaaacaagcagctgatgcagttgctgaagaagcagtacgttcaggtcaatacttcatcaaccaccgttggttgggtggaactcttacaaactggggaacaatccaaaaacgtatcgctcgtttgaaagaaattaaacgtatggaagaagatggaactttcgaagttcttcctaagaaagaagttgcacttcttaacaaacaacgtgcgcgtcttgaaaaattcttgggtggtatcgaagatatgcctcgtatcccagatgtgatgtacgtagttgacccacataaagagcaaatcgctgttaaagaagctaaaaaattgggaatcccagttgtagcgatggttgacaccaatactgatccagatgatatcgatgtaatcatcccagctaacgatgacgctatccgtgctgttaaattgatcacagctaaattggctgacgctattatcgaaggacgtcaaggtgaggatgcagtagcagttgaagcagaatttgcagcttcagaaactcaagcagattcaattgaagaaatcgttgaagttgtagaaggtgacaacaaatag

SEQ ID NO: 38052 - DNA, 495 bp, Streptococcus pneumoniae
atgagacagttgaagcgagttggagtatttttattgcttcctttctttgttctaattgacgcccatattagccagcttctgggctcatttttcccccatgtacatttggctagtcattttctttttctatttctcttatttgagacgatagaagtatcagagtatctctacctagtctattgttttgttataggcttggtttatgatgtttactttttccatctaatagggattacaactctcttatttatcttattgggagccttccttcataaattgaatagtgttattttgttgaatcgttggacaagaatgctagctatgattgtgctgacattcctgtttgaaatgggtagttatcttttggcttttatggtagggttgacagtagatagcatgtcgatttttatagtctatagcttggtaccgacgatgattttaaattttttatggattactgtttttcaatttatttttgaaaaatattatctataa

SEQ ID NO: 38053 - DNA, 795 bp, Streptococcus pneumoniae
atggatagtatgattttggggcgttatatcccaggggattcgattgttcaccgattggatccacgtagcaaattgcttgctatgatgctactgattttgattgtgttttgggctaataaccccttgacgaatctgattctttttatagcgacagggatatttattgccttgtcaggagtatctctttcattttttattcagggcttgaagtctatgtttttcttgattgccttcacaactatttttcaactatttttcatttctaatgggaatgttttatttgagttttcgtttgtgagaatcacggattatgctttgcaacaagctgggattattttttgtcgctttgtattgattattttcttttcaactttgttaaccttaacaaccatgcctttaagtttggcatcagctgtcgaagctttattagcacctttaaagcgtgtgaaagttccagttcatgaaattggattgatgctgtctatgagtttgcgttttgtcccaaccttgatggatgatacgactcggattatgaatgcacagaaagctcgtggagtggattttggagaaggaagcatcgttcaaaaagtaaaggcgatgattcccattttgattcctctttttgcgacaagtttaaaacgtgcagattccttggctatcgctatggaagcgcgtggctatcagggtggaaaaggcagaagtcaataccgacaattgaaatggactctaaaggatacgctgaccattcttgttattctcgtacttggttgttgtttatttttcttaaaatcttag

SEQ ID NO: 38054 - DNA, 840 bp, Streptococcus pneumoniae
atgggaattgctctagaaaatgtgaattttatatatcaagaaggtactcccttagcttcagcagctttgtcggatgtttctttgacgattgaagatggctcttatacagctttaattgggcacacaggtagtggtaaatcaactattttacaactcttaaatggtttattggtgccaagtcaagggagtgtgagggtttttgataccttaatcacctcgacttctaaaaataaagatattcgtcaaattagaaaacaggttggcttggtatttcagtttgctgaaaatcagatttttgaagaaacggttttgaaggacgttgcttttggaccgcaaaattttggagtttctgaagaagatgctgtgaagactgcgcgtgagaaactggctctggttggaattgatgaatcactttttgatcgtagtccgtttgagctgtcagggggacaaatgagacgtgttgccattgcaggcatacttgccatggagccatctatattagtcttagatgagccaacagctggtctagatcctctagggagaaaagagttgatgaccctgttcaaaaaactccaccagtcagggatgaccatcgtcttggtaacgcatttgatggatgatgttgctgaatatgctaatcaagtctatgtaatggaaaagggacgtttagtaaaggggggcaaaccaagtgatgtctttcaagacgttgtttttatggaagaagttcagttgggagtacctaaaattacggccttttgtaaacgattggctgatagaggcgtgtcatttaaacgattaccgattaagatagaggagttcaaggagtcgctaaatggatag

SEQ ID NO: 38055 - DNA, 828 bp, Streptococcus pneumoniae
atgaaatcaataattgatgtaaaaaatctttcttttcgctataaagaaaatcagaactactacgatgtgaaggatattacgtttcacgtgaaacgtggagaatggctttcgattgtagggcataatggtagtggtaaatcaacgacggttcgattaattgatggcttactggaagcagaatccggagagattgtaattgatggccaacgtttgactgaggaaaatgtttggaatatacgtcgtcaaatcggtatggtttttcaaaatccagacaatcaatttgttggagcgactgttgaagatgatgttgcttttggtttggaaaatcagggactttctcgtcaagaaatgaaaaagagagtggaagaagctctggctttagttggcatgttggactttaaaaagagagagccagcgcgtctatcaggtggccaaaagcaacgtgtggccattgcaggtgttgtagccctaagaccagctattttaatcttagatgaagcaacgagtatgttggatcctgaggggcgtagagaacttattgggacagtaaaaggaattcgaaaagactatgatatgacggtcatttctattacccatgatttggaagaagtcgccatgagtgatcgcgtattggtcatgaaaaaaggggaaattgaatcaactagtagtccaagggagcttttctctcgaaatgatttagatcaaattggattagacgatccttttgctaatcaattaaaaaaatctttgagccagaatggctatgatttacctgaaaattatttgacagaaagtgagctagaggataagctatgggaattgctctag

SEQ ID NO: 38056 - DNA, 546 bp, Streptococcus pneumoniae
atgaaaaaagaacaaattcccaatctcttaacaataggtcgaattctctttatacctatttttatctttattttaacgataggaaattcgatagagagtcatatagttgcagctattatctttgctgttgccagtattaccgactatttagatggatatttagctcgtaaatggaatgtggtcagtaattttggtaaatttgcagatcctatggcggataagttactagttatgtcggcttttattatgttgattgagttaggtatggctccggcttggattgttgcagtgattatctgtcgtgagttagctgtgacaggtttaaggcttttattggttgaaactggtggaacaattttagcagcagcaatgcctggaaaaattaaaacttttagtcagatgtttgctattattttcttgctattacattggactttgcttggtcaagttctactttatgtagccttatttttcactatctactctggctatgactatttcaagggtagtgcctatgtatttaaagggacatttggttcgaaatga

SEQ ID NO: 38057 - DNA, 831 bp, Streptococcus pneumoniae
atgacaagtatgagaaaaaaaacaattggagaggttttacgattagctagaatcaatcagggattgagtttagatgaattgcagaaaaagacagaaatccagttagatatgttggaagcaatggaagcagacgatttcgatcaacttccaagtcctttttacacgcgttctttcttgaaaaaatatgcatgggctgttgagttagatgaccaaattgttttggatgcttatgattctgggagtatgattacttatgaggaagtagatgttgatgaagatgagttgacaggtcgtagacgttcaagtaagaaaaagaagaaaaaaacatcatttttacctttattttattttatcctttttgctttatcgattttaatttttgtgacttattatgtttggaactatattcaaactcaaccagaggagccttctctttctaattacagtgtggttcaatcaacaagttcaactagctctgttccccactcctcaagtagtagttcttctagtatagaatcagctataagtgtatcaggcgaaggaaatcatgtagaaatcgcttataagacaagtaaggaaacagttaaattgcaattggcagtttcagatgttacaagttgggtcagtgtttcagaaagcgaacttgagggcggtgtaaccttatcgccaaagaagaaaagtgcagaagcaacagttgcaactaaaagtcctgtaacaattacgttaggtgttgtaaaaggtgttgatttgacagtagataatcagactgttgatttatcgaaattaacagctcagactggacaaatcactgtaacctttactaaaaattaa

SEQ ID NO: 38058 - DNA, 1284 bp, Streptococcus pneumoniae
atgacaaaggttgtttttgaagaaaaatactatccagctgtaaaagaaaaggtttatcgaactcgtttggccaacggattgacagttgctcttttgcctaaaaaggaatttaaagaggtttacgggagtgtcactgtacagtttggttcggtagatacgtttgtcacagaagttgacggatatgtaaaacaatatcctggaggaattgctcattttcttgaacataaattatttgagagagaagattctagtgatttgatgtcggcttttacgagtctaggtgcagatagtaatgcctttacaagctttacaaaaacaaactatcttttttcagcaacggattattttttagaaaatttagatttacttgatgaattggtaacatcagcacactttactgaagcttccattctgacagagcaggatattattcagcaagaacgagaaatgtaccaagatgatccagattcgtgtttattcttttcaactttagcgaatttgtatcctggtacacctttagcaactgatatagttggaagtgaggagtccatttcccaaatcaatctaactaatttgcaagaaaattttacaaagttttacaaacctgtaaacatgtctctgtttttagttggtaattttgatgtggagcgagtacaggactattttgaaagcaaagaactgaaagattcagattttcaggaagtagcaagagaaaagttgtttttacagcctgtaaagccaacagatagtatgagaatggaagtatcttctcccaaactagcgattggagttagaggtaagcgagaagtttctgaagcggattgctatcgacatcatattttattaaaattattgtttgcaatgatgtttggttggacttcggatcgttttcaaaaatgttatgaatcaggtaaaattgatgcgtccttatctctggaagttgaaataacaagtcgctttcattttgtcatgttgacaatagatacgaaagagccagttgctttgtctcatcaatttaggaaggctattcgtaattttacaaaggatttagatattacagaggaacatttagatattatcaaaagagagatgtttggcgaatttttcagtagcatgaactctcttgaatttattgcaacgcaatatgatgcttttgaaaatggtgagacaatttttgatttgccgaaaattttacaggaaattactttagaggatgtccttgatgctggacatcatttaatagatgatggtgacatagttgattttacaatattcccatcgtag

SEQ ID NO: 38059 - DNA, 1026 bp, Streptococcus pneumoniae
atgactaaacccattattttaacaggagaccgtccaacaggaaaattgcatattggacattatgttggaagtctcaaaaatcgagtattattacaggaagaggataagtatgatatgtttgtgttcttggctgaccaacaagccttgacagatcatgccaaagatcctcaaaccattgtagagtctatcggaaatgtggctttggattatcttgcagttggattggatccaaataagtcaactatttttattcaaagccagattccagagttggctgagttgtctatgtattatatgaatctagtttcgttagcacgtttggagcgaaatccaacagtcaagacagagatttctcagaaaggatttggagaaagcattccgacaggattcttggtctatccaatcgctcaagcagctgatatcacagctttcaaggctaattatgttcctgttgggacagatcagaaaccaatgattgagcaaactcgtgaaattgttcgttcttttaacaatgcatataactgtgatgtcttggtagagccggaaggtatttatccagaaaatgagagagcagggcgtttgcctggtttagatggaaatgctaaaatgtctaaatcactaaataatggtatttatttagctgatgatgcggatactttgcgtaaaaaagtaatgagtatgtatacagatccagatcatatccgcgttgaggatccaggtaagattgagggaaatatggttttccattatctagatgtttttggtcgtccagaagatgctcaagaaattgctgatatgaaagaacgttatcaacgaggtggtcttggtgatgtgaagaccaagcgttatctacttgaaatattagaacgtgaactgggtcctattcgtgagcgccgtattgaatttgctaaggatatgggagaagtttataatatgattcaaaaaggtagtgaaagagcgcgtgaagttgcgggtcaaaccctatctgaggtaaaaggggcaatgggacttcattactttaactaa

SEQ ID NO: 38060 - DNA, 1623 bp, Streptococcus pneumoniae
ttgcttacagtatctgatgtttcactacgttttagtgatcgcaaactttttgatgatgtcaatatcaaatttacagaaggaaatacttacggattaatcggtgctaatggtgccggaaaatcaacctttttaaaaattttagctggagatatcgaacctactactggtcacatctctcttggtccagatgaacgtctctctgttcttcgtcaaaatcactttgactacgaagatgaacgtgccattgatgtcgttatcatgggaaatgaaaaactttatagcatcatgaaagagaaagatgctatctacatgaaggaagatttctcagacgaggacggggttcgtgctgccgaactcgaaggagagtttgccgaacttggaggttgggaagcagagagtgaagcctctcaactacttcaaaacctaaacattccagaagaattacactaccaaaacatgagcgaattggccaacggtgaaaaagtaaaggttctcctcgccaaagcactttttggtaaaccagatgttcttctcttggacgagcctactaacggtttggatatccaatcgattacttggttagaagacttcttgattgactttgataacacagttatcgtagtatcccacgaccgtcacttcttaaacaaagtttgtactcacatggccgaccttgactttggaaaaatcaaactctatgtcggaaactacgacttctggaaggaatcttctgagcttgctgctaaattgctagcagaccgtaatgctaaagcagaagaaaaaattaaacaattgcaagaattcgttgctcgtttctctgccaatgcttctaagtcaaggcaggcaacatcacgtaagaaaatgcttgataagattgagctagaagagattgtaccatctagtcgtaaatatccatttatcaactttaaagcggaacgtgagattggtaatgatctcttgacagtagaaaatctaactgtaaagattgatggtgaaactatcttggataatattagtttcatcttgcgtccagatgataagacagcacttattggacaaaatgatattcaaacgactgcattaattcgtgcaatcatgggagatattgactatgaaggaactgtcaagtggggagttacaactagtcaatcttacctaccaaaagataactcagctgattttgcaggaggagaatcaattcttgactggttgcgtcaattcgcaagtaaagaagaagatgacaatactttcctacgtggcttcctcggccgtatgctcttctctggagatgaagttaacaaacctgtaaatgtcttgtcagggggagaaaaagttcgtgtcatgctttcaaaactcatgctcttaaaatcaaatgtccttgtacttgatgatccaacaaatcacttggacttggaatctatctcaagcttgaatgatggattgaaaaactttaaagaatcaatcatctttgctagccatgaccacgaatttattcaaactttggctaaccatatcattgtcttatctaaaaatggcgtcattgaccgtatcgatgaaacctacgatgaattcctagaaaatgcagaagtacaagcaaaagttaaagaactttggaaagactaa

SEQ ID NO: 38061 - DNA, 768 bp, Streptococcus pneumoniae
atgatcgggatttctcttattccagatctgtacaatatcatatttttgtcatcaatgtgggatccatatgggcaattgtctgacttacctgtggcagttgtaaataatgataaagaggcttcctataatggtaatactatggcaataggaaaagacatggtgtccaatttaaaagaaaataaaaccttggattttcattttgtagatgaagaggaaggaaagaagggattggaagatggcgattactatatggtagtgactttaccaagtgatttatctgaaaaaacaactacattatccaatattcaatcgacagcagcttatcaatcattgacaagtgagcaacaaactgagataagtgattctgtatctcaaaattcaactgatagtattcaatcggctcagtcaattgtagctttagtacaagatttacagggaagtttagaaaacttacaaaatcaatcttctaatctttcgactttaaaaaatcaatctaatcaagtatcacctattacttctacttctttgataggattgtcaagtggattaacagagatacaaggagatgttactagcaaattagttcctgccagtcagtcgattgcatcaggtgtaaacgcatatactacaggtgttgataaagtttctcagggcgcaagtcaactaagtgaaaaaaatgccaccttgacaggtagtttggataaactagtttcaggctcaaacaccttgacacaaaaatcttctagattgacagcaggagttggttaa

SEQ ID NO: 38062 - DNA, 543 bp, Streptococcus pneumoniae
atgcaagaaagtaacaaacgcttaaaaacaaagcgaactattgaaaatgctatggtacaattactgatggaacagccatttgataaaatttctactgtcaaattagtagaaaaagccggaattagtcgttccagcttctatactcactataaggataagtatgatatgattgagcactatcaaagcaagctattccatacatttgaatatatttttcaaaaacatgctcatcacaaaagagacgctattttagaagtttttgaatatctagagtcagaaccacttctggctgcccttctttctgaaaatgggactaaagaaatccaaaatttcttacgaaataaacttcatatcatgcttagtacagatttacaaaagcgatttatgcaactgaatctaaataccaccgaattagaatatagtagcatctatctaactcatgcactttttggtgtctgccaaacttggattgcacatggaaaaaaagaaagttctcaagaaataacagacttccttatgaaaatgcttggtgatacaaattga

SEQ ID NO: 38063 - DNA, 480 bp, Streptococcus pneumoniae
atgaaaattaaagttgtaacagttgggaaactgaaagaaaagtatttaaaagatggtatcgcagagtattcaaaacgaatttctagatttgctaagtttgaaatgattgagttatcagatgaaaaaacaccagataaggccagtgaatcagaaaatcaaaagattttagaaatagaaggtcagagaattttatcaaaaattgctgaccgtgatttcgttattgtgttagccattgaagggaaaactttcttctcagaagaatttagtaagcagttagaagaaacttctataaaaggattttctactcttacttttattattgggggaagtttaggattgtcatcatctgtaaaaaatagagccaatctttctgtcagttttggtcgcctaaccttaccccatcagttaatgagactagttcttgttgaacaaatctatcgcgcttttacgattcagcagggattcccctaccataaatag

SEQ ID NO: 38064 - DNA, 1194 bp, Streptococcus pneumoniae
atggaggcaaatatgaaacatctaaaaacattttacaaaaaatggtttcaattattagtcgttatcgtcattagcttttttagtggagccttgggtagtttttcaataactcaactaactcaaaaaagtagtgtaaacaactctaacaacaatagtactattacacaaactgcctataagaacgaaaattcaacaacacaggctgttaacaaagtaaaagatgctgttgtttctgttattacttattcggcaaacagacaaaatagcgtatttggcaatgatgatactgacacagattctcagcgaatctctagtgaaggatctggagttatttataaaaagaatgataaagaagcttacatcgtcaccaacaatcacgttataaatggcgccagcaaagtagatattcgattgtcagatgggactaaagtacctggagaaattgtcggagctgacactttctctgatattgctgtcgtcaaaatctcttcagaaaaagtgacaacagtagctgagtttggtgattctagtaagttaactgtaggagaaactgctattgccatcggtagcccgttaggttctgaatatgcaaatactgtcactcaaggtatcgtatccagtctcaatagaaatgtatccttaaaatcggaagatggacaagctatttctacaaaagccatccaaactgatactgctattaacccaggtaactctggcggcccactgatcaatattcaagggcaggttatcggaattacctcaagtaaaattgctacaaatggaggaacatctgtagaaggtcttggtttcgcaattcctgcaaatgatgctatcaatattattgaacagttagaaaaaaacggaaaagtgacgcgtccagctttgggaatccagatggttaatttatctaatgtgagtacaagcgacatcagaagactcaatattccaagtaatgttacatctggtgtaattgttcgttcggtacaaagtaatatgcctgccaatggtcaccttgaaaaatacgatgtaattacaaaagtagatgacaaagagattgcttcatcaacagacttacaaagtgctctttacaaccattctatcggagacaccattaagataacctactatcgtaacgggaaagaagaaactacctctatcaaacttaacaagagttcaggtgatttagaatcttaa

SEQ ID NO: 38065 - DNA, 564 bp, Streptococcus pyogenes
ttaatgaaaaaatttcatcgttttttggtctcaggagtaatccttttaggttttaatggtctagtacctactatgccatctacacttatttcgcaacaggaaaatcttgttcatgcagctgttttagtgcaacatcctttatttgaagttgtttttgcattttacaatggctcgccggagcgtgttaaggaattagaagggcaactcgaggaattgatcgctagcgagcaggatttgcatctggttcaatcaccagcccaaatagaagggcttggggaaaaccagatcatcgatgaagagtccgtacaagatgcaccggactatcgctttgtagttaagaatttttcaaatgaaaatgacattattcaagagttggaaaaaacacgcttgatcgtagatttaagcgaggaacccaacctctatacgcagattgcagggatctctgctgggattccacaggtcaaccgcgtccagacagaatatgtcgatcatttgaaaaatggttatgtcttatcaaagggagacaaggaatttagaaaggcgattactcactttttattggaa

SEQ ID NO: 38066 - DNA, 699 bp, Streptococcus pyogenes
gtgctagctcacgttacaactcagattgaagcaatgaaccaaggagctccaactggattggtattccagtctatcgcaggttctgaaaaagggaatgcggcattcggttttgatgcaaaagttcttcaggaagctaaagatacagctcataaagttggtactgcagctggtccaaatgtgatgtactttgaaactggtcaaggttctgagttgtcatcagatgctcaccatggtgctgaccaagtaacgatggaagcacgttgttatggttttgcgaaacgttttgatccattcttggttaacacagtagttggattcatcggtccggaatatttgtatgattcaaaacaagttattcgtgctggtttggaagatcacttcatgggcaaactgaccggtatttccatgggttgtgacatttgttacacgaaccacatgaaagccgatcaaaatgacgctgaaaatctattggttcttcttggagcagctaatgttaactacatcatggcaattcctcatggtgatgatatcatgttgaactatcaaactactggttatcatgaaactgctacgatgcgtgatctcttgaacaaacgtccaatcaaagaatttgaagagtggatggaaaaaatgggattgatgaaggatggacatcttactgaaatcggtggagatggatctatctttatgaaacaaaat

SEQ ID NO: 38067 - DNA, 926 bp, Streptococcus pyogenes
atcacctctgcgattgctggccttgcttatgccggcattcccatgacttttagaaatatcgcaactagctttcatgtcttcactgggcatttacaagatgccagtgaagcactaaactgggacgctatttcccatctaaagggtaccctagtctttttaatggggatgaaaaacttacagactatctgtgaagaattgatggtacgtggctatgataaggatactcctgtcgctattattgaatgggccacccaccctcaacaacgttcgatcgatggtaagttagaaaacattgttgggctggttgaacaacatcaaatgaaagcgccgagtttaattgtgattggtgacgtcgttgctttccgtgaggaattaaactaccatgaaaaacttcctttatttggtcgtactattttggttcaagaaacgccaaatgctaaacttcccaaactgttgaaggatgctggggcgacagtttacgcttttcagtctccaagtaaattgcttgcaaaagaattgtcactacctgaactctctagcattgatggggtattgatcactgatcctagctcttggaaattctttgttgcttatttgcaagataaagacctagatattcgtagtctcagtcatttaaagattgtcgctagtggtcatcacacgattaaggccatcaaagaatcaggtattcgtttgtatgatcagatcaacgattttgcagaagaaaattttgtgaaacgaatggctgatcaagaaggatactggatcatcctcacttcagatattaaggaaaaagcagtagctgaagttttgaacttcccgatctactcaactcattcagtagattttgaaagtgaatcgtttgcctatcattcagaagatattcagcttgtttgtttaccaaattctgctgcggcctaccactt

SEQ ID NO: 38068 - DNA, 387 bp, Streptococcus pyogenes
ttggtcggaaaacctattgtcaacctgggggatgtcgctgccaacctgaaatttaaacgtccagatgagtttggaacatccctagatatgatgcagttgatcattggtcaagtgtcgcaagaagggatcggtcagctcaatcaacgcttctgggaacggtttgaccaggcagatttcaaggatacgattttagcccttgcttatatgagggatgatgactacgaccagcaagcttatccagatattttagaggccttgtatgaattgccggttcgtattatcagtactagccgcgccggtcgacacaatgatgcgagtggtccaatcattgagtggtttgtgacccagtacaaagaaatcatggaaagagactttggaagaaaccaa

SEQ ID NO: 38069 - DNA, 528 bp, Streptococcus pyogenes
atggcatataaacaaccagataaaaacggattttacgggcggttcgggggacgatttgtccctgaaaccttgatgacagcagttttagaattagaaaaagcctacagagaaagtcaagcagatccttcttttcaagcagaattggatcagcttctgaaacaatatgtcggtcgggaaacaccgctctattatgctaaaaatcttaccaagtatgtcggtggagccaagatctttcttaaaagagaagacctcaaccacacaggggctcataaaattaataatgccctaggacaagttttattggcacatcggatgggcaaaaagaagatcatcgcagaaacaggggccggacagcacggtgttgcaacggcaacggctgctgctttatttgatatggaatgcaccatctacatgggggaagaagatgtcaaacgccaagccctcaatgtctttcggatggagttgttgggggcaaaggttcatcagtaacagatggatcgcgtgttctcaaggatgcagtcaatgctg

SEQ ID NO: 38070 - DNA, 596 bp, Streptococcus pyogenes
cctttcggtaaacgctttggccgcacagccaattctgctgaattaaaagaaaactatgctgataaaacaaaagaagaattacatgagttaaacgaaacagctattgttgctggccgcttgatgacaaaacgtggcaaaggtaaggttggttttgctcatcttcaagaccgtgaaggccaaatccaactttatgttcgcaaggactctgttggcgaagacaactatgaaatcttcaaaaaagccgatttaggcgactttatcggcgttgaaggcgaagtcatgcgtacagacatgggcgagttgtcaatcaaggcaaccaagttgactcacctttctaaatcacttcgtcctcttcctgaaaaattccacggattaactgatattgaaaccatttaccgtaagcgtcaccttgatttaatttcaaatcgtgaaagctttgaccgcttcgtgacccgttccaaaatgatttcagaaatccgtcgttatttagacggtcttgatttcctagaagtagaaacgcctgtgcttcataacgaggctggtggtgctgctgctcgtcctttcgttactgcacataatgctcaaaacattgatat

SEQ ID NO: 38071 - DNA, 219 bp, Streptococcus pyogenes
atgtcaggatttttagagcaacgattaggtcactgcctaaggcagatggtagagaaggggctagaggctcttctggtcacccatttaaccaatagttattacttgacaggtttttctggaactgcagcaactgttttgataacggccaaacgtcgtgttttgatcacagattcacgttataccttgcttgctaaagctagtgttgagggatttgatatt

SEQ ID NO: 38072 - DNA, 1062 bp, Streptococcus pyogenes
atggaaacaattttagaagtcaaacatctcagtaaaatttttggcaaaaaacaaaaagcagctcttgagatggtaaagactggcaaaaataagagtgagatttttaagaaaacaggcgctactgtaggtgtctatgacgctagttttgaggtcaaaaaaggtgaaatctttgttattatggggctatcaggaagtgggaaatcaacccttgtccgcatgctaaatcgtttgattgaaccttcagcaggatctatcttgctggaaggtaaagacatctcaaccatgtcagcagatcagctgcgtgaggtgcgccgccatgacattaacatggttttccaaagctttgccctctttcctcataaaaccattttggaaaataccgaatttggtttggaattacgtggcgttcccaaagaagaacgccagcgattggcagaaaaagcccttgataattcaggcctattagattttaaagaccagtacccaaaccaactatctggtgggatgcagcagcgtgttggcctagcccgtgcgctagctaatagccctaaaattctcttaatggacgaggcattctcagcgcttgatcctttgattcgtcgtgagatgcaagatgaattacttgatttgcaagacagcatgaaacaaaccatcatctttatcagtcatgacttgaatgaagctttgcgtattggtgatcggattgctttgatgaaagacggacaaattatgcaaattggtactggtgaggaaatcttgactaacccagccaatgactttgtgcgtgaattcgttgaggatgtggaccgttctaaagtcttgacagcacaaaatatcatgatcaaaccgttaacaactactgttgaattagatggacctcaagttgccttgaaccgtatgcacaacgaagaggtgtctatgttgatggcgacgaatcgccgccgccaattagtcggtagtttgacggccgatgccgctatagaggcgcgcaaaaaagggttaccgctatcagaagtgattgatcgcgatgtgaagactgtctcaaaagatactattattaca

SEQ ID NO: 38073 - DNA, 632 bp, Streptococcus pyogenes
tacgctgaaaaatatgccgtaaacgaaaaagtctacaacgttctttcacagccaatgcttacgggatctactacaacaaagataaattcgaagagttgggcttgaaggttcctgaaacttgggacgaatttgaacagttagtaaaagacatcgttgccaaaggacaaactccatttgggattgcaggagcagatgcttggaccctcaatggttacaatcaattggcctttgcgacagcagcaggtggaggaaaagaagccaaccaataccttcgttattctaagccaaattccattaaattgtctgatccgattatgaaagatgacatcagggtcatggatatccttcgcattaaaggttcgaagcaaaagaactgggaaggtgcaggttatacagacgttatcggagccttcgcgcgtggggatgtcctcatgacaccaaatggatcttgggctatcaccgcgatcaatgaacaaaaaccgaaatttaagattgggaccttcatgattccaggaaaagaaaaaggacaaagcttaaccgttggtgcgggagacttagcatggtctatctccgctactaccaaacatccaaaagaagccaatgcctttgtggaatacatgaccaatccgttt

SEQ ID NO: 38074 - DNA, 2310 bp, Streptococcus pyogenes
gtggagaaaaagcaacgtttttcccttagaaaatacaaatcaggaacgttttcggtcttaataggaagcgttttcttgatgatgatgacaacaacagtagcagcagatgagctaaccacaacgagtgaaccaacaatcacgaatcacactcaacaacaagcgcaacatctcaccaatacagagttgagctcagctgaatcaaaacctcaagacacatcacaaatcactctcaagacaaatcgtgaaaaagagcaaccacaaggtctagtctctgagccaaccacaactgagctagctgacacagatgcagcaccaatggctaatacaggtcctgatgcgactcaaaaaagcgcttctttaccgccagtcaatacagatgttcacgattgggtaaaaaccaaaggagcttgggacaagggatacaaaggacaaggcaaggttgtcgcagttattgacacagggatcgatccggcccatcaaagcatgcgcatcagtgatgtatcaactgctaaagtaaaatcaaaagaagacatgctagcacgccaaaaagccgccggtattaattatgggagttggataaatgataaagttgtttttgcacataattatgtggaaaatagcgataatatcaaagaaaatcaattcgaggattttgatgaggactgggaaaactttgagtttgatgcagaggcagagccaaaagccatcaaaaaacacaagatctatcgtccccaatcaacccaggcaccgaaagaaactgttatcaaaacagaagaaacagatggttcacatgatattgactggacacaaacagacgatgacaccaaatacgagtcacacggtatgcatgtgacaggtattgtagccggtaatagcaaagaagccgctgctactggagaacgctttttaggaattgcaccagaggcccaagtcatgttcatgcgtgtttttgccaacgacgtcatgggatcagctgaatcactctttatcaaagctatcgaagatgccgtggctttaggagcagatgtgatcaacctgagtcttggaaccgctaatggggcacagcttagtggcagcaagcctctaatggaagcaattgaaaaagctaaaaaagccggtgtatcagttgttgtagcagcaggaaatgagcgcgtctatggatctgaccatgatgatccattggcaacaaatccagactatggtttggtcggttctccctcaacaggtcgaacaccaacatcagtggcagctataaacagtaagtgggtgattcaacgtctaatgacggtcaaagaattagaaaaccgtgccgatttaaaccatggtaaagccatctattcagagtctgtcgactttaaaaacataaaagatagcctaggttatgataaatcgcatcaatttgcttatgtcaaagagtcaactgatgcgggttataacgcacaagacgttaaaggtaaaattgctttaattgaacgtgatcccaataaaacctatgacgaaatgattgctttggctaagaaacatggagccctgggagtacttatttttaataacaagcctggtcaatcaaaccgctcaatgcgtctaacagctaatgggatggggataccatctgctttcatatcgcacgaatttggtaaggtcatgtcccaattaaatggcaatggtacaggaagtttagagtttgacagtgtggtctcaaaagcaccgagtcaaaaaggcaatgaaatgaatcatttttcaaattggggcctaacttctgatggctatttaaaacctgacattactgcaccaggtggcgatatctactctacctataacgataaccactatggtagccaaacaggaacaagtatggcctctcctcagattgctggcgccagccttttggtcaaacaatacctagaaaagactcagccaaacttgccaaaagaaaaaattgctgatatcgttaagaacctattgatgagcaatgctcaaattcatgttaatccagagacaaaaacgaccacctcaccgcgtcagcaaggggcaggattacttaatattgacggagctgtcactagcggcctttatgtgacaggaaaagacaactatggcagtatatcattaggcaacatcacagatacgatgacgtttgatgtgactgttcacaacctaagcaataaagccaaaacattacgttatgacacagaattgctaacagatcatgtagacccacaaaagggccgcttcaccttgacttctcgctccttaaaaacgtaccaaggaggagaagttacagtcccagctaatggaaaagtgactgta

SEQ ID NO: 38075 - DNA, 1595 bp, Streptococcus pyogenes
tagataaaccctcggaggtatattatgctgtgtcaaaattgtaatttaaacgaatctactattcatctttatacaagtgttaatggaaaacaaagacaggttgatctctgtcaaaattgttatcaaatcatgaaatccgatcctgccaattctattttaaatggcctaaccccaggatatagagcacaaaatagatccacaagtcctttctttgatgacttttttggtgatttgaataattttagagcttttggtaatcttccaaataccccacctactcaggcagggcaaaatggaaatggcggaggacgctatggtggtaactacaacggacaacgacctgctcagccacaaacaccaaatcagcaagcaaagggcttattagaagagtttgggattaatgtcacagatattgcaagaaatggtaatattgatcctgttattggtcgtgacgaagagattacacgcgttatcgagatcctcaaccgccgtactaaaaataatcctgtgctaattggtgagcctggagttggtaaaactgctgttgtagaaggtttggctcaaaaaattattgatggtactgttcctcaaaaactccaaggcaagcaagtgattcgtcttgatgtggttagcctcgttcagggaacaggtatccgtggtcagtttgaagagcgcatgcaaaaattaatggaagaaatccgcaatcgcaaggatgtgattctctttattgatgaaattcatgagattgtcggtgctggttctgcaggagacggcaatatggatgctggtaatattttaaaaccagccttggcccgtggtgagttgcaactcgttggtgctactacattaaatgaataccgtattattgaaaaagacgctgccttagaacgacgtatgcaacccgttaaagttgatgaaccttctgttgaggaaaccatcacgattttaaaaggtatccaaccgaaatacgaagactatcatcatgtcaaatatagcccagccgctattgaagctgccgctcatttatctaaccgctatattcaagaccgttttcttcctgataaggctattgatcttctggacgaagctggttccaaaatgaatctaaccctcaactttgttgatcctaaagaaattgacaaacgtcttattgaagctgagaatctcaaggcgcaagctactcgagacgaagactatgaacgcgcagcttatttccgcgatcaaattacaaaatacaaagaaatgcaggctcaaaaagtcgatgagcaagatattcccatcattactgaaaaaaccattgaagctattgtagagcaaaaaactaatattccagttggggacttaaaagaaaaggaacagtctcaactcgtaaacttagccaatgatctgaaagcacacgtgatcgggcaagacgatgctgttgataaaatcgctaaggctattcgtcgtaaccgtgtgggattaggaactccaaatcgccctattggttctttcttattcgttggaccgactggggttggtaaaactgaattgtctaaacaactagccattgaactctttggttcgacaaacaatatgattcgctttgacatgtc

SEQ ID NO: 38076 - DNA, 1107 bp, Streptococcus pyogenes
atgtcaaaagaagttgcatcagcaaggatacagcatagaggcatgaccacacaagggtgggaatcaagttccgatattttaatggagcgagaaattggaattgacatgactacgggttacccaaaagttggcgatggtaaaaataagttcaaggacttaaaagacttgcgtggtcctatgggacctcaaggtcctacaggagaaagaggcccaattggcccaacaggtccgattggcaagcctggaacgacagattataatcaactccaaaataaaccaaatctagatgcgtttgcacaaaaaaaagaaactaatagtaaaatcaccaaattagaatcaagcaaagcagataaaagcgctgtttactcaaaagcagagtcaaaaatagagctagacaaaaaattgagtttgacaggcggcatagtgacaggacaactacagtttaaacctaataaaagtggtattaaaccctcatcttccgtaggaggagcgattaacattgatatgtctaaatcggaaggtgctgctatggtgatgtatacaaataaagatactactgatggaccattgatgattttacgctctgacaaagagaccttcaatcaatcagcgctttttgtcgattacagcggtaagactaatgctgtaaatattgtaatgcgccagccgagcacacctaatttttcctcggcacttaatataaccagtgccaacgaaggcggtagtgcgatgcaaattagaggcgttgaaaaagcattgggaacgctaaaaattactcacgaaaacccaaacgttaaggcaaattacgatgaaaacgctgcagcgttatccattgatattgtcaaaaagacaaacggtgaaggaacagccgctcaaggaatctacatcaattcctccacaggaacaactggtaaaatgctcagaatcagaaataaaaatgaagacaaattttatgtaggtccagatggcggctttcactcaggtgcaaattcaactgtaactggtaatctaacagttaaagatccaacatctgaaaaacatgctgcgactaaaaaatacgtagatgaaaaaattgctgagttaaaaaaactcatacaaaaaacagat

SEQ ID NO: 38077 - DNA, 813 bp, Streptococcus pyogenes
atgatgaaacgacaatttgaagatgtaacacgtatcgtaattaaaattggcactagttcattagtgctaccaacaggtaaaatcaatttagaaaaaatcgaccaactggcttttgtgatttcaagtttgatgaataagggcaaggaagttattttagtatcatcgggagcgatgggatttggactagatattttgaaaatggaaaaacgtccgaccaatcttgctaaacaacaggcagtttccagtgttggtcaggtagccatgatgagtctttattcacaaatttttgcacactaccaaaccaacgtgtcacaaattttattgacgagagatgtggtggttttcccagaaagtctagccaatgttaccaatgcttttgaaagtctgattagttttggcattgtgcctattgttaatgaaaacgatgcggttagtgtggatgaaatggatcatgcgactaaatttggagataatgaccgtttatctgctgttgttgctggtattacaaaagctgatttattaatcatgttgtctgatattgatggcctttttgataaaaaccctactatttatgaggatgcgcagtacgcagccatgttgcagtcattacgcaagaaatcattgcgtcagcaggtggtgcgggcagtaaatttggcacaggtgggatgcttagcaaaattcaatctgcccagatggtatttgaaaacaaaggacagatggtcttgatgaatggagctaatcccagagatattttaagagtgcttgaagggcaaccgctaggcacctggttcaagcagatagaagaggtaaggc

SEQ ID NO: 38078 - DNA, 549 bp, Streptococcus pyogenes
attagtgtccagggattaggttgttggttgcttatcctaaatagtggtttattgattagcctgcctattaaagaaagtgggttagccctcatttaccttgctttaatggtgctaacgatgtgcctaggcttttacattagcctgaagttagatcaatacaagaaattgggtattgaaacacctgaggggggtgttcggttacatcaatggcagagctttaaaaacatgatacgagacattgacaaatttgaggatgttgctattgaaggtttagttgtttggaaccgtgttttggtttatgccaccttatttggttacgctaagaaagtggaacgctatttgaaagtccatcgtattgccttacctgaggtttaccaagctgttcgaccaggtgaattatcaatggtaatgtatgctacgacaccaacctttgtgtctagcttgtcttcagctacaacttcctcaaatttctcagtctcttccggaggcgggattagtggtggtggtggcttctctggcggtggcggaggaggcggcggcggtgccttt

SEQ ID NO: 38079 - DNA, 990 bp, Streptococcus pyogenes
atgcttatagaaatgtggtctccagtatttaagaaacacggagaaattcgggaaccaatctgcttccaccatgggttaaacgtgattatggggttggatttagctgataactctatcggcaaatcctcctcactattagccattgatttcatctttggaggtaatagctatctaaaatcaattgcggttaaaaaattaggtgatcatcctatctacttctgctttcaatttgagaaaaagttttatttttcaagagatacggccaacccagatatcattctagtgtgtgacaagagctactctccaaccggtgaaacaatggacctaggaatttttcttaacaaacttaagaaacgatatcatttagattctccagagctatcattccgattagctatgagtggcttctttaggattgcaggaaaaagtaatcaaaataccgatttccccttacaagtttattcgagccaaaaatcttctgaatctattactactctcatccaactgtttaatttgtacgataacattgcacgatacaaggaacgtctgaaagataagagcgaccagttaacaacttttcgtaatgctcgaaagtatgcctttatctccaacctggttggcggtaaaaagcaatttgaagcaaatgtctcagaaataaaaagattggaatatgatttagcacatctccaagatactcatcaagataaaattgactctgatgatattgagaaaaatcaacaaaaactccagcttagaaatactaagctggagttagaaagcagtcttcgggacaagcaaagacgtcttaagctattggacatcagtatcgaatttggcttatatcctactgaatctgacttaacagagcttcaacaatacttcccagatactaatctaaaaaaattatatgaagttgaagcttaccacaaaaaattggaaactattttagattccgaattctcaactgaacgtgaatccctaatagctgag

SEQ ID NO: 38080 - DNA, 879 bp, Streptococcus pyogenes
atgaggaaaaatatgattgtttcatcagtttcacaaggtcttatatggggagttttaggattaggaatctacctgacctttaggattttaaacttccctgacatgactacagaaggttcttttcctttaggaggagctgttgcggtcaccgctattagcttagggtggaatccatttctatcaactttacttggtatgttatcaggtgctttagcaggttttttaacagggctgttatatacgaaaggaaaaatgccaacacttttagctggaattttggtgatgacgtcatgtaactccattatgctaatggtaatgggaagagcaaacttgggtttacatgatcataaacgtattcaggattgtttacctttttcaattgatttaaatagccttttaacaggtctgataactgttgtgattgttattagcgttttgatctatttcctttacactaatctaggtcaagcttatattgctacgggagacaataaagatatggctaagagttttggtattaacacggattggatggaagttatgggacttgtggtttctaatagtttaatagctttatcaggtgctctagtgagccaacaagatggttatgcagatgtctcaaaagggattggagttattgttattggtttggcgagcataattgttggtgaagtactatactcaactggactgactcttttagaacgtttgattgctattgtaataggctcgattctttatcaatttttaatttcagtagttattatgctaggttttaatacaagttatttgaaattaattagtgctcttgttttagcactgtgcctcatgataccagtggtaaaagagcgcttctttaagggagtgaggttaacacga

SEQ ID NO: 38081 - DNA, 666 bp, Streptococcus pyogenes
atgacaactatgcaaaaaacagttagcttattatcactagctttacttattggtttgctggggacttctggcaaagccatatctgtgtatgcacaagatcagcacactgataatgttatagctgaatcaactattagtcaggtcagtgttgaagccagtatgcgtggaacagaaccttatattgatgctacagtcaccacagatcaacctgtcagacaaccaactcaggcaacgataacacttaaagacgctagtgataatactattaatagttgggtatatactatggcagtgcaacagcgtcgttttacagcttggtttgatttaactggacaaaagagtggtgactatcatgtaactgtcactgttcatactcaagaaaaggcagtaactggtcaatcaggaactgttcattttgatcaaaacaaatctagaaaaacactaactaatatgcaacaaaaggatacttctaaagcaatgacgaattcggtcgatgtagacacaaaagctcaaacaaatcaatcagctaaccaagaaatagattctacttcaaatcctttcaaatcagctactaatcatcgatcaacttccttaaagcgatctactaaaaatgagaaacttacgccaagtgctagtaatagccaaaaaaacggtagcaccgagaca

SEQ ID NO: 38082 - DNA, 652 bp, Streptococcus pyogenes
tcgacagaaggcgttaagagctcatctcgtagcaatgtagaagctgctaactctaccaatgaaatctttagccaattgaacaaagaattggaaaaagcccaaggcaatacagagaaattgtctagcaatgcagagagcttgatgggtgaattcgataaggaattgtctgaaaatgggaacttcgtcgaagccttccgtaaagtcttcaacaatgcctatgaaaacggggtgccgaatgaagtcttgctcgacttcttgtcaaatccagtcgcagagaaatcttcttctgtgaaagcaaccatcaacgtctaccgtccatttatctggatctttatgttggaagtcttgagcctcttcacagcttatctctttgcgactcagccaatcattcgcaaggttaaggatcgtttcaaattggatcgcttgcaagaatcagatctcttgtctgtcggtatccttgtgggactttctctcatccttggactggtgatcggaatgatttcaagtattcaactctctgttggtcgtgaatatgtaccttcatgggtattcttagcggttctagcaagctttgtcttggtacaactgcaatacctcctcttgaaacacttccgggtgattggaatgggactggccttcttcatgttgatca

SEQ ID NO: 38083 - DNA, 383 bp, Streptococcus pyogenes
tatggggggtcattaccgattggagacctcttgaaccatggggatctaagagttggaacgcttgatcctattggtggagagttaatcgtattagatgggaaggcttattcaggctaagggatcaggcgaccatcctgaaattgtcgaagtttctccctgatgccaaggtcccttatgcagcagttgttcctcaccaagcagaagtgattttccgtcaacgctttgaaatgacggacgaggaattggaagcgcgtattgagtcttattacgatggcgaaaatctttttcgctccattaagattcgtggtgactttgtcaagatgcatgtccgtatgattccaaaatcaacaccagagatgaagtttgcagaggttgcaaggcag

SEQ ID NO: 38084 - DNA, 1608 bp, Streptococcus pyogenes
atgtatgtaagtaagttgtttacaagtcaacagtggagagaactaaaattaatctcatacgtaacagaaaacgctgacgccattggcgtcaaagataaagaactcagcaaagctctcaacatctccatgttaacattgcaaacttgtctcactaacatgcaatttatgaaggaagtgggaggaattacctataaaaatggttatattacaatctggtaccatcaacattgcggtttgcaagaagtctatcagaaagctctgagacactctcaatcatttaaattactggagaccctttttttcagagacttcaactctttggaagaattagctgaagagctctttgtgagcctttcaacactcaagcgtctcatcaaaaaaaccaatgcctatttgatgcatacctttggtattactattttaactagtcccgtacaagtatcaggagatgaacaccagattcgactattttacctcaagtatttttcggaagcctataaaatctcagagtggccttttggggaaatcctaaacttaaagaactgtgagcggctactcagtttaatgataaaagaggtcgatgtgagggttaattttacattatttcagcaccttaaaatactaagctcagtcaacttgattcgttattacaagggacactctgccgtctacgacaacaaaaaaaccagtcaccgtttttctcagctcatccaatcatccttagaaatccaagacctttcacgcttgttttacctcaaatttggactatacctagatgagactaccatagctgagatgttctctaatcacgttaatgaccaattagaaatcggttatgcgtttgatagcatcaaacaagactcaccaacgggctgtcgaaaagtgaccaactgggttcatcttaccaactgggttcatcttcttgatgagttagaaatcaggctcaatctcagcgtcaccaacaaatacgaagtagctgtcatccttcataacactaccgtcttgaaagaagaagatatcaccgctaattacctatttttcgattacaaaaaaagttacctcaacttttacaagcaagaacaccctcatctttataaagcatttgtagcaggtgtagaaaaactgatgcgttcagagaaagaacctatcagcacagagttgactaaccaattgatctacgcctttttcatcacttgggaaaatagtttcctagaagtaaatcaaaaagacgaaaaaattcgtcttctggtgattgaaagaagttttaacagtgttggtaatttcctaaaaaagtacatcggagagttttttagcatcacaaacttcaatgagctagatgctctaaccatcgatctagaagagattgaaaaacagtatgatgtgatcgtgacagatgttatggtaggaaaaagcgatgagttagaaattttctttttctacaaaatgattccagaagcgattattgataagctcaatgcgtttttaaacatcagctctgcagacagcttgccactagacaaacccatcaagaaccccttggattttcatcgcaaagaggttatcttccccactccccccaacaagttgcatgcccccccctctacaagt

SEQ ID NO: 38085 - DNA, 381 bp, Streptococcus pyogenes
atgatgacaccagaaacagtctgtcaggaaaaaggcatcgatttagtgtattttgatggtaggggtacaaacacccctggaatgtttaataaaaaacacaacgtcattgcgattgacacttatcttgacggtatatataaacacaaagtcatctatcatgaactaggacatagagaacatactgcgagttattacaagctaaataaagaaaaagcagagctacaagcagatagatgtatgatacaccatctcttaaaagaagagctatcccattgggataatatggaggatttcaactacatccaattcatggaaaaatatgaactgacctcaatcgctgacgaagtgatggtcaaggaagaattagagtttttaattagt

SEQ ID NO: 38086 - DNA, 969 bp, Streptococcus pyogenes
gtgaaatactttttgcgtagatcagcttttggattagttgcggtgtcagcatcagtattagtcggttcaacagtatctgctgttgactcacctatcgaacagcctcgaattattccaaatggcagaaccttaactaatcttcttggcaatgctccagaaaaactggcattacgtaatgaagaaagagccattgatgaattaaaaaaacaagctattgaggataaagaagctacgacagctatagaagcagcaagttcagatgccttagaagcattagcggatcaagcagacgctttacaatcagaagaagctgcagtagttcaatcagataccgctgctagtgacgccttagaagcattggcggatcaaacagacgctttacaatcagaagaagctgcggttgttaaagcggataacgctgctagtgacgccttagaagcattggcggatcaaacagacgctgtacaatcagaagaagcttcagttgttaaagcagataccgctgctagtgacgccttagaagcattggcggatcaaacagacgctttacaatcagaagaagctgcggttgttaaagcagataccgctgctagtgatgccttagaagcattggcggatcaaacagacgctttacaatcagaagaagctgcggttgttaaagcggataccgctgctagtgatgccttagaagcattggcggatcaaacagacgctgtacaatcagaagaagcttcagttgttaaagcagataccgctgctagtgacgcctgggaaaaagcagcaactccaaccgctttagatgttaagaaaactaaagatacaacacctgtagttaaaaaagaagaaagacaaaacgttaatacccttcctacaactggtgaagagtctaacccattctttacagctgctgcgcttgcaataatggtaagtacaggtgcgttagttgtaagttcaaagtgcaaagaaaat

SEQ ID NO: 38087 - DNA, 825 bp, Streptococcus pyogenes
atgaaaaaagaagaaaaattagtatttacagtcgcatttcttattattggtggtgtattgtttagaacaactgcggtaacacgtattccagcgaacacagttggcgtaaaggtatctgcaacttcgggtgtgcaaaagcaaacactatcaactggctatcatttaaaagtgccttttattgataaaatctacaagatgcctaccagtgtgcaacaaaagaaaatcaaaaagattaccactcaaacagaggatgctcaatggctagatacgacacttgatgtcaaatatcgagtgtctgaaaaaaatgctatgaatgtctttaaggactatcagagtatggaaaatgtcaataaatcactcataaaagcagccgttcaaagagcagttgagcaagtgacagttaactatgatatttacgaagctctaggctccaaacgtaatgaactgtatgcagaaattgaaaaatcattatctgaacggttagcgaaagaatctattgagcttgtatcggtaaccctaactgatcaagatgcaggagatgaaattgagagagctatcaaagatgagtctgttaagcaaaagcaagtagattcagctaaacaagacaaagaaaaagctaaaattgaagctgaaaccaagcaaatacaggctcaagcagaggcggatgctcaagtgattaaagccaaaggagaagctgaatccaacaatacaaaggctgcatcaatcaccgacaatttaatcaaaatgagagaagccgaagctaggtatagacatggctgggttgaggtacagacatctggcgaagtcatcacaaataaggggcag

SEQ ID NO: 38088 - DNA, 1339 bp, Streptococcus pyogenes
ttgaaactacgtgattatcaagaagaattactaacagccatcaggaggtcattagcgactggaaataaacgaataatcgtccagtcgcctccctagaagtggaaagacagtcgttatggcccatatcgcaagaagcgctacggataaaggaaacagagtattgttttttagccacagaaaagaaatcaatgaacaggtagagagaacatttgcagcaaatggagttaactcaaatctgttaactatcggtggtgtgcagtcgttagtcagaaaactagacagtctctctcaaccagaggtgatcttgattgacgaggctcaccacagtaaagccaagtcttacttaaaaatcatcgaccatttcaaaaacgcttatgtattgatgtttactgggacaccagtcaggttaaatggagatggatttgatgacattgcggatgatttggtagctgggaaatctgtcaaatggctgcaagaacacggtaatatagctaactttaaatactatgctccgtccatgattgataattctgccctcaaaaaaagaggtggagagtttactaaggattctgttaatcaatccatgaaatcggttatctatggtgacgttattaaacactatgaaaagctagcaaaaggaaagcaagctatcgtttatacgcacagcgtagaagcctctcatttagtctctgacatgtttaatcaagcagggtatcaatcgcaatcagtcagcggtaaaacgcctaaaagcgaacgagaagaagctatgcaagcattcagagacggaaagttgagaatactcgttaactgcgaattgtttacggaagggatagacctgcctaatgttgatgtttgcattatgttgagaccaactcaatcgctatcgctatacttgcaatttgctatgaggccgttgaatccaagagatggaaagatagctattattattgatcacgttggcaatgtagagcgttttggcttacctaacatggatagggaatggcgtttagatggaaagactaaacaaaagcaatccactaagattggtgaacctaccacaagggtatgtgatgactgttatgccacgtattggtccgatactcgtatctgtccggaatgtgggcatgaaaacgagttaacaaaacgtgaaattgaagaaatcaaagaagctgaattacaagaaatatctgaacaaaaacaactaaaactaaaaaatagagttagtacctatcaatcaccagatctttgtcggacgatggatgaactaaccgaatatcgaaaacaacatggatacaagccaggatggcagtatcacattgctaaaaaattaggaatttta

SEQ ID NO: 38089 - DNA, 624 bp, Streptococcus pyogenes
atgatttttgcatacaataaagaacaagttggcgatgtcttgatggttatcttacaagacaccaaagatatcaaacgtcaagtagaacgaaaaggcaaagtagcccgtgtttttgcagaagaaagcggcaaaacccttgcttggaatatctttgaagcgtcaagcttgattactattgaaggcaatggacagatttttttgacagacgaggaccttgcaagattaaatgcagagcttgctaaggaaggattttcagaaaggcttgaaccgattgtgggacctgtttttgtggttggtcaaattgttgagatggtggctcatccagatagcgaccatcttaatatctgccaagtggctattggtgaagatcaaacggttcaaatcgtagcgggcgcaccaaatgctgcgcttggtttaaaaacgattgttgccttaccaggtgctataatgccaaatggtagtctgattttcccaggaaaattgcgtggtgaagaaagttatggtatgatgtgctctcctcgtgagttagccttgccaaatgcaccgcaaaaacgtggcattattgaacttgatgagtcagctgtggtaggagaagcttttgacccagccaaacattggaaaggt

SEQ ID NO: 38090 - DNA, 384 bp, Streptococcus pyogenes
atggcttaccgtaaactaggacgcactagctcacaacgtaaagcaatgcttcgtgatttgacgacagatcttttgatcaacgaatcaattgtaacgacagaagcacgtgcaaaagaaatccgtaaaacagttgaaaaaatgattactcttggtaaacgtggtgatcttcatgctcgtcgccaagcagctgcatacgttcgtaacgaaatcgcatcagaaaattatgatgaagctaccgataaatacacatcaacgacagctcttcaaaaacttttctcagaaattgcacctcgttatgcagaacgtaacggtggatacactcgtattcttaaaacagaaccacgccgtggagatgctgctccaatggcaattattgaattagtt

SEQ ID NO: 38091 - DNA, 458 bp, Streptococcus pyogenes
gtatttgtcatggcagcttatatatttcaaatgttcctcggctggcagcaactcaaagacttcaataagacctatacgatgctccgaaaactggggcgcgtagtattggcaggaagtccggaagaatcaaatccggtacgattgtcatgttcgcggttgatgaaaacggtcgggttcttaaagctagcaaaatgcaaggagtcacaatcttagcacgttttcaaaatatggacgattatgttggagaagacatccattattttgacaagtataatcctcttgtgagaaaagaaaataagttgatgcaatcagccatagaagatgctagaaaagtctatctttggaatgaggcaggtattgagaaagagacaagttcatctgattcttttctgggattcggcttttatgcgaattacttacaattatctattaaacagttatttaaaaaaaataagaaa

SEQ ID NO: 38092 - DNA, 476 bp, Streptococcus pyogenes
accaaagcgctggtggaaggtggcgcggatctgatcctgattgaaaccgttttcgacacccttaacgccaaagcggcggtatttgcggtgaaaacggagtttgaagcgctgggcgttgagctgccgattatgatctccggcaccatcaccgacgcctccgggcgcacgctctccgggcagaccaccgaagcattttacaactcattgcgccacgccgaagctctgacctttggccagaactgtgcgctggggcccgatgaactgcgccagtacgtgcaggagctgtcacggattgcggaatgctacgtcaccgcgcacccgaacgccgggctacccaacgcctttggtgagtacgatctcgacgccgacacgatggcaaaacagatacgtgaatgggcgcaacgggttttctcaatatcgtcggcggctgctgtggcaccacgccacaacatattgcagcgatgagtctcgccttc

SEQ ID NO: 38093 - DNA, 372 bp, Streptococcus pyogenes
aataccatgacgggtggcatgttcaagatggaaaatgatccacgggtaacaccaatcggacgctttatccgtaagaccagtcttgatgaattaccacaattttacaatgtgttgatcggtgatatgagtctagtcggaactcgtcctccaacggtagacgaataccaagactatacgccagcccaaaaacgccgactcagtttcaagccagggattacaggcctttggcaagtgagcggacgcagtgagattactgattttgacgaagtggtcaaactcgacgttgcgtatatggatggttggacgatctggagagatattcagatcctgctcaagaccgtgaaggttgtacttagaaaagaaggagcgaag

SEQ ID NO: 38094 - DNA, 622 bp, Streptococcus pyogenes
aatatcaatactatcttggcacaggcaggaatcaagtcggataaagcaacgggagctttgacgactcctttgcatttctctacgacttaccaacacccagaatttggtcagtctacaggttttgactatacccgtacgaaaaatccaacacgcgcaacagctgaaaagactttggcagctattgaaagtgcagactatgctttggcgacaagctctggaatgtcagccattgtacttgcttttagtattttccctgttggttcaaaagtcttggccgttcgtgacctgtatggcggttctttccgctggtttaaccaacaagagcaagaaggtcgtttctctttcacctatgccaatacagaagaagaactgatccaccatctagatcatgatccagtggatgtcctctatattgaaacaccaactaatccattgatgttggaatttgatattgcttatttagccaaattggcccatgcgaaaggtgccaaagtcgtggtggacaatactttctatagccctatctatcaacgcccgattgaagagggagcggatattgttcttcattcagcaaccaagtacctaagctggtcacaatgatgtcttggctggtgttgtcgtg

SEQ ID NO: 38095 - DNA, 498 bp, Streptococcus pyogenes
aaaatcgaccaggcacagaccttacgtgatctagaggtggaaacctatcgggatacctttggtccctatattgttgaggaagatttggaagattacttctccaccgtgctctctttggagcaaatcgagaaggatctgctagatccagaatccgaaacctattttgtcctcaatgaagaacaagaaatctgtggttttctcaagatcaactggggtcaggcgcagaccgagccagtagagatggacaagtcctttgagatccaacggatctatgtcaaaaaggaatttcatggggctggttttggcaaggaaatgtttagctttgcgctggatcaagccaagagccgtggctttgagtgggcttggctaggtgtctgggaacgcaactttaaggcgcaagatttttactatcgctttggatttgaacgatttagtgaacacgagtatcctaccggagataccgtggatacagactggttgttgagaaagaaattgatc

SEQ ID NO: 38096 - DNA, 635 bp, Streptococcus pyogenes
  misc_feature (589)..(589): n=g, a, t or c
tttctggccttggtcattggtcctctattatttcgagaagcagaagaagcagatattacttccgtcttaaagcactggcgggtcatcctatatttgattttcccagtgatttttatctccaccattagtttgggctgggcagcccattccttgtggctgagccttccattagcagcttgtatggcagtaggggcagcccttgggcctaccgacttagtagcctttgcttccctgtctgagcgctttagctttccaaagcgggtttcgaatatcttaaaaggcgaaggattactaaatgatgcctcaggtctagttgcctttcgagtggccttggcagcccttgcgaccggaagtttctcccttggagaggcaggggtttccttaggaatctccattattggaggatttgcggtggggatcttgacggcctttgtgaaccggtggctgcaaaccttgctcttgagtgttcgcgccagtgatattgccagtgaattgttattagaactgagcctccctctgttgaccttcttcctagcagaagaactccatgtctctggtatcattgcagtagttgtgtcagggatcttanaagccagtcgctttaagcacatttacctccttgaagcgcgggtgga

SEQ ID NO: 38097 - DNA, 507 bp, Streptococcus pyogenes
atggaaaaagactggtggaagggaaaggtcgcttatcagatctacccaaaaagctttaaggatagcaatggtgatggcgttggggatttgaaaggcatcacggagaaactcgattaccttcaaaaattagggattgacattctctggttatcgcctatttacaagagtccgtttattgaccagggttatgatatttccgactattatgccattgatcctatttttggaaccatggaagatatggaggagctgattgcggaaggtaagaaacggggcatttccatcatcatggacttggtggtcaaccactgctccagtcatcacgagtggttccaaaaagctctagcggatccagatggtccttatgcggattacttttatttcatcgaaagtgacaaggaacccaacaactgggaaagttactttggaggcagtgtctgggaaaccgttcctgtgcaccaacaatactatctccattcttttcacaaggatcagccggatctcaat

SEQ ID NO: 38098 - DNA, 539 bp, Streptococcus pyogenes
gatctggcccaaacaaccgcccatcatttaccaaaatggcttcgctataccctttggattgtgattgagcttgccttgatggcgacagatttagcggaagtcatcggatcagggattgccctccaccttctttttggctggcccttgctcttttctatcctgatcactatctttgatgtctttctattactggggctcatgcatctaggatttcgaaagatcgaggccatcgtttcaaccttgatcctcacgatcctagcaattttcggctatctggttttcctatcgaaacctgatatcggaggaatcttcgctggcttcctccctcaaaaagaggtgctaggaattggacttccaaaaggaaatgaagccttaaccttggcgcttgggatcatcggtgcaacgtagatgccccacaacctctatctccactcttccatttcgcaaacgcgaaaagtcgattacaaggatccagcagatatcaaacgggcagtgcgcttttatgacctgggattcaaatattgaattgagtctggctt

SEQ ID NO: 38099 - DNA, 590 bp, Streptococcus pyogenes
tttagtttgatttgccttctttttttggtgctgattgcccgacttggctatatgcagatcactcaccaagcctactatacggataaattggcaaaagctacgaaaaagacggtcaaacaagggagtgtgcgagggcaaatctatgatgcttctggtaagcccttggtagaaaatgtgggaaaacaggtcctgacttttacacgtgatcgtaaaatgacggcccaagaaatgcgagagacagctgggaaactcttacagtatgtggacgtagaaaatcctcaagtaaccgaacggcaagaagtagattactatctagccaataccaaggtctaccaagaggtcgtggaacacctgcctgagaaaaagaaatttgataccgatggcaaccgactgccagaagccaagatttatcaagcggcagtggatagtatcgacccttcaaaactcggctatacagatgatgagaaaaagattatttatctctatagccagatgaatgcggtagagaattttgcgacgggaatcatttcgacgccagcactaggagctgaacagattgcgaccatcgctgcggacagtcaggaacttcc

SEQ ID NO: 38100 - DNA, 231 bp, Streptococcus pyogenes
  misc_feature (51)..(51): n=g, a, t or c
ttggatgtcactgctaagtaccaacaatctgttcgtgacattgtagctctngctgttcaagcaggtgtacctgtaccatctttctcagcagccatcacttacttcgatagctaccgttcagcggatcttccagcgaacttgatccaagcacaacgtgactactttggtgctcacacataccaacgtaaagacaaagaaggtaccttccactattcttggtacgatgaaaaa

SEQ ID NO: 38101 - DNA, 472 bp, Streptococcus pyogenes
gttcctgaattagagccccgcctcttttctttcaatgcacctttcggatcttgtccagactgtgatgggctgggcattaagctagaggtggacttggatttggtggtgccagatgatcgcttaacacttcgtgaaggagcacttgctccttggaatccgatctcttccaactactatccacagatgttggagcaagccatgatccattttggcgttgatatggaccgacctttttccgatttttctcaagaagaaaaggacttggtcctctatgggtcaaacgggaaggaattccacttccactatgaaagtgagtttggtggggttcgcgatattgagattccttttgaaggggtcgcaaacaatattcagcgtcgtttccgtcagaccaatagtgattcctctcgcaaccagatgcgctcttataatgacgaattgacctgtgaaacctgccatggctaccgtctcaatg

SEQ ID NO: 38102 - DNA, 524 bp, Streptococcus pyogenes
  misc_feature (443)..(443): n=g, a, t or c
atgacacatttttctggtaaagatccttttgtaaatatggatgatattttcaatcaattaatggcaaacatgggtggttatcgtagcgaaaatccccgctatctcgttaacggtcgcgaaataactcccgaagaattccaacactatcgtcaaacaggacaactccctgtagcgacaaccaaagcaacaaattctcaaatgttaacacctaaagctgatagtgtattgactcaactcggaactaacttaacacaagaagctcgtcaagggcatcttgaccccgtcattggtcgtaacaaagaaattcaagataccgctgaaatcttggcacgacgaactaaaaataatcctgtccttgtcggagatgctggtgtcggtaaaactgcagtcattgaaggtttagctcaagccattgttaatggagatgtcccagctgctattanaaacaaggaaatcgtatcaattgataattctagtcttgaagctggtacacagtatcgtgggttctttttgagagaccattc

SEQ ID NO: 38103 - DNA, 903 bp, Streptococcus pyogenes
atgagaattcaacaactgcattatattatcaaaattgttgagtgcggctctatgaatgaagctgctaagcaattatttatcacacaaccaagtctatccaatgcggtcaaggatttggaaatggagatgggcattaccattttcaaccgaaatcctaaagggatcaccttgacaaaagatggggtggaatttttatcttatgctcgccaaattatagagcaaacatcactgttagaagaccgctataaaaaccacaatactggccgagagctctttagcgtttcatctcaacattatgccttcgtagtcaatgcatttgtctcactcctcaagcggaccgacatgactcggtatgaactctttttgcgcgagacaagaacttgggaaatcattgatgatgtcaaaaactttcgatctgaaattggtgttctctttatcaacgactataaccgagatgtcttgaccaaattatttgatgacaatcatttgactgcctctccattatttaaggcacagcctcatatttttgtcagcaaatcaaatcctctagcaactaaaagcctattaagcatggacgacttgagagattttccttacctgagctatgaccaagggattcacaactccttttatttttcagaagagatgatgtcccagatgccccacaacaaatcaattgtggtcagtgaccgtgccaccctctttaacttaatgattggtttagatggctacaccgttgccagtggtattctaaatagcaatctaaatggtgaccagattgtggctatcccgctagatgtccctgacgaaattgacattgtttttatcaagcatgaaaaagccaacttgtccaaaatgggggaacgttttatcgaataccttctcgaagaagtaacctttgat

SEQ ID NO: 38104 - DNA, 366 bp, Streptococcus pyogenes
atgctttcagcgcttatcccttccctacatagctacccagcgatgcctttggcaagacaactggtacaccagcggtaagtccactctggtcctctcgtactaggagcagatcctctcaaatttcctacgcccgcgacggatagggaccgaactgtctcacgacgttctgaacccagctcgcgtgccgctttaatgggcgaacagcccaacccttgggaccgactacagccccaggatgcgacgagccgacatcgaggtgccaaacctccccgtcgatgtgaactcttgggggagataagcctgttatccccagggtagcttttatccgttgagcgatggcccttccattcggtaccaccggatcac

SEQ ID NO: 38105 - DNA, 1803 bp, Streptococcus pyogenes
atggctgattatactttaggagtacaaataacaggtgacgcctctaaaatgcaaaaagcgtttgaaaaagcgcaagaacaagctgaaaaattaaaggaaaaaattaaagactcaaacaacgaatctggcaattcttttgatggtttgaccactaaaattgacgcaatatctggcaagctgtcagcttacggagataaaataagctctattggcaaaaacatgacaaccatgtttacattaccagcggttgctggtataacggcagttgttaaagagtatgcaaatctggaacagtcaattggtggtgttgagactttatttaaaaagtctgccaaagctgtgcaaaaaaatgcaaatacagcgtttagacgagctggtgtatctgctaatgagtacatggagcaagtaactagcttttctgctagtctaatttcatctcttggcggagatacagcaaaggctgtcggtgttgctgatactgccatggtcgacatgtctgacaacgctaataaatttggtacaaacatcgggttaatccaaaatgcctatcaaggctttgctaaaggcaattacacgatgttagataaccttagattgggttttggtgggacgaaagaggagatgcaaagattgctggacgaagctggtaagctaagcggcatggaatttgacatcaataacttttcggacattatacaagcaatccacattatccaagataatttaggcgtaacaggaacgacagctagagaagcgtcagaaactattagcggctcattttcgcaagcaaaagcgtcagtaatcgatttcatgggttctcttggcggagatggcagtgacgtagatgcaaaaatgcaagcaatgatacagtcgattactgtgtttgcagataatgtcaaagaggctttggggcgtatttgggacaatttgcctttacaagagtatcaaaaaaacctcttgcttatagctgtcgttggcggacctatccttgttgtggtcgggactatttttggagctattgctaatatcatgactgttgttagcggtattttaaccgttttaggcatgatgacgccaataggatggatcatagcagcagccatagcggctattgtcgcagctgtcgttttttgggacgatattgttgcagaggtcggccaaaaatttgagttagtcaaaataatcggcatggcgatgtgggaaagttttaaagatggtgtatctagttttggcaagtcaatccaaaatgtcgttggcaaaattggcggatggttcgccgaagcgtggaatgctgcagccgacacagccactagaatttttactaaggttggggatacgattagtggcatctttagcggcgttgtttctggcattaaaagtttgatcaacggagcaatcggtggcatcaataaggttattggcattaccaataaactgcccggtgtcaacataccaaaaatcccatatctcgccagaggtacatctgactggcaaggcggttttgctcgtattaacgagggcggtcgtggagaattagttcatatgccaaacggggcaaccgttgtcccgcacgatgtcagcatgaaatacgctcgagaatctgctaaagctaattctggtgttgcttatatggatagtaatgatgagattgccaaaagtgctttgaaactagctaacgatgctgttaaacgccctgttgtgttaaatatcaacggccgtgaggtcgctaaaacgacaggcggagatatgagagattatctaaatagtcgagatatgacattaaaacgattgagaggtgaggtt

SEQ ID NO: 38106 - DNA, 297 bp, Streptococcus pyogenes
aacctcaagacagatctctaccaagtctgggtctatctttttaaggaagttaagaaagaagctaagattatcagcctggccattgattacaattttgaacggctcttgaccaaggcagtctatgactttttagaaaaacgaaatggcagctcatcaaatggcgctggcagctacctcaattccttctggagctcagccattgtctctgtcatctccaaatggatcaaggatggcatgaagattcccgctgagaaaatcgcgaccctaggccttcctctcttcccacaaaagaagaag

SEQ ID NO: 38107 - DNA, 915 bp, Streptococcus pyogenes
ttgcaggcccctaagaagaggccaagcaatcagctggtagccttatctgtttgccctaatggcattagttcgtctctgatgttggaggcaaccttgaaggaactttttccacagctacagtttattaggattcaccagctggacaaaataaagttgttggatccagcatcctttgatttgattttttcaacagtagcttttgactgtgctaaacctgtttatgtgacgcaagctttgatgggacctgttgaaaaaatgatgttgaaaaagatggtctgtgatgactttcatcttcccttgtcagagcaattcgctttggatgatctgttgagtattattcataaacacaccacgattactaataaagaaggacttgttagtgatttatcccgttacctgattggtaaccatttaacgattgaaaaaggaggtctaggactattggacttgttaacagcagattttattaggcaggctgatgctgtttcggattggcaggaagcgattcgtttggctgctcagcctttactagaacaccagatgattgaaacatcttatatcgacggtatgattgattcggtcaatgagcttggagcctatattgttttagcccctaaggtggctgttcctcatgcggcgcctgaaaaaggagcacggcagttaggcatgtctctcttacaactaaaagaacctgtcagctttgatttgaagcaagaaggtgatccagacaagcaagtgcaattgatttttgttttgtctgctgtggattctagttcacatttgaaggctttgcaggaactgtcgttgattttagatgacgatgaacatattgagcaattaattgaggctaagaatactgaggaaataatgagtctgattagccatatgattgaaaaaggagatgaatcacatgat

SEQ ID NO: 38108 - DNA, 117 bp, Streptococcus pyogenes
aaaacacttcataaatttatcgggcagacggtcttgtatttcgccattttcctagccctactttatgtctttagttaccttggtcaaggtcagggtggctttatctacaacgaattt

SEQ ID NO: 38109 - DNA, 672 bp, Streptococcus pyogenes
atgtcatattttctaattactaatactcagcttattttgaaaaattttacaggtcactataccatcggtagtaatagtatagaagatttgtttactatttactattttcaattgacaaaaagtgtagctcaatcaaatgttcaaactgacataataaaaagagtttataaaaatagtaaacaattatcgataagcgatgcaacttcaaaatacaaagcatatgaattacttgttactgaaggtttttttccagaaaatgcagattataaatggttgattaaggtcgatacatatgataagttaattgactatattacagactattgttttaggaaaatgttgccattagattctatgtatgaacataatttgaaagaaattatttggaattatatagatcctacttatgaatcccatattatagataatggtaactcagaagatttatctatatttctaagagataatatttcattttttgaatcgtttaacagatttaagaataaagaatataatgatgatctagaatttgaagatgatagacttagagatgaatttgataagcagtttaatatagcaatttcgaactataaaagacatgtaagtatcagaagatttaattttatttttaagccattttttccaaatgaatcagaacaagagttaacgttt

SEQ ID NO: 38110 - DNA, 147 bp, Streptococcus pyogenes
atggtaacgtacccctggaaggtcttttacacgtccgccacgaataagaacaacgctgtgctcttgcaagttgtgtccgatacctgggatgtaggcagttacttcaataaggttgctcaaacgtacacgagcgaatttacgaagggc

SEQ ID NO: 38111 - DNA, 2310 bp, Streptococcus pyogenes
atgacacaaaaaaatagctataagttaagcttcctgttatccctaacaggatttattttaggtttattattggtttttataggattgtccggagtatcagtaggacatgcggaaacaagaaatggagcaaacaaacaaggagcttttgaaatcaagaaaaataaaagtcaagaagaatataattatgaagtttatgataacagaaacatacttcaggatggggaacataaacttgaaataaaaagagttgatgggacaggtaaaacttatcaaggtttttgctttcagttaacgaaaaattttcccactgctcaaggtgtaagtaaaaagctgtataaaaaattgagtagtagtgatgaagaaacactaaagcaatatgcctctaaatatacaagtaataggagaggagatactagtggtaatcttaaaaagcaaattgctaaggttctgacagaaggttacccaactaacaaaagtgattggttaaatggattgactgaaaacgaaaaaatagaagtaacccaggatgcaatttggtattttacagaaacgacagttccggctgatagaagttatacgaatcgcaacgtaaatagtcaaaaaatgaaagaagtgtatcaaaagctaattgatacaacagatatagataaatatgaagatgtacaatttgatttatttgtgccacaagatacaaacttacaggcagtaattagtgtagagcctgttatcgaaagccttccttggacatcgttgaagccaatagcccagaaggatatcactgcaaaaaaaatctgggtagatgcacctaaagaaaaaccaattatttattttaagctatatagacagctgcctggagaaaaggaagtagcagtggatgacgctgagctaaaacagataaatagtgaaggtcaacaagaaatatcagtaacttggacaaatcaacttgttacagatgaaaaaggaatggcttatatttattctgtaaaagaagtagataaaaatggcgagttacttgagccaaaagattatatcaagaaggaagatggacttacagttactaatacttatgtaaagccaactagtgggcactatgatatagaagtgacatttggaaatggacatattgatattacagaagatactacaccagatattgtttcaggtgaaaaccaaatgaagcaaatagagggagaagatagtaagcctattgatgaagtaacggaaaataatttaattgaatttggtaaaaacacgatgccaggtgaagaagatggcacaaattctaataagtatgaagaagtcgaagactcacgcccagttgataccttatcaggtttatcaagtgagcaaggtcagtccggtgatatgacaattgaagaagatagtgctacccatattaaattctcaaaacgtgatattgacggcaaagagttagctggtgcaactatggagttgcgtgattcatctggtaaaactattagtacatggatttcagatggacaagtgaaagatttctacctgatgccaggaaaatatacatttgtcgaaaccgcagcaccagacggttatgaggtagcaactgctattacctttacagttaatgagcaaggtcaggttactgtaaatggcaaagcaactaaaggtgacgctcatattgtcatggttgatgcttacaagccaactaagggttcaggtcaggttattgatattgaagaaaagcttccagacgagcaaggccattctggctcaactactgaaatagaagacagtaaatcttcagacgttatcattggcggtcaaggtgaagttgttgacacaacagaagacacacaaagtggtatgacaggccattctggctcaactactgaaatagaagacagtaaatcttcagacgttatcattggcggtcaaggtgaagttgttgacacaacagaagacacacaaagtggtatgacaggccattctggctcaactactaaaatagaagatagcaagtcttcagacgttatcgttggtggtcaggggcagattgtcgagacaacagaggatacccaaactggcatgcacggagattctggtcgtaaaacggaagtcgaagatactaaactagtacaatccttccactttgataacaaggaaccagaaagtaactctgagattcctaaaaaagataagtcaaagagtaatactagtttaccagcaactggtgagaagcaacataacaagttcttttggatggttacttcttgctcacttattagtagtgtttttgtaatatcactaaaatccaaaaaacgcctatcatcatgt

SEQ ID NO: 38112 - DNA, 454 bp, Streptococcus pyogenes
atggggtctttccgtcctgtcgcgggtaacctgcatcttcacaggtactaaaatttcaccgagtctctcgttgagacagtgcccaaatcattacgcctttcgtgcgggtcggaacttacccgacaaggaatttcgctaccttaggaccgttatagttacggccgccgtttactggggcttcaattcagatcttcgcttgcgctaaaccctcctcttaaccttccagcaccgggcaggcgtcaccccctatacatcatcttacgatttagcagagagctgtgtttttgataaacagttgcttgggcctattcactgcggctgacctaagtcagcaccccttctcccgaagttacggggtcattttgccgagttccttaacgagagttctctcgatcacctgaggctactcgcctcgactacctgtgtcggtttgcggtacgggtagagtatcatt

SEQ ID NO: 38113 - DNA, 528 bp, Streptococcus pyogenes
gtaacgaaaccaagcaccgagtcaagtacagaaccaagcaaggaagaaacaaaaccaagcaccgaatcaagtacagaaccaagcaaggaagaaacaaaaccaagcaccgaagcaagtacagaaccaagcaaggaagaaacgaaaccaagcacagaatcaagtacagaaccgagcaaggaagaaacgaagccaagcactgaagcaagtacagaaccaagcaaggaggaaacaacaccaggtagtacaactactattgttcctacaaacagtaacagtgttagtaccgttggtcgcccagttttaccaacaaattcatatattttagtagaccaggcaacaggtatcgtcttgcaaaaccctgattttgctcaaggtggctatagtctccttgttgaagttttgaaagatgttaaagaactagctggtaaagattacaaggcatataatattcaattatcgaacgaaaataatcctatacatcaaattagtccaacggttatgaccattccaagtaatagccaaaagaag

SEQ ID NO: 38114 - DNA, 426 bp, Streptococcus pyogenes
ttggagacagcatatattatatttgcgattcttttaaatttagcgttggtcagattgaacagtctgttttttgaaaataatataaatttaaagttaaatgaatatggtttagaacttgtacgagagaactttttaaatttattactaatagtatttgcagcacctcttctcgaggagattatatttcgtaaaatcttgttgagttatatttttgaaaaggtaaagtcaggttattcccttaaaataataattgcagtatttttatcttctgtaatctttgctcttagtcacgccatagattatagtttagttaatttgcttaataggttagtatttggtattttagcttctttattatttttaaggacgggtagattacgaagctctgtagtttttcatggtttacttaatcttgtagcactactc

SEQ ID NO: 38115 - DNA, 405 bp, Streptococcus pyogenes
ggaatatcaacctgttggccatcggatacacctttcggtctctccttaggtcccgactaacccagggcggacgagccttcccctggaaaccttagtcttacggtggacaggattctcacctgtctttcgctactcataccggcattctcacttctatgcgttccagcgctcctcacggtacaccttcttcacacatagaacgctctcctaccatgacacttttgtgtcatccacagcttcggtaaactgttttagccccggtacattttcggcgcagggtcactcgactagtgagctattacgcactctttgaatgaatagctgcttctaagctaacatcctagttgtctgtgcaaccccacatccttttccacttaacagttattttgggaccttagctggtgg

SEQ ID NO: 38116 - DNA, 1356 bp, Streptococcus pyogenes
atgactgaaaatgaacaaattttttggaacagggtcttggaattagctcagagtcaattaaaacaggcaacttatgaattttttgttcatgatgcccgtctattaaaggtcgataagcatattgcaactatttacttagatcaaatgaaagagctcttttgggaaaaaaatcttaaagatgttattcttactgctggttttgaagtttataacgctcaaatttctgttgactatgttttcgaagaagacctaatgattgagcaaaatcagaccaaaatcaaccaaaaacctaagcagcaagccttaaattctttgcctactgttacttcagatttaaactcgaaatatagttttgaaaactttattcaaggagatgaaaatcgttgggctgttgctgcttcaatagcagtagctaatactcctggaactacctataatcctttgtttatttggggtggccctgggcttggaaaaacccatttattaaatgctattggtaattctgtactattagaaaatccaaatgctcgaattaaatatatcacagctgaaaactttattaatgagtttgttatccatattcgccttgataccatggatgaattgaaagaaaaatttcgtaatttagatttactccttattgatgatatccaatctttagctaaaaaaacgctctctggaacacaagaagagttctttaatacttttaatgcacttcataataataacaaacaaattgtcctaacaagcgaccgtacaccagatcatctcaatgatttagaagatcgattagttactcgttttaaatggggattaacagtcaatatcacacctcctgattttgaaacacgagtggctattttgacaaataaaattcaagaatataactttatttttcctcaagataccattgagtatttggctggtcaatttgattctaatgtcagagatttagaaggtgccttaaaagatattagtctggttgctaatttcaaacaaattgacacgattactgttgacattgctgccgaagctattcgcgccagaaagcaagatggacctaaaatgacagttattcccatcgaagaaattcaagcgcaagttggaaaattttacggtgttaccgtcaaagaaattaaagctactaaacgaacacaaaatattgttttagcaagacaagtagctatgtttttagcacgtgaaatgacagataacagtcttcctaaaattggaaaagaatttggtggcagagaccattcaacagtactccatgcctataataaaatcaaaaacatgatcagccaggacgaaagccttaggatcgaaattgaaaccataaaaaacaaaattaaataa

SEQ ID NO: 38117 - DNA, 1137 bp, Streptococcus pyogenes
atgattcaattttcaattaatcgcacattatttattcatgctttaaatacaactaaacgtgctattagcactaaaaatgccattcctattctttcatcaataaaaattgaagtcacttctacaggagtaactttaacagggtctaacggtcaaatatcaattgaaaacactattcctgtaagtaatgaaaatgctggtttgctaattacctctccaggagctattttattagaagctagtttttttattaatattatttcaagtttgccagatattagtataaatgttaaagaaattgaacaacaccaagttgttttaaccagtggtaaatcagagattaccttaaaaggaaaagatgttgaccagtatcctcgtctacaagaagtatcaacagaaaatcctttgattttaaaaacaaaattattgaagtctattattgctgaaacagcttttgcagccagtttacaagaaagtcgtcctattttaacaggagttcatattgtattaagtaatcataaagattttaaagcagtagcgactgactctcatcgtatgagccaacgtttaatcactttggacaatacttcagcagattttgatgtagttattccaagtaaatctttgagagaattttcagcagtatttacagatgatattgagaccgttgaggtatttttctcaccaagccaaatcttgttcagaagtgaacacatttctttttatacacgcctcttagaaggaaattatcccgatacagaccgtttattaatgacagaatttgagacggaggttgttttcaatacccaatcccttcgccacgctatggaacgtgccttcttgatttctaatgctactcaaaatggtactgttaagcttgagattactcaaaatcatatttcagctcatgttaactcacctgaggttggtaaggtaaacgaggatttagatattgttagtcagtctggtagtgatttaactatcagcttcaatccaacttaccttattgagtctttaaaagctattaaaagtgaaacagtaaaaattcatttcttatcaccagttcgaccattcaccctaacaccaggcgatgaggaagaaagttttatccaattaattacaccagtacgaacaaactaa

SEQ ID NO: 38118 - DNA, 198 bp, Streptococcus pyogenes
atgtatcaaattggatcatttgttgaaatgaaaaaacctcatgcttgtgtaattaaagaaactggtaaaaaggctaatcaatggaaggtactgagagtaggagctgatattaaaattcagtgtactaactgtcagcatgtgattatgatgagtcgttatgattttgagcgaaaattaaaaaaagtactgcaaccatga

SEQ ID NO: 38119 - DNA, 1116 bp, Streptococcus pyogenes
atggctttaacagcaggtattgtaggcttaccaaatgttggtaaatcaaccttatttaacgcaattacaaaagcaggagcagaagctgctaattatccttttgcgactattgatcccaatgttggtatggtagaggttccagatgagcgtctgcaaaaattgacagaattgattacacctaaaaaaacagttccgacaacctttgaatttactgatattgcaggtatcgttaaaggtgcttctagaggggaaggtctaggaaataaatttttagctaatattcgtgaaatcgatgctattgttcatgtggtacgtgcttttgatgatgaaaatgtcatgcgtgaacaaggtcgtgaggatgctttcgttgatcctatagcagatattgacactattaatcttgaattaatcttagctgatttagagtcaatcaataaacgttatgcgcgtgttgaaaaaatggcacgaactcaaaaagataaagaatcagtagcagagtttaatgttttgcaaaagattaaacctgttttggaagatgggaaatcagctaggacaattgagtttacagaagatgaagcaaaagttgttaaaggtctctttttattaacaactaaacctgttttatatgtagctaatgtcgatgaagataaagttgctaatccagatggtattgattatgtcaaacaaattcgtgactttgcagctactgaaaatgctgaagtagttgttatctcagcgcgtgcagaagaagaaatttcagagcttgacgatgaggataaagaagaatttttggaagctatcggtcttactgaatcaggcgttgataaattaaccagagcagcttatcatctcttaggccttggaacctattttacagcaggtgaaaaagaggttcgtgcttggacgtttaagcgtggtataaaagctccacaagctgctggtattatccattcagattttgaaagaggttttattcgtgcagtaaccatgtcttatgatgatctaatgacctacggttcagaaaaagccgtcaaagaagctggacgcttgcgtgaagaaggaaaagaatatgttgtccaagatggggacatcatggaattcagatttaatgtgtaa

SEQ ID NO: 38120 - DNA, 3504 bp, Streptococcus pyogenes
atggatattttagaattatttagtcagaataagaaagtccaatcctggcactctggattaaccaccttaggaagacaactggtaatggggttatcgggttcaagtaaaacattggctatagcttccgcttatttagatgatcaaaaaaaaatagttgtggttacatcaactcaaaatgaggttgaaaaattagccagcgatttatctagtttacttgatgaagaacttgttttccaattttttgcagacgatgtggctgcagcggaatttatctttgcgtcaatggataaagctctatcaagaatagaaaccctgcaatttttaaggaatcctaaatctcagggcgttttaattgttagtttatcaggcttaagaattttattgccaaacccagatgtttttacaaagagtcagattcaactaacagttggagaagattatgatagtgatactcttactaaacaactgatgacaattggctatcagaaggtctcacaggttattagtccaggagaatttagccgtcgaggggatattttagatatctatgagattacacaagaattgccttatcgattggaattttttggcgatgatattgatagtattaggcaatttcatccagaaactcaaaaatcttttgaacaactagaaggtatttttattaatccagcaagtgatcttatttttgaggttagtgattttcaacgtggcattgagcaattagaaaaggctctacaaacagcacaagatgataaaaaatcttatttagaagatgtattagctgtttcaaaaaacggttttaaacataaggatatccgtaaatttcaatcattattttatgaaaaagagtggtcattattagattatattcctaagggaacgccaatcttttttgatgattttcaaaaactagttgataaaaatgcaagatttgatttagagattgctaatctcttgacagaagatttacagcaaggaaaggctctttccaatcttaactactttacagataattatcgagagcttaggcactataagccagcgaccttcttttcaaattttcataagggacttggaaatatcaaatttgatcagatgcatcagctaactcagtatgccatgcaggaattttttaatcaatttcctttgttgattgatgagattaaacggtatcaaaaaaatcaaacaacggttattgtacaggtagagtctcagtatgcttacgaacgacttgaaaaatcttttcaagattaccaatttcgccttcctttagtgagtgctaatcaaattgtttcacgtgaatcacaaattgtaattggagctatctccagtggtttttattttgctgatgaaaagttagcgttaatcacagagcatgaaatttatcataaaaagatcaaacgacgcgctagacgatctaatattagcaatgctgagcgtttgaaagattacaatgagttagcagtaggtgattacgtggttcataatgtccatggtatcggtcgctttcttggaattgaaacgattcagattcagggaatccatcgagattatgttactattcaatatcaaaattcagaccgtatttctcttccaattgaccaaattagtagcttatcaaagtacgtttctgctgatggaaaagaacctaaaattaataaactcaatgatggtcgttttcaaaagacaaagcaaaaggtcgctagacaagtagaggatattgctgatgaccttctaaaattatatgctgaaagaagtcagcaaaaaggattttcattttcaccagatgatgacttgcagcgcgcttttgatgatgattttgcttttgtagaaacagaagatcaacttaggtctataaaggaaattaaagctgatatggagagcatgcagcctatggatcgtcttttagtaggcgatgtaggatttggtaagacagaagtagctatgagggcagcctttaaagcggtgaatgatcacaaacaagtagctgtcttagttccaaccacagtcttggcccagcagcattatgaaaacttcaaagcacgctttgaaaattaccctgttgaggttgacgtcttaagtcgtttccgtagtaaaaaagagcaagctgaaacactagaacgtgtacgaaaaggtcaaattgacattattatcggaacccatcgactcctatcaaaagatgtggtcttttctgatttaggattgattgtgattgatgaggaacaacggtttggtgttaagcataaagaaactttaaaggaattaaaaactaaggttgacgtcttaaccttaacagctactccgattcctagaaccttacacatgtctatgttaggtatccgagatttatcggttattgagaccccaccaaccaatcgttatcctgttcaaacctatgttttggaaaataatccaggtctcgttagagaagctatcattcgtgaaatggatcgcggaggacaaattttttacgtttacaataaagttgacactattgaaaagaaagttgcagagctacaagaattagtcccagaagcttctataggttttgttcatgggcaaatgagtgaaattcaacttgaaaataccttgattgactttataaatggtgattatgatgtccttgtggctacaacaatcatcgaaacaggagttgacatttctaatgtaaacactttgtttattgagaatgctgatcatatgggattgtcaactttatatcaactacgagggcgcgtcggaagaagtaatcgtattgcttatgcttacctgatgtatcgtcctgataaggtcctaacagaggtttctgaaaagcgtttagaggctattaaaggctttactgaattaggttcaggcttcaagattgctatgcgagatttgtctatacgaggagcaggtaatattttaggggcttctcagagtggctttattgattcggtcggttttgaaatgtattctcagttattggaacaggctattgctagcaagcagggaaaaacgactgttcgtcaaaaaggcaatactgaaatcaatcttcagattgatgcctatttaccagatgattatattgcagatgagcgccaaaaaattgacatttacaagcgtattcgagaaattcaatcaagagaagattatctcaatttgcaagatgagcttatggatcgttttggagagtatcctgatcaagttgcctatttgttagagatagctctgctaaaacattatatggacaatgcctttgcggaattagttgaacgcaaaaataatcaggtcattgttcgatttgaagtaacttctttaacttatttcttgactcaggattatttcgaagccttatcgaaaacccatcttaaagctaaaattagtgaacatcaggggaaaatcgatatcgtctttgacgttcgccatcaaaaagattatagaattttagaagaattgatgttatttggagaaaggcttagtgagataaaaatcagaaaaaacaattcagtttttaaataa

SEQ ID NO: 38121 - DNA, 297 bp, Streptococcus pyogenes
atgaagaggattgtaggagaaattatgagactagataaatatctaaaggtatcgcgccttattaaacgtcgttcagtagcaaaagaagttgcggataagggacgaattaaagttaatgggatacttgctaaaagttcaacgaatataaaactaaatgatcacattgaaattagttttggaaataaattactgacagtaagagtcattgaaataaaagatagtacaaaaaaagaagatgctcttaagatgtatgagataatcagtgaaacaaggataacattaaatgaagaagcctag

SEQ ID NO: 38122 - DNA, 1287 bp, Streptococcus pyogenes
atgatgacctatcaagaaatttttaatgaaataaaaaataaagcctactttaaaaatcatagacatgtgttaatagccgtatctggtggagtagattcaatgaatttattgcactttttatacctgtttcaagacaaattgaaaattcgtattggtattgctcatgttaatcacaaacaaagatcagaatcagattcagaagaagcttatttaaagtgttgggctaaaaaacatgacatacctatttatgtttctaattttgaaggaatattttcagaaaaagcagcacgtgattggcgctatgctttttttaagagtattatgttaaaaaataactattcagctttagtaacagctcaccattcagatgatcaagcagaaactattttgatgaggctaattagaggaagccgattgaggcacttgtcgggtataaaaagcgtgcaaccatttgccaatggtcaacttataagaccttttttaactttctcaaaaaaggacttgccagaaatttttcattttgaagattcttcaaatagagaattatcatttttaagaaatagagttagaaataattatttaccactgttaaagcaggaaaatcctaggttcattcagggattaaatcaattagcacttgaaaatagcttactttttcaagcttttaaggagctaacaaatcatattactaccactgatttaacagaatttaatgagcaatctaagtcaattcaatactttttgttacaagattatttagaaggttttccagatttagatttaaaaaaatctcaatttactcaattattgcaaattatccaaactgctaaacaaggctattattatctcaaaaaagactattatatattcattgataaattctcttttaaaattacaaaaatcgttcctaagactgagttagttaaagaagaaaaaatgttagaatacgatagtaacttatgctacagagattattatttttcatttatgccaaaaagtaacgaagatcaaggacaggtaagtatacctttatttagtttatcgtctattaaattaagaagtcgccaatctggagattatatttcttttggtcacttttcaaaaaaaataagacgtttatttatagatgaaaaattcacaatagctgaacgtcaaaatgctattattggagagcaagatgagcagattatatttgtattgataggtaataaaacttatttgagaaaagcttgtaaacatgatataatgttggctaaactgtatattgataaattagaaaaagggtga

SEQ ID NO: 38123 - DNA, 1980 bp, Streptococcus pyogenes
atgaaaaataataaaaataatggttttgttaaaaattcttttatatatatattgatgattattgttgtcatcacaggatttcaattttatcttaagggaaccagcacacaaagccaacagattagttattccaaattaattaaacatcttaaggctggagatataaaatctttaagttatcagcctagcggtagtattattgaagttaaagggaaatatgagaaacctcaaaaagtgacagttaattcaggactatcatttttaggtggaagagcttcaacacaggtaacagagttctcatctttagtattacctagtgataccatcttgaaagaaatgacagcagcagctgataaaaatggaacagagcttacagttaagcaggaaagttcaagtggtacttggattaccttcttaatgagctttttacctattgttatttttgctgctttcatgatgatgatgatgaatcaaggtggtggaggagctcgtggtgctatgagtttcggcaaaaataaggcaaaatctcaatcaaaaggtaatgttaaagtgagatttacagacgttgctggtgccgaagaagaaaaacaagaattagtagaagttgttgattttttgaaaaatcctaaaaaatataaatcactaggagcacggattccagcgggagttcttctagaggggcctccaggtactggtaaaacattactagctaaagctgtagcaggtgaagctggagtgccatttttcagtatttcaggttcggattttgtcgaaatgtttgtcggtgtaggtgctagtcgtgttcgttctttatttgaggatgctaaaaaagctgagcgtgcgatcatctttatcgatgaaattgacgctgtaggtcgtcgtcgtggtgctggcatgggaggcggtaacgatgaacgagaacagacccttaaccaattactcattgaaatggatggttttgagggtaatgagaacattatcgttattgctgcaactaaccgtagtgatgttttagatccagctttactaagaccaggtcgttttgatcgtaaggttttagttggtcgccctgatgttaaaggacgtgaagccattttacgtgttcatgctaaaaataaaccacttgcaaatgacgttaatttgaaagtagtagcccaacagactccaggttttgtaggtgctgatcttgaaaatgttttaaatgaagctgcgttggttgctgctcgcagaaataaaattaaaattgatgctagtgatattgatgaagctgaagatcgtgttattgctggaccatcaaagaaagatcgcactatttcgcaaaaagagcgagaaatggttgcttatcacgaagctggtcatactattgttggtttagttttatctaatgcgcgtgtagttcacaaggtaactattgtacctcgtggacgagcaggtggttatatgatcgctcttccaaaagaagatcaaatgcttctttctaaagaagatctgaaagagcaattagcaggattgatgggtggtcgtgttgctgaagaaattgtttttaatgctcaaacatcaggtgcgtcaaatgactttgagcaagctactcagatagcaagggccatggttacggaatatggtatgagtgaaaagcttggaccagttcaatatgaaggtaaccatgcgatgatgccaggacagatctctcctgaaaaagcttactctgcccaaacagctcaaatgattgatgatgaggttcgtgaactcttaaatcaagctcgtaatcaagcagctgatatcatcaatgagaatcgagatactcataaattgattgctgaagctcttctcaaatatgaaactctagacgctgcacaaattaaatcaatttatgaaactggtaaaatgccagttgatttagaaactgatgataatgaagctcatgcgttatcttatgacgaaattaaaaataaaatgacagaatctgaatctgcagaatga

SEQ ID NO: 38124 - DNA, 1392 bp, Streptococcus pyogenes
atgactatttttcgtaaaaaaaagaaatattccaataaaacagaaatgcaaaggcacttcaaagttattgatttagtttttttaggcctaggttcaatggttggaacaggtatctttacagttactggcataggcgctgctaagtatgcaggtcctgctttaacaatatcgattatcatttccgcgattgctattggaattttagccttattttatgcagaatttgcgtctcgtatgccttctaacggtggtgcttatagttatgtttatgcaaccttgggagagtttccagcatggcttgttggctggtatattattatggaatttttaacagctatatctagtgttgctgttggctggggaagttatttaaaaggattacttgccaattataatatagtattaccaaacgctttaaatggcacgttcaatcttaagaatggaacttacatagatattcttcctgttttagtgatgtttttcgtgacagggattgtcctaatgaattcgaaattagccctgagattcaatagttttttagttattttaaaattttcagcactggctttatttatctttgtaggcattttttttattgatcacaataattggtctcattttgctccatatggtgtaggacaaattactggaggtaaaacaggtatctttgctggtgcttctgttatgttctttgcatttttaggatttgaatctatttcaatggcagttgatgaagtgaaagaaccacaaaaaacaatccctaaaggcatcattttatctttgattattgtaacagcactctatatagttgtcaccactattttaacgggaattgtacactacactaaattaaatgttccagacgcggtggcttttgctttaagaaatattagactttattgggcagctgactatgtgtcgatagttgctattttgactcttattacggtatgtatttctatgacctatgcattagctagaacaatttacagtattagtagagatggtttattacctaaatcactttatactctcactaaaaaaaataaagtgcctcaaaatgctactcttgtcactggactacttgctatgatttgtgcgggaatatttcctttatcgagtctagcagagtttgttaatatttgtactttagcatatttaattattctgtcgggtgcaattattaaactcagaagaatagaaggagaaccaaaagcaaatgaatttaaaactcctctagtaccattcctaccaatgttggcaattatcatttgtctatcatttatgagccaatataaagcttttacttggattgcttttgctattgccacaattattggaacattaatctacttagcttatggttatactcattcaatagaaaataaataa

SEQ ID NO: 38125 - DNA, 963 bp, Streptococcus pyogenes
atgtcttattctgatttaaaattgtttgctttatcgtcaaacaaggaattagcagaaaaagttgcgtctgcaatgggtattcaacttggaaagtctacggttcgccagttttcagatggtgaaatccaagtaaatattgaagaatcaattcgtggtcatcatgtctttattttgcaatcaactagctcacctgtcaatgataatttaatggaaattttgattatggtcgatgctttaaagcgtgctagtgctgaaaaaatttcagttgtgatgccttactacggctatgcacgccaagaccgtaaagcgcgttctcgtgaacctattacttcaaaattagttgctaatatgttagaagttgctggtgtagatcgcttattaacggttgatttacatgctgctcaaattcaagggttctttgatattccagttgatcacttgatgggtgcacctttaattgcagactattttgatcgtcatggtttagtgggtgaagatgttgtcgttgttagtcctgaccatggtggtgtgactcgtgcgcgtaaattagcacaattcctccaaacaccaattgcaattatcgataagcgtcgtagtgtggataagatgaacaccagtgaagtgatgaatattatcggaaatgtttcggggaagaaatgtatcttgattgacgatatgattgataccgcagggactatttgccatgcagcagatgcgcttgctgaagcgggggcaacagctgtgtatgcgtcatgtacgcatcccgttctttctggaccagcacttgataatattcaacgttcggctatcgaaaaactaattgttcttgatactatttatctgccaaaagaacgccttattgataaaattgaacaaatttcaattgctgatttggttgcagaagcgattattcgtattcatgaaaaacgtccgttgtcacctttatttgagatgggcaattaa

SEQ ID NO: 38126 - DNA, 3774 bp, Streptococcus pyogenes
atgtcctcctattttccagtcgctcccttgtcggacttggtatcttatatgaataaacgtatttttgttgagaaaaaggctgactttggtattaaatcggctagtcttgtgaaagagttgacgcataatctacaactgacctctttgaaggctttgcgtattgtgcaggtctatgatgtcttcaatttggctgaggatttgctggcgcgtgctgagaagcatattttctctgagcaggtgacagactgtcttttgacggaaactgaaatcactgcggagcttgataaggttgccttctttgccattgaggcgcttcctggtcaatttgaccaacgtgctgctagttcgcaagaagctttgctattatttggaagtgacagtcaggttaaggtcaatacagcccagctatacttggtcaataaggatattacagaagcagagcttgaagccgttaagaactatcttttgaaccctgttgattcgcgtttcaaggacattactttgccgcttgaagagcaggctttctctgtatctgataagacgatccctaatcttgatttctttgaaacttatcaagctgacgattttgcgacttataaggcagagcagggcttggctatggaggtcgatgaccttctcttcatccaaaattatttcaaatcaatcggatgtgtgccaactgagactgagttgaaagttttggatacttactggtcagaccactgccgtcacacaacctttgaaactgaattgaagaacattgatttttcagcttctaaattccaaaaacaattgcagacaacttatgacaaatatatcgccatgcgtgatgagcttggtcgttctgaaaagccacaaacacttatggatatggcgactatttttggtcgttatgagcgtgccaacggtcgtctggacgatatggaagtctcagatgaaatcaatgcctgctcagttgagattgaagtagatgttgatggtgtgaaagagccttggctcctcatgtttaagaacgagactcacaatcacccaacagaaattgagccattcggtggagcggcgacttgtatcggtggtgctattcgtgacccattgtcaggacgttcatacgtttatcaggctatgcgtatttcaggcgcaggcgatatcacgactccgattgcggaaacacgtgctggtaaattgccacaacaagttatttctaaaactgcggcgcacggctattcttcatatggtaaccaaattgggcttgcgacaacttatgtgcgcgagtacttccaccctggcttcgtagccaaacgtatggagcttggagctgtggttggtgctgcacctaaggaaaatgtggttcgtgaaaaaccagaagcaggcgatgtggtcatcttgctcggtggtaaaacaggtcgtgatggtgtcggtggtgcgacaggttcatctaaggttcaaacggttgaatctgtggaaacagctggcgcagaggtacaaaaagggaatgccattgaagaacgtaagattcaacgtcttttccgtgatggcaatgtcactcgtcttattaagaaatcaaatgacttcggtgcaggtggtgtctgtgttgccatcggtgaattggctgacggtcttgaaatcgatttggacaaggtgcctcttaaataccaaggtcttaatggtactgaaattgcaatctcagaatctcaagagcgtatgtcagtcgttgttcgtccaaatgatgtggatgccttcatcgcagcctgcaacaaggaaaatatcgatgcagtcgttgttgcgaccgttactgaaaaaccaaatcttgtcatgacttggaatggcgaaatcatcgttgatttggaacgccgtttccttgataccaatggtgtccgtgtcgttgttgatgctaaagtcgttgacaaggacttgacagttccagaagcacgcacaacatcagcagagacacttgaagcagatacgcttaaggtcttgtctgacctcaaccacgctagtcaaaaaggtcttcaaactatctttgactcatctgttggtcgttcaaccgttaaccacccaatcggtggtcgttaccaaatcacaccgacagaaagttctgttcaaaaattgccagttcaacatggtgtgacaacaactgcatctgttatggctcaaggttacaatccttatattgcagagtggtcaccttatcacggtgctgcctatgctgtcattgaagcgacagctcgcttggtagcaacgggtgctgactggtctcgtgcacgtttctcttaccaagagtactttgagcgtatggataaacaggcagagcgttttggtcagccagtatcagctcttcttggttctattgaggctcagattcaacttggtttgccatcaatcggcggtaaggactctatgtctggtactttcgaagacttgacagtaccaccaaccttggtagctttcggcgtgacaacagcggacagccgcaaggttctctctcctgagtttaaagcggctggcgaaaacatttactatatcccaggtcaagctatttcagaagatattgattttgaccttatcaaggataactttagccagtttgaagctattcaagctcaacataagattacagctgcctcagccgctaaatacggtggtgtcctagaaagtcttgctctcatgacttttggtaaccgtatcggtgcttctgttgaaattgcagagcttgacagcagcttgacagctcaactcggaggttttgtctttacatcagctgaggaaattgctgacgcggtgaaaatcggtcaaactcaggcagactttacagtcactgtcaatggaaatgaccttgctggcgctagccttctagcagccttcgaaggcaaattggaagaggtttacccaacagaatttgagcagacagatgttcttgaagaagttcctgctgtggtatcagatactgttatcaaggctaaggaaacaattgaaaaaccagtggtttacattccagtcttccctggtaccaactcagaatacgattcagctaaggcctttgaacaggttggagctagtgtcaacttggtaccatttgtaaccttgaatgaggttgctattgctgagtcagttgacactatggttgctaatattgctaaggcaaatatcatcttctttgctggaggtttctcagcagcggatgaaccagatgggtctgctaagtttatcgtcaatatcttgcttaacgagaaggtccgcgcagctattgacagcttcatcgaaaaaggtggccttatcatcggtatctgtaatggtttccaagcccttgttaaatcaggtcttcttccatacggaaacttcgaggaagctggtgagacaagtccaactctcttctataatgatgctaatcagcatgttgccaagatggttgagactcgtatcgcaaataccaactcaccttggttggcaggagttgaggtcggcgatattcatgccattccagtttcacatggtgaaggtaaacttgttgtcagcgcttctgaatttgcagagctaagagacaatggtcaaatctggagccaatatgtggactttgacggacaaccatctatggattctaaatacaatccaaacggctctgtcaatgccatcgaagggattaccagcaagaatggtcaaatcatcggtaagatgggacactcagaacgctgggaagacggactcttccaaaatatccctggtaacaaagaccaaatcctctttgcaagtgctgtaaaatactttacagggaagtaa

SEQ ID NO: 38127 - DNA, 1293 bp, Streptococcus pyogenes
atgctagaacgttattcacgccctgagatggcggcaatttggacagaggaaaataaataccatgcttggttggaggtcgagattttggctgacgaggcatgggctgagttgggtgagattcctaaggaggatgtggctaagattcgtgagaaggcggattttgacattgaccgcattcttgaaattgagcaggacacgcgtcacgatgtggtggctttcacgcgtgcggtttctgaaacgcttggtgaggagcgcaagtgggtgcactacggtttgacctcgactgacgtggtggacactgcctatggttacctctacaagcaagctaacgacattatccgtcgcgatcttgagaatttcaccaatatcgtggcagacaaggcgcgtgagcacaaaatgaccatcatgatgggtcgtacccacggtgttcacgccgagccaacgactttcggtcttaagttggcgacttggtacagcgagatgaaacgtaatattgagcgttttgaacatgctgccgcaggtgtggaagctggtaagatttcaggtgccgttggtaactttgccaacatcccaccttttgtggaagaatatgtctgtgacaaattaggcattcgtccgcaagaaatttcaacacaagttcttccacgtgaccttcacgcagaatattttgcagtgcttgcaagtattgcaacttctatcgaacgtatggcgacagagattcgaggtctgcaaaagtcagaacaacgtgaagttgaagaattctttgccaaaggtcagaaaggtagctctgctatgcctcacaaacgcaacccaatcggttcagagaacatgacagggctagcgcgcgtgattcgtggtcacatggtgacagcttatgagaacgtgtcactttggcatgagcgtgacatttcgcactcatcagctgagcgtatcatcacacctgacacaactatcttgattgactacatgctcaaccgctttggtaatatcgttaagaacttgactgtcttcccggaaaatatgatgcgcaatatggaatcaacttttggtttgatttatagtcaacgtgttatgctcaaattgattgaaaaaggaatgacacgagaagaagcttatgacttagttcaacctaagacagcttattcctgggacaatcaagtggatttcaaaccacttttagaagaagacaccaaagttacctcttgtcttacacaagaagaaattgatgaactatttaatccgatttattacacaaaacgtgttgatgatatttttaagcgtttagggatttaa

SEQ ID NO: 38128 - DNA, 1776 bp, Streptococcus pyogenes
atgagaataaaatggttttcgtttgttagggtaacaggacttttactggttttactctaccacttttttaaaaatgtatttccaggaggttttattggtgttgacattttcttcaccttttcaggatatctaatcacagccctcttgattgatgaatacacaaaaaaagagtctatcgatattatcggttttttaaaaagacgcttttatcgaattgttcctcctttggtgttaatgattttattgaccattccttttacgtttttaattaagaaggatttcattgctaatataggaagtcagattacagctgttttaggatttaccactaatatttatgaaatattgacgggaagtagttatgaaagccaatttattccacatctctttgttcatacgtggagcttagctattgaagttcatttttacttgttttggggtgtatttgtttggttattagctagacgcaaggagactcagaaacaactgagaggactactgtttttgatttctttgggaatatttgctattagtttcttgagcatgtttataagatcttttatgacctcaaatttttccctgatttatttttcgagtctttctcacagttttcccttctttttaggggcgatgtttgccacgataacaggtattaacgagactactgttcgatttcaaaaaaatgtacgtttatggccgcgccagtatgtccttgctgctatgattggagcatttacacttttgcttgtgctaacggtcacattggattttaaccatatcacgacctatctatttggctttgctttggctagcttattcgcatcaattatgatttatgcagcgcgtgttcttcatgagcaaacaccagatgtacaagagcctaaagctatcacttatatagctgatattagctatgggatttacctcttccattggccattttacattatttttagccaattaatgtctcatattttggcagttattctaacagttttcttttcaatcttgtttgccactgtgtcttactatattgtggaacctttggtccaagggagaaaaccaaacctgcttggtttagaaattgactgttctccttactataagtggattgtaggagggtctctcgccttagcattattaactttaggaacttgtatgatagcgcctaaagttggtaagtttgagaaacaattgttggtcagttccctacaacaggctcaaagtaatatggagcggacacatacactagctgcaggagacgctaatgctttgagtgacgtaggtattattggtgattctgtagcattacgctctagtgcagcattctcacaaattatgccacaagcgcaactggatgcagcggtcagtcggaattttaaagaagctttcgatttatttaataaccaaattaaatctaagagtctatctaagactgttgtcttagcagtaggtgttaactcgcttgacaactattctcaagcagttcagtcttttattgaggcattgccaaaaggtcatcgtttagttttggtttctccatataatgccaaaaatgccagtcaggttgcagaagctagagactatggtcttaaattgtccaaaaaatacaagtatgtcactattgcagactggtataaagttgctgttgaacatccagatatttggtatggcagtgatggtgttcattatagtgaagatagtcaaggagcagaactatatgtctccacaatccagactgctgttgagaagtcagctaaaaaaccagctaaataa

SEQ ID NO: 38129 - DNA, 1017 bp, Streptococcus pyogenes
atgaaagccgtagttgttaatcaagctagtacaggtgtcgaagttgttgagcatgatcttccaaatattggtcatggtgaagcgcttgttaaagtagaatactgtggcgtttgtcatactgatttacacgttgcacatggcgattttggtcaggtaccaggacgtattttggggcacgaaggtattggtatagtagaagaaattggagaaggcgtaacatccttaaaggttggtgatcgtgtctctattgcatggttctttgaaggatgtggtcattgcgaatactgtactacaggacgtgagacactttgtcgtagtgttaaaaatgctggatacagtgttgatggaggaatgagtgaatatgcagtagtaacagctgattatgcagttaaagttccagaaggtttagacccggctcaagcttcttccattacttgtgctggtgtaacaacttataaagctattaaagaggcaggtgctgctccaggccaatggattgttatctttggggctggtggccttggaaatctggctgttcaatacgctaaaaaagtctttaatgcacatgttgtcgcagtggacattaataatgataaacttgagttagctaaagaagttggcgcagatattttagttaacggcaaagaaattgaagatgttccaggctatattcaagaaaaaaccggtggagcacatggtgttgtggtaacggctgtttctaaagttgcttttaaccaagcaattgatagtgtccgtgccggtggaacagttgtagccgtaggtcttccatcagaatacatggaactgtctatcgtaaaaactgttttagatggtatcaaagtggtcggatcacttgtagggacacgtaaagacttggaagaagcctttgcctttggtgcagaaggtctggttgctccggttgtcgaaaaagttccagttgacactgctccagaagtctttgatgaaatggaacgtggtttaatccaagggcgcaaggtcttagatttcatcagctaa

SEQ ID NO: 38130 - DNA, 309 bp, Streptococcus pyogenes
atggcaaacaaaaaaatccgtatccgtttgaaagcgtacgaacaccgtacacttgatacagcggcagaaaaaatcgttgaaactgcaacacgtacaggtgctacagttgctggaccagttccacttccaactgaacgcagtctttacacaattattcgtgcgactcacaaatacaaagattctcgcgaacaatttgaaatgcgtacacacaaacgtttggtagacatcatcaatccaacacaaaaaactgttgatgctttgatgaaacttgatcttccaagtggtgtcaacgtagaaatcaaactttaa

SEQ ID NO: 38131 - DNA, 627 bp, Streptococcus pyogenes
atgacaaaaggaatcttagggaaaaaagtgggaatgactcaaattttcactgaatcaggcgaattcatccctgttactgtcattgaagcaactccaaacgttgtgcttcaagttaaaactgttgaaacagacggttatgaagcagttcaggttggttttgatgacaaacgtgaagtcttgagtaacaaacctgccaaaggccatgttgcaaaagcaaacacagctcctaagcgcttcattcgtgaattcaaaaacattgaaggcttagaagttggtgcagaattatctgtagaacaatttgaagctggtgatgttgttgacgtcacagggatatcaaaaggtaaaggtttccaaggtgttatcaaacgccatggtcaatcacgtggtcctatggctcacggttctcgttaccatcgtcgcccaggttctatgggacctgttgcgcctaaccgcgttttcaaaaacaaacgcttggcaggacgtatgggtggtaaccgtgtaacagttcaaaaccttgaaattgtacaagttatcccagaaaagaacgttatccttgttaaaggtaacgtaccaggtgctaagaaatctcttatcactatcaagtcagcagttaaagctgctaaataa

SEQ ID NO: 38132 - DNA, 624 bp, Streptococcus pyogenes
atggcaaacgtaaaactatttgaccaaactggtaaagaagttagctcagttgaattaaacgacgctatcttcggtatcgaaccaaacgaatcagttgtttttgatgttgtaattagccaacgcgctagccttcgccaaggtactcatgcggttaaaaaccgttcagcagtatcaggtggtggacgtaaaccatggcgtcaaaaaggaactggacgcgctcgtcaaggttctatccgctcaccacaatggcgtggtggtggtgttgtctttggaccaactccccgttcatacggatacaaacttccacaaaaagttcgtcgccttgcgttgaaatcagtttactcagcaaaagttgctgaagataaatttgtagctgtagaaggcctttcatttgcagcaccaaaaactgctgaatttgcaaaagtgctttcagctcttagcattgatacaaaagtacttgttcttgttgaagaaggaaatgaatttgcagcactttctgcacgtaaccttccaaacgtaactgttgcaactgcagcaactgcaagtgttcttgatatcgtgaacgcagacaaacttcttgttactaaagaagcaatctctacaattgaggaggttcttgcataa

SEQ ID NO: 38133 - DNA, 297 bp, Streptococcus pyogenes
atgaatttgtacgacgtaatcaaaaaaccagttatcactgagaagtcaatgattgctcttgaagcaggcaaatacactttcgaagttgatactcgtgcacacaaacttttgatcaaacaagctgttgaagctgcttttgacggagttaaagttgcaagtgtaaacactgttaacgttaaaccaaaagcaaaacgcgttggtcgttacacaggtttcacttcaaaaactaaaaaagctatcatcactcttacagctgattctaaagcaatcgagttgttcgcagctgaagctgaataa

SEQ ID NO: 38134 - DNA, 834 bp, Streptococcus pyogenes
gtgggtattaaagtttataaaccaacgacaaatggccgtcgtaacatgacttctttggatttcgcggaaatcacaacaagcacgcctgagaaatcattgcttgtttctcttaagagcaaagctggtcgtaacaacaatggtcgcatcacagttcgtcaccaaggtggtggacacaaacgtcattaccgtttgatcgacttcaaacgtaacaaagatggcgttgaagcagttgttaaaacaatcgaatacgatccaaaccgtactgcaaacatcgcacttgtacattacactgacggtgtgaaagcttacatcattgcacctaaaggtcttgaagtaggtcaacgtattgtttctggtccagatgcagatatcaaagttggtaacgcacttccattagcaaacattcctgtcggtacagttgttcacaatattgagttgaaacctggtaaaggtggagaacttgttcgtgcagctggagcttctgctcaagtacttggtcaagaaggtaaatacgttcttgttcgtcttcaatcaggcgaagttcgtatgattcttggtacatgccgtgcaactatcggtactgttggtaacgaacaacaatcacttgttaacattggtaaagcaggacgtagccgttggaaaggtatccgcccaacagttcgtggttctgtaatgaaccctaacgatcacccacacggtggtggtgaaggtaaagcaccagttggacgtaaagcgccatcaactccatggggtaaaccagcgcttggtcttaaaactcgtaacaagaaagctaaatcagacaaacttatcgttcgtcgtcgtaacgaaaaataa

SEQ ID NO: 38135 - DNA, 279 bp, Streptococcus pyogenes
atgggacgtagtcttaaaaaaggacctttcgtcgatgagcatttgatgaaaaaagttgaagctcaagcaaacgacgaaaagaaaaaagtaatcaaaacttggtcacgtcgttcaacgattttcccaagtttcatcggatatacaatcgcagtttatgacggacgtaaacatgtacctgtttacatccaagaagacatggtaggtcacaaacttggtgaatttgcaccaacgcgtacttacaaaggtcacgcagctgacgacaagaaaacacgtcgttaa

SEQ ID NO: 38136 - DNA, 345 bp, Streptococcus pyogenes
atggcagaaattacttcagctaaagcaatggctcgtacagtgcgtgtttcacctcgtaaaacacgtttagtacttgatcttatccgtggtaagaaagttgctgacgcaatcgcaatcttaaaattcactccaaacaaagcagctcgtgttattgagaaaactcttaactcagcaattgctaacgcagaaaacaactttggtttggaaaaagcaaacttggtagtatctgaaacattcgctaacgaaggaccaacaatgaaacgtttccgtccacgtgcgaaaggttcagcttcaccaatcaacaaacgtacaactcacgtaactgtagttgtatcagaaaaataa

SEQ ID NO: 38137 - DNA, 654 bp, Streptococcus pyogenes
gtgggtcaaaaagtacatccaattggtatgcgtgtcggaatcatccgtgactgggatgcgaaatggtatgctgaaaaagaatacgcggattaccttcatgaagatcttgcaatccgtaaattcattaataaagaattagctgacgcatcagtttcaactattgaaattgaacgtgcagtaaacaaagttattgtttcacttcacactgctaaaccaggtatggttatcggtaaaggtggcgcaaacgttgacgctcttcgtggtcaacttaacaaattaactggaaaacaagtacacatcaacatcatcgaaatcaaacaacctgatttagatgctcaccttgttggtgaaaacattgctcgtcaacttgagcaacgtgttgctttccgtcgtgctcaaaaacaagcaatccaacgtacaatgcgtgcaggagctaaagggattaaaactcaagtttctggtcgtttgaacggtgctgatatcgctcgtgctgaaggttattcagaaggaactgttccacttcacacgcttcgcgctgatatcgactatgcttgggaagaagctgacacaacttatggtaaacttggcgttaaagtttggatttaccgtggagaagttcttccagctcgtaaaaacactaaaggaggcaaataa

SEQ ID NO: 38138 - DNA, 414 bp, Streptococcus pyogenes
atgttagtacctaaacgtgttaaacaccgtcgcgaattccgtggaaaaatgcgcggtgaggctaaaggtggtaaagaagtttcattcggtgaatacggacttcaagccacaactagccactggattacaaaccgtcaaatcgaagctgcccgtattgcgatgactcgttacatgaaacgtggtggtaaagtttggattaaaatcttcccacacaaatcatacactgcaaaagctatcggtgtacgtatgggttctggtaaaggggcacctgaaggttgggtagcaccagttaaacgtggtaaagtgatgtttgaaattgctggtgtttctgaagaaattgctcgcgaagcattacgtcttgctagccacaaattaccagttaagtgcaaattcgtaaaacgtgaagcagaataa

SEQ ID NO: 38139 - DNA, 207 bp, Streptococcus pyogenes
atgaaacttcaagaaattaaagattttgttaaagagcttcgtggattgtctcaagaagaacttgctaagaaagaaaacgaactcaaaaaagaattgtttgatcttcgtttccaagctgcagcaggtcaacttgaaaagactgctcgccttgacgaagttaagaaacaaattgcacgtgttaaaactgtgcaatcagaaatgaaataa

SEQ ID NO: 38140 - DNA, 261 bp, Streptococcus pyogenes
atggaacgtaatcaacgtaaaactctttacggacgcgtagtgtctgacaagatggacaaaacaatcacagttgtagttgaaactaaacgtaaccacccagtctatggtaaacgtatcaactattctaaaaaatataaagcacatgacgaaaacaacgttgctaaagaaggcgatatcgttcgtatcatggaaactcgcccactttcagctacaaaacgtttccgtcttgtggaagtagtggaaaaagctgttattatctaa

SEQ ID NO: 38141 - DNA, 369 bp, Streptococcus pyogenes
atgattcaacaagaaactcgcttgaaagttgctgataatagcggtgctcgtgagatcttgactatcaaagtacttggtggttcaggacgtaaattcgctaacatcggtgacgtaatcgttgcttctgtaaaacaagctactcctggtggagcagttaaaaaaggtgatgtggttaaagctgttatcgttcgtacaaaaactggtgcacgccgtccagacggttcatacatcaaatttgacgacaatgctgctgtaatcatccgtgatgataaaactcctcgcggaactcgtatctttggcccagttgcacgcgaattgcgtgagggtggctacatgaagatcgtatcacttgcaccagaagtactttaa

SEQ ID NO: 38142 - DNA, 306 bp, Streptococcus pyogenes
atgtttgtaaaaaaaggcgacaaagttcgcgtaattgctggcaaggacaaaggcactgaagctgtagttcttaaagcacttccaaaagttaacaaagttattgttgaaggtgttggaatgattaaaaaacaccaaaaacctaacactgaaaatcctcaaggagctatcgtcgaaaaagaagcacctatccatgtctctaatgttcaagtattagataaaaatggtgtagctggacgtattggttataaagttgttgacggtaaaaaagtacgttacagcaaaaaatcaggcgaagtgcttgattaa

SEQ ID NO: 38143 - DNA, 543 bp, Streptococcus pyogenes
atggcaaatcgtttaaaagaaaaatatactaacgaagtaattcctgcgttgacagagaaattcaattacacatcagttatggctgtgccaaaagttgagaaaattgttctcaatatgggtgttggtgatgctgtatccaacgcaaaaaacctagagaaagctgcagctgaattagcacttatctcaggtcaaaaaccacttattactaaagctaagaaatcaatcgctggcttccgtcttcgtgaaggtgtagcgatcggtgcaaaagttaccctccgtggcgaacgtatgtacgaattcctagacaaattggttagcgtttcacttcctcgtgtacgtgacttccatggcgttccaacaaaatcgtttgatggacgcggaaactacactctcggtgtgaaagaacaacttatcttcccagaaatcagctttgatgatgttgataaagtacgtggtcttgatattgtaatcgtcactactgcaaatactgacgaagaatcacgtgaattgcttaagggccttggaatgccttttgcaaaataa

SEQ ID NO: 38144 - DNA, 186 bp, Streptococcus pyogenes
ttggctaaaaaatctatgattgctaagaacaaacgtcctgcaaaacactctacacaagcttatactcgctgtgaaaaatgtggacgtccacattcagtttaccgcaagtttaaactttgtcgtgtttgcttccgtgaattggcttacaaaggtcaaattccaggtgttgtcaaagcttcttggtaa

SEQ ID NO: 38145 - DNA, 399 bp, Streptococcus pyogenes
atggttatgactgacccaattgcagactttttaacacgtatccgtaatgctaatcaagtaaaacacgaagtgttagaagtacctgcttcaaacattaaaaaagggattgctgagattcttaaacgtgaaggttttgtaaaaaatgttgaagttatcgaagatgataaacaaggcatcattcgtgtgttcttaaaatacggaaaaaatggtgaacgtgttatcactaacttaaaacgtatttcaaaaccaggtcttcgcgtttacgcaaaacgtgatgacatgcctaaagttcttaacggacttggaattgcaatcatttcaacatcagaaggtcttttgactgacaaagaagctcgccaaaagaatgttggtggagaagtgatcgcttacgtttggtaa

SEQ ID NO: 38146 - DNA, 537 bp, Streptococcus pyogenes
atgtcacgtattggtaataaagtaattactatgcctgcaggcgttgaattaacaaataacaacaatgttattactgttaaaggccctaaaggcgaactcactcgtgagttcaacaaaaatattgaaatcaaagttgaagggactgaaatcacagttgtacgtcctaacgactcaaaagaaatgaaaacaatccatggtacaacccgtgctaacttgaataacatggttgtaggtgtttctgaaggtttcaaaaaagatcttgaaatgaagggtgtcggttaccgtgctcaacttcaaggtactaaacttgtcctttcagtaggtaaatctcaccaagacgaagttgaagctccagaaggaattactttcactgttgctaacccaacttcaatctcagttgaaggaatcaacaaagaagttgttggtcaaacagctgcttacatccgtagcttgcgttcaccagagccttacaaaggcaaagggatccgttacgttggtgaatacgtacgccttaaagaaggtaaaacaggtaaataa

SEQ ID NO: 38147 - DNA, 357 bp, Streptococcus pyogenes
gtgatttcgaaaccagataaaaacaaaatccgccaaaaacgccaccgtcgcgtccgcggtaaactctctggaactgctgatcgcccacgtttgaacgtattccgttctaatacaggcatctacgctcaagttattgatgacgtagcgggtgtaacgctcgcaagtgcatcaactcttgataaagacgtttctaaaggaacaaaaacagaacaagccgttgtagtcggcaaacttgttgctgaacgtgcagtggctaaaggtatttctgaagtggtgtttgaccgcggtggatatctctatcacggacgtgttaaagccttggctgatgcagctcgtgaaaacggattgaaattctaa

SEQ ID NO: 38148 - DNA, 495 bp, Streptococcus pyogenes
atggcatttaaagataatgcagttgaacttgaagaacgcgttgttgcgattaaccgcgttacaaaagttgttaaaggtggacgtcgtcttcgctttgcagctcttgtagttgttggtgatggaaatggtcgtgttggatttggtactggtaaagctcaagaagttccagaagctatccgtaaagcagttgaagctgctaagaaaaacatgatcgaagtaccaatggttggtacaacaatccctcacgaagtttacactaacttcggtggagctaaagtattattgaaaccagctgtagaaggttctggagttgctgctggtggtgcagttcgtgccgtcatcgaattagcaggtgttgctgatattacttcaaaatctcttggttcaaacactccaatcaacattgttcgtgcaactgttgaaggattgaaacaacttaaacgtgcagaagaagttgccgcacttcgtggcatctcagtttctgacttagcataa

SEQ ID NO: 38149 - DNA, 183 bp, Streptococcus pyogenes
atggctcaaattaaaattactttgactaagtctcctatcggacgtaagccagaacaacgtaaaactgttgttgctcttggacttggtaaattaaactcttcagtagtcaaagaagataatgctgctatccgtggtatggtgacagctatttctcacttggttaccgttgaagatgttaaataa

SEQ ID NO: 38150 - DNA, 441 bp, Streptococcus pyogenes
atgaaacttcatgaattaaaagctgctgaaggctcacgtaaagtacgtaaccgtgttggtcgtgggacatcatcaggtaatggtaaaacatctggtcgcggtcaaaaaggtcaaaaagctcgtagcggtggcggtgtacgtttaggttttgaaggtggacaaacaccattgttccgtcgtattccaaaacgtggctttacaaatattaatactaaagaatatgcacttgtgaatcttgatcaactgaatgtttttgatgatggtacagaagtgactccggctattttaaaagatgctggtattgtccgagctgaaaaatcaggcgttaaagtgcttggtaacggtgaattgactaaaaaattgactgtaaaagcagctaagttctcaaaatctgctgaagcagctattattgctaaaggtggttcaatcgaagtcatctaa

SEQ ID NO: 38151 - DNA, 1305 bp, Streptococcus pyogenes
atgttcttaaaaatactaaaagacgcgttaaagataaagactgtacggaataaaattttctttactatatttatcattcttgtattccgaattgggacacatattaccgtacctggtgtaaatgccaagagcttagagcaattaagtgaactccctttcttaaatatgttaaacttagttagtggtaatgcgatgagaaatttctcagtattttcaatgggggttagcccatatattactgcttctatcgttgttcagttattgcagatggatattttacctaagtttgttgagtggggcaaacaaggtgaggttggacgtcgtaaattaaatcaagcgacgcgctatatttcacttgttttggcttttgcccaatccattggtatcactgcagggtttaatactttgtcgaacgttgcacttgttaagacaccagacatcaaaacatatttactgatcggggcattactgacaacaggtagcgttattgttacctggcttggagaacaaatcacagataaaggatttggtaatggcgtatcaatgattatctttgcgggtattatttcgtctattccaagtgcaattgcaacaattcgtgaagactattttgtaaatgttaaggcaagtgatttacactcgtcttatctcattgttgggattttaatcatagctgttcttgctattgttttctttacaacatatgtccaacaagcggaatataaaattccaatccaatacacaaagctaatgcaaggtgcacctacaagttcatatcttccattaaaagtaaatccagccggcgttattcccgttatctttgctagctcgattacaactatcccaagtacgattattccttttgttcaaaatggtagagatttaccgtggttaaaccgtttgcaagaaatttttaattatcaaactccagtcggaatgatagtttacgccttgttgattatattgttctcattcttctatacctttgtacaagttaatcctgagaagacagcagaaaatcttcagaagaattcctcatatataccaagtgttcgccctggacgtgagacagaacaatttatgtccgcattgctaaaaaaactagcaaccgtaggagctatcttcttagcatttatctctttagcgccaatagcagcacaacaagctctcaacctttcttctagtattgctttaggtggaactagtttgctcattttgatttcaactggtatcgaaggtatgaaacagcttgagggatatcttctaaagagaaaatatgtcggatttatgaatacagcagaatag

SEQ ID NO: 38152 - DNA, 639 bp, Streptococcus pyogenes
atgaatcttttaatcatgggtttgccgggagctggtaaagggacccaagcagctaagattgttgaagaatttggtattgctcacatctcaacaggggatatgttccgcgccgcaatggctaatcaaaccgaaatgggacgtttagctaaaagttatattgataaaggtgaattggttcctgatgaagtcacaaacgggattgtaaaagagcgcttagctgaggatgatatcgcagaaaaaggttttttgcttgatgggtatccacgtactattgaacaagcacacgccttagatgcaacacttgaagaactaggactccgcttagatggtgttattaatattaaagtggatccatcatgtcttgtagagcgtttgagtggtcgtattatcaatcgtaaaactggtgaaacgttccataaagtgttcaacccaccagtagattataaagaagaagattactatcaacgtgaagatgataagcctgaaactgttaaacgtcgtttggacgtcaatatggctcaaggagaacctattcttgaacactatcgtaagcttggtcttgttacagatattgaaggtaatcaagaaataacagacgtttttgcagatgttgaaaaagcgttgctagaactcaaataa

SEQ ID NO: 38153 - DNA, 219 bp, Streptococcus pyogenes
gtggcaaaagaagacgtgattgaaattgaaggcaaagtagtagaaacgatgccaaatgcaatgtttactgttgaattggaaaatggacatcaaattctagcaactgtatcaggaaaaatccgcaaaaattacattcgtattttagtaggtgaccgtgttacagtagaaatgagtccttatgacttgacacgtggacgcatcacataccgctttaaataa

SEQ ID NO: 38154 - DNA, 117 bp, Streptococcus pyogenes
atgaaggtaagaccatcggttaaaccaatttgcgaatactgtaaagttattcgccgtaatggtcgtgttatggtaatttgtccgacaaatccaaaacacaaacaacgtcaaggataa

SEQ ID NO: 38155 - DNA, 366 bp, Streptococcus pyogenes
atggctcgtattgctggagttgatattccaaatgataaacgcgtagtaatttcacttacttatgtttacggaattggtcttgcaacatctaaaaaaatcttagcagctgcaggtatttctgaagatatccgtgttaaagatttaacatcagatcaagaagatgctatccgtcgtgaagtggatgcaatcaaagttgaaggtgaccttcgacgtgaagtaaacatgaacattaaacgtttgatggaaatcggttcataccgtggaatccgtcatcgtcgtggacttcctgtccgtggacaaaatactaaaaacaatgctcgcactcgtaaagggaaagctgttgcgattgcaggtaagaaaaaataa

SEQ ID NO: 38156 - DNA, 384 bp, Streptococcus pyogenes
ttggctaaaccaacacgtaaacgtcgtgtgaaaaaggacatcgaatctggtgttgcacacattcacgctacatttaataacactattgttatgattacagatgtgcatggtaatgctcttgcatggtcatcagctggtgctcttggtttcaaaggttctcgtaaatctactccatttgctgctcaaatggctgcagaagctgctgcaaaatctgcacaagaacacggactaaaaactgttgaagtgactgtaaaaggtcctggttcaggtcgtgaatcagctattcgtgctctagcagctgcaggtcttgaagtaactgcaattcgtgatgtgacccctgtgccacataatggtgctcgtcctccaaaacgtcgtcgtgtataa

SEQ ID NO: 38157 - DNA, 939 bp, Streptococcus pyogenes
atgattgagtttgaaaaaccaataataacaaaaattgatgaaaataaagattacggtagatttgtcatcgaaccacttgaacgtggctacggaacaactctaggtaattctcttcgtcgtgtactcttgtcttcacttccaggtgcagcagtaacatcaattaaaattgatggagtactacacgaatttgatacaatcccaggtgtacgtgaagatgtcatgcaaattatccttaatgttaagggacttgctgtgaaatcatacgtcgaagacgaaaagattatcgaacttgaagtagaaggaccagcagaggtaacagctggtgatattcttactgacagtgatatcgaacttgttaacccggatcattatctttttacaatcgctgaaggacattctctacgtgcaacaatgactgttgctaaaaaacgtggttatgtgccagcagaaggcaacaaaaaagatgatgcacctgtgggtacattggcagtagattcaatctatacgccagttaaaaaagttaattatcaagttgaacctgcccgtgtaggtagcaatgatggctttgataaattaacgattgaaatcatgacaaacggaacaattattcctgaagatgctttaggtctatctgctcgagttttgatcgaacacttaaacctgtttactgatttaacagaggttgcaaaagctaccgaagtaatgaaagaaactgaaaaagtgaacgatgaaaaggtacttgaccgcaccatcgaggagcttgatttatccgtacgctcatataactgtttaaaacgtgcaggcattaacactgtcttcgatttaacagaaaaatctgagcctgaaatgatgaaagtccgtaatcttggacgtaagagccttgaagaagttaaggttaaacttgctgacttaggtctcggactaaaaaacgataaataa

SEQ ID NO: 38158 - DNA, 1257 bp, Streptococcus pyogenes
atgaatatttttgaagaactcaaagctcgtggcttggtctttcaaacgactgatgaacaagcccttgtcaaagcattaacagaagggcaagtatcctattataccggttatgatccaaccgctgacagccttcatctgggccatctagtggctatcttaacatctcgtcgcttgcaactagcagggcacaaaccttacgctcttgtggggggtgccacaggtttaattggtgatccttcctttaaagatgcagagcgcagccttcaaaccaaagaaacagttttggagtggagtgacaagattaaagggcagttgtctactttccttgattttgaaaatggtgataataaagcagagcttgtcaacaactacgactggttctcgcaaatcagctttattgacttcctccgtgatgtcggtaaatacttcaccgttaactacatgatgagtaaagactctgttaaaaaacgcattgaaacaggcatttcttacactgagtttgcttaccaaatcatgcagggctacgacttctacgaactcaatgacaagcataatgtaaccttacaaattggcggctctgaccagtggggtaatatgacagctggtactgaattgctccgcaaaaaggctgataaaactgggcacgtcatgactgtaccactcatcactgactcaaccgggaaaaaattcggtaaatcagaaggtaatgctgtctggcttgatgccgataagacgtctccttacgagatgtaccaattctggttaaatgtcatggatgatgatgcagtgcgtttcttgaaaatcttcaccttcttatctctagatgagattgcagaaattgaaactcaatttaatgccgctcgtcacgagcgtctcgctcaaaaaaccttggcacgcgaagtggttaccttggttcatggcgaagaagcttataaacaagctcttaacattaccgagcagttatttgctggaaacatcaaaaatctttctgccaatgaattaaaacaaggattgagcaatgtaccaaattatcacgttcaatcaatagacaatcataatattgtcgagattttagtagctgctaagatttccccatcaaaacgccaggcgcgtgaagacgtgcaaaatggagcaatctacattaacggagaccgcgttcaagatttagattaccaattaagtaatgatgataaaattgatgatcaattaaccgttattcgccgcggtaagaaaaaatacgctgttctcacttactag

SEQ ID NO: 38159 - DNA, 3567 bp, Streptococcus pyogenes
ttggcaggacatgaagttcgatacggaaaacaccgtacacgtcgtagcttttcaagaatcaaagaagttcttgatttaccaaatttgattgaaattcaaactgactcattccaagatttcctcgattcaggtttgaaagaagtatttgaagatgtacttcctatttcaaactttacggatactatggaacttgaatttgttggttacgaatttaaagaacctaaatatacccttgaagaagctcgtatccacgatgcaagttattctgcaccaatctttgttaccttccgtttggtcaataaagaaactggtgagattaaaactcaagaagtcttctttggtgatttcccaatcatgacggaaatgggtacctttattatcaatggtggtgaacgtatcatcgtttctcagttggtgcgttctccaggtgtttatttcaacgataaagttgataaaaacggtaaagttggttacggatcaacagtgattcctaaccgtggggcttggttggaattagagactgactcaaaagacattgcctacactcgtattgaccgtacccgtaagattccattcacaaccttggttcgtgcccttggtttctcaggtgatgatgaaattgttgatatctttggtgaaagcgaccttgttcgtaataccattgaaaaagacattcacaaaaatccaagtgattctcgtacagacgaagcccttaaagaaatttacgagcgtcttcgtccaggtgagccaaaaactgcagatagctctcgtagtcttttgattgcgcgtttctttgatgcacgtcgttacgatttggctgcggttggtcgttacaaagtgaacaaaaaacttaatatcaagactcgtcttttgaaccaaatcattgctgaaaaccttgtggatgctgaaactggcgaaattttggtagaagctggaactgagatgactcgtagcgtcatcgaatccatcgaagaacaccttgacggtgatttgaacaagtttgtttacacaccaaatgattacgctgtggttactgaaccagttgtccttcaaaagttcaaggttgtgtcaccaattgatcctgatcgtgtagtaactattgttggtaatgccaatccagatgataaggttcgtgcattgacacctgctgatattttggcagaaatgtcttacttcttgaaccttgctgaaggtcttggaaaagttgacgatattgaccacttgggtaaccgtcgtatccgtgccgttggtgaattgcttgccaaccaattccgcatcggtcttgctcgtatggagcgtaacgtgcgtgagcgtatgtctgttcaagacaacgatgtgttaacaccacaacaaatcatcaatatccgtcctgtcacagcagctgtcaaagaattcttcggttcgtctcagttgtcacagttcatggaccaacacaacccattgtcagagttgtctcacaaacgtcgtttatctgccttaggacctggtggtttgacacgtgaccgtgctggttatgaggttcgtgacgtgcattacacgcactatggccgtatgtgtccgattgaaacacctgaaggaccaaacattggtttgattaataacttgtcttcatttggacatcttaataaatatggtttcatccaaacaccttaccgtaaggttgaccgtgcgactggtacggtaactaacgagattgtttggttgactgccgacgaagaagacgaatacacagttgcacaggccaattcgaaactaaacgaagatggcacttttgctgaagaaatcgttatgggtcgtcaccaaggtaataaccaagaattttctgcaagtgttgttgatttcgttgacgtttcccctaaacaggtagttgctgttgcgacggcatgtattcctttcttggaaaacgatgactccaaccgtgccctcatgggtgccaacatgcaacgtcaggctgtgccattgattgatccaaaagcaccatatgttggtactggtatggaatatcaagctgcccatgactcaggcgctgcggtgattgctcagcaaaatggtaaagttgtcttttctgatgctgaaaaagtggaaatccgtcgtcaagatggctcgcttgatgtttaccacattaccaaattccgtcgttcaaactcaggaacagcctataaccaacgcacccttgttaaagtaggagacattgttgaaaaaggtgatttcatcgctgatggaccttctatggaaaatggtgaaatggctcttggacaaaacccagtcgttgcttacatgacttgggaaggttataactttgaggatgccgttatcatgagtgagcgccttgtgaaagaagatgtctacacatctgttcacttggaagaattcgaatctgaaacgcgtgatacaaaacttggccctgaagaaatcactcgggaaatcccaaatgttggtgaagaagccctcaaagaccttgacgaaatgggcattatccgtatcggtgctgaggttaaagaaggcgacatcttagtaggtaaagtcacacctaaaggtgaaaaagacctttctgctgaagaacgtttacttcacgccatctttggggataaatcgcgtgaagtgcgtgatacctcacttcgtgtccctcacggtggtgatggtatcgttcgtgatgtgaaaatctttacacgcgctaacggcgatgaattgcaatcaggtgttaatatgcttgtgcgtgtttacatcgctcaaaaacgtaaaatcaaggtcggagataaaatggccggtcgtcacggaaacaagggtgtcgtttcacgtattgtaccagttgaagacatgccataccttccagacggaacaccagttgacatcatgttgaaccctcttggggtgccatcacggatgaatattggtcaggttatggaacttcaccttggtatggctgctcgtaatcttggtattcacattgcaacacctgtctttgacggggcttcatcagaagacctttgggacactgttcgtgaagctggtatggatagcgatgctaagacggtcctttatgatggtcgcaccggtgaaccatttgacaaccgtgtatccgttggtgtcatgtatatgatcaaacttcaccacatggttgatgataaacttcatgcccgttctgtaggaccatactcacttgttacccaacagccacttggtggtaaagctcaatttggtggacaacgttttggtgagatggaggtttgggcccttgaagcttatggtgcatcaaatgttcttcaagaaatcttgacctacaagtcagatgacgtcacaggacgtttgaaagcctatgaagcgattactaaaggtaaaccaattccaaaaccaggtgtaccagaatccttccgtgttcttgtaaaagaattgcaatcgcttggtcttgatatgcgtgtgcttgacgaggatgataatgaagtggaacttcgtgatcttgatgaaggtgaagacgatgacattatgcatgttgacgatctcgagaaggcacgtgaaaaacaagctcaagaaactcaagaagtttctgaaacaactgacgaaaaataa

SEQ ID NO: 38160 - DNA, 3642 bp, Streptococcus pyogenes
gtggttgacgtaaatcgttttaaaagtatgcaaatcacattagcctcaccaagtaaggtccgttcatggtcttatggtgaagttaaaaaacctgaaacaatcaactaccgtacattaaaaccagaacgtgaaggactctttgacgaagtcatctttggtccaacaaaagactgggaatgtgcgtgtggtaagtacaaacgtatccgttataaagggatcgtttgtgatcgctgtggggttgaggtaactcgtgctaaagtacgtcgtgaacgtatgggtcacattgagttaaaagctcctgtatcacatatctggtatttcaaagggattccatctcgtatgggattgactcttgatatgagtcctcgtgcccttgaagaagtgatctattttgcggcttatgtggtcattgatccaaaagatacaccgcttgaaccaaaatcattattaacagaacgtgaataccgtgaaaaactacaagagtatggtcatgggtcatttgtcgctaagatgggtgctgaagccattcaagatctcttgaaacgtgtggacttggcagctgaaatcgctgaattaaaagaagagttgaaatctgcttctggtcaaaaacggattaaagcagttcgtcgtttagacgtccttgatgcctttaacaaatctggaaataaaccagaatggatggttcttaacatcctgccggttattccaccagatcttcgtccgatggttcaattggatggtggtcgttttgcggcatcagacttgaatgacttgtaccgtcgtgtgattaaccgtaataaccgtttggcacgtttgttagaacttaatgcccctggcatcattgttcaaaatgaaaaacgaatgcttcaagaagccgttgatgctttgattgataatggtcgtcgtggtcgtccaatcactggaccaggaagtcgtccattgaaatcattgagccacatgcttaaaggtaaacaagggcgtttccgtcaaaacttgcttggtaaacgtgtagacttctctggacgttccgttatcgctgttggtccaacccttaaaatgtatcaatgtggtgtcccacgtgaaatggctatcgagctttttaaaccatttgtaatgcgcgaaattgttgccaaagaatatgctggtaacgttaaagccgctaaacgtatggttgaacgtggcgacgaacgcatctgggatatcttagaagaagttatcaaagaacacccagtcctacttaaccgcgcaccgactcttcacagacttggtattcaggcttttgaacccgttcttattgacggtaaggcacttcgtcttcacccacttgtgtgtgaggcctacaatgccgacttcgatggagaccaaatggccattcacgtgccactttcagaagaagcacaagctgaagctcgtcttttgatgcttgctgcagagcacatcttgaaccctaaagatggtaaaccagttgttactccatctcaggatatggttcttggtaactactatcttacgatggaagatgctggtcgcgaaggcgaaggtatgattttcaaggataaagacgaagctgtgatggcatatcgtaatggttatgctcatcttcatagtcgtgtgggtatcgctgttgacagcatgccaaacaaaccttggaaagacaatcaaagacataaaatcatggtgacaactgttggtaagattctctttaacgatatcatgccagaggaccttccttacctccaagagccaaacaatgccaacttgacagaaggaacacctgataaatacttccttgaacctggtcaagacatccaagaagtgattgatcgcttagacatcaatgtgccatttaagaagaaaaacctcggtaacatcattgcggaaaccttcaaacgtttccgtacaacagaaacatcagccttccttgaccgcttgaaagaccttggttactaccactcaacccttgctggtttgacagtgggtatcgctgacattcctgttattgataataaagctgaaatcattgatgctgctcaccatcgtgttgaagaaattaacaaagccttccgtcgtggtttgatgacagatgatgaccgttatgttgccgttacaacaacatggcgtgaagctaaagaagcccttgaaaaacgtctgattgaaacacaagatcctaagaacccaatcgttatgatgatggactcaggagctcgtggtaacatctcaaacttctcacagcttgctggtatgcgtggtttgatggctgctcctaacggacgcatcatggaacttcctatcttgtcaaacttccgtgaaggtttgagcgttttggaaatgttcttctcaacccacggtgcacgtaaagggatgaccgatacggcccttaaaacagccgactcaggttaccttactcgtcgtttggttgacgttgcccaagatgttatcattcgtgaggacgattgtggcactgatcgtggtcttcttatccgtgctattacagatggtaaagaagttaccgaaacgcttgaagagcgtcttcaaggtcgttacacacgtaaatcagtcaaacaccctgaaactggtgaagtcttgattggtgctgaccaattaatcactgaagacatggctcgtaagattgttgatgcaggtgttgaagaagtgaccattcgttctgtctttacctgtgcgactcgtcatggtgtctgccgtcactgttatggtatcaacttggcaactggtgatgctgttgaagtgggtgaagcagttggtactattgctgcccaatctatcggtgagcctggtactcagcttaccatgcgtaccttccacacgggtggtgtagcctcaaataccgatatcacccagggtcttcctcgtattcaagagatctttgaagcacgtaatcctaaaggggaagcggtcattactgaagtgaaagggaatgtcgtcgagattgaagaagatgcgtcaactcgtaccaagaaagtctacgttcaaggaaaaactggcatgggcgaatatgtcataccatttacagcacgtatgaaagttgaagttggcgacgaagttaatcgcggagctgcccttacagaagggtcaattcaaccgaaacgtctccttgaagtgcgtgataccttgtcagttgaaacgtaccttcttgcagaagtacaaaaagtttaccgtagccaaggggtagaaatcggagacaaacacgttgaggtaatggttcgccaaatgcttcgtaaagttcgtgtcatggatccaggtgatacagacctccttccaggtacacttatggatatttctgatttcacagatgctaacaaagatattgttatctctggtggtattcctgcgacatctcgtcctgttcttatgggtattactaaggcttcccttgaaaccaattccttcttatcagctgcatccttccaagaaacaactcgtgttcttacagatgctgctatccgtggtaaaaaagatcatcttcttggtcttaaagaaaatgttatcattggtaaaatcatcccagctggtactggtatggctcgttaccgtaacattgaaccacaagcgatgaatgagattgaagtgattgatcatacagaagtctcagcagaagccgtttttacagcagaagcagaataa

SEQ ID NO: 38161 - DNA, 954 bp, Streptococcus pyogenes
atgacttttgaaaaaattgaagaagcttatcagctgctcttagagaactgtcaactaattgaaaatgatctaaaaacacatatatacgatgccattgttgaacaaaactccttttatttaggggctgagggagctagtcctcaagttgctcaaaatagtgataaactgaaagccttgtgcctgacaaaagaagaatggcgtaaggcctaccagtttctttttattaaggcagctcagactgagcaactccaagccaaccatcagttcacaccagatgctattggcttcattctgctgtatcttttggaacaattgagtgataaagatagcttagaggtacttgagattggaagtggaacagggaacctagcccaaacccttctcaacaacacgagcaagagccttgattatgtagggattgaacttgatgatctcttgattgatctgtcagccagtattgctgagataatggattcttcagctcattttattcaagaagatgcggtaaggcctcaattactaaaagaaagtgacattgtcatcagtgacttaccagttggttattatcctaacgatgatattgccaaacggtacaaggtggctagttcagataagcatacctatgcccatcatttattaatggaacagtctttaaaatacttgaaaaaagacggttttgcgatttttctggcaccagtcaatttattgacgagccctcagagccagttgttgaaacagtggttaaaagattatgctcaggtggtgaccttgattacgctaccagattctatttttggtcatccctcaaatgccaagtccattattgtcttacaaaaacaaacagaccacccaatggaaacctttgtctatccaattcgggatttgaagcttgcagagaatattcatgattttatggaaaatttcaaaaaatggaaactgagtaatgtcaattaa

SEQ ID NO: 38162 - DNA, 978 bp, Streptococcus pyogenes
gtgataaagcttaattcttcctttaggattggtgatgtggaaatccctcaccgcactgtccttgctcccatggctggcgtgaccaattctgcctttcgtaccatcgccaaagaatttggtgctggtttggtggttatggaaatgatttccgaaaaagggcttctttacaacaatgaaaagacccttcacatgctccatattgatgaaaatgagcaccctatgtccattcaattatttggtggtgacgcagaagggttgaaacgtgcagctgatttcattcaaaccaataccaaggccgatattgttgatattaatatgggctgccctgttaataaagttgtcaaaaacgaggctggtgccaagtggctccgtgaccctgataagatttaccacattgtcaaggaagtcacgtctgttttagatattccactgactgtcaaaatgcgtacaggttgggcggatagttcacttgctgttgaaaatgcccttgccgctgagtcggcaggtgtatctgctcttgccatgcacggtcgtacccgtgaacaaatgtatacaggaacctgcgaccatgagacattagcccgagtttctaaggctatcactaagattccctttattggaaatggggacgtgcgttcggtgcaagacgccaaatttatgattgaagaaatcggtgtagatgccgtgatgattggccgcgcagccatgaacaatccttatctttttacccaaatcaatcatttctttgaaactggtcaagaattgccagatcttccctttgccaaaaaattagacatcgccaaagaccaccttaaacgcctgattaacctcaaaggtgaaaccattgctgttcgggaatttcggggcttagcaccacactatcttcgcggaacagcaggtgctgccaaagttcgtggtgctgtttcacgcgctgagactctagctgaggttgaagccatcttcgaaacagtacgctaa

SEQ ID NO: 38163 - DNA, 873 bp, Streptococcus pyogenes
atggataaaataattaaatcaatagcacaatcaggggcttttagggcttatgtccttgatagcactgagacggttgcattagctcaagaaaaacacaacacgctgtcatcgtctactgttgcgcttggccgtaccttgatcgccaaccagattttggcggctaatcaaaaaggcgatagtaaaatcaccgtcaaagtgattggtgattcttcttttggacacattatctctgtggcagataccaaaggacatgtgaaaggttacattcaaaatactggtgtcgatattaaaaagaccgcaacaggtgaagtccttgttgggccttttatggggaatggtcattttgtgacgattattgattatggcacaggtaacccttacacctcaacaacgcctcttattactggggaaattggtgaggattttgcctactacttaaccgaatcagagcaaacaccatctgcaatcggacttaatgtgcttttagatgaaaatgataaggttaaggttgctggtggctttatggtgcaggtgctaccaggcgcttctgaagaagagattgctcgctatgaaaaacgcctgcaagaaatgcctgccatttctcacctactagcttccaaaaatcatgtggatgcccttttggaggccatctatggagatgaaccttacaagcgtctttctgaagaacctctgagttttcagtgtgactgttctagagaacgttttgaagcagccctaatgactttgccaaaagcagatttacaggccatgattgacgaagataagggtgctgagattgtttgccaattttgtggtaccaagtaccaatttaatgaaagtgatttggaggccattatcagtgataaagcttaa

SEQ ID NO: 38164 - DNA, 714 bp, Streptococcus pyogenes
atgatagtaagactgattaagctccttgacaagttgataaacgtcattgttctttgtttcttctttctttgtttattgattgcggcacttggaatctacgatgctttaacagtttatcaaggagctaatgctactaactatcaacaatataagaaaaagggtgttcagtttgacgatttattagctattaattctgatgttatggcatggctgactgttaaaggaacgcatattgattatccaattgtacagggagagaataatttagaatatatcaacaaatcagtagaaggagagtactccttatcaggaagtgtttttctagattatcgtaataaagtaacttttgaagataaatactcattaatctatgcacatcatatggctggaaatgttatgtttggcgaattacctaactttaggaaaaaatcattttttaataaacacaaagaatttagtattgaaaccaaaacaaagcaaaaactgaaaatcaatatttttgcatgtatccaaacagatgcttttgacagtttactgtttaatccaattgatgttgatatttctagtaaaaatgaatttttaaaccatatcaagcaaaaatcggtacagtatcgtgaaatattgacaacaaatgaaagtcgttttgttgccttatcaacctgtgaggatatgacaacagatggtaggattatcgttattggacaaattgaataa

SEQ ID NO: 38165 - DNA, 1377 bp, Streptococcus pyogenes
atggatcgctatattgatggctttatgaaatggatgccagaatcgctttttatctgttttattttaacctttttagtcgttactatgtctgtgttgatgacggatagtccctttattggtacggaaaagacgggcgggattatctatggctgggtaaatggtttttgggggctgttgtcctttgccatgcagatgactattttacttgcgacagggaatgctgtagcgagttctccacctgctcataagatgtttaagtcccttgccaaactgcctcaaaccaggactcagatttttatcttttccattgtagtaggctctatctttggctttttacactggggtcttggtatgatggttgctattgtgtttgggaaagagttgcttgttcaggctaggcaaaaagggattaaggtgcatacgcctttgtttgttgctactttattttttacctttttaccagctacttctggtctatctggtgctgcggtgctttattcggctactccagattatttgcgaaatagtgtcgcagatgcttataaacaggttgttcctgaaagtgttcctctgacagaatcagttttgaatcttccatttatcagtcttttagtggtgtgtatgctggtaccgctttgctttgctttattggcgcacccaaaagatgaaactaaaatcatggaacttgatgatgagatctatcaccatagtcttgataccgcttcacatgttgttattgcaagaaacacacctgctgaaaagatgaacgcatctcgcttagtgatgtatcttgttggtggggccattgttagctatagcctttatcatttttcggtggtgggcttgtctggtctagatctcaattgttttaactttttatttttaggcttaggcttgcttctttgtggtcaacaaggaccagaatattatggttccttattcaaagatggggtcatgtcatcttggggcttggtgcttcagtttccattttacgctggtatttttggaatcattcaaagtacaggtttaggattagagatttcccatttctttgtcgctatttcaaatgggacaacatggccggtctttgcttatctttactcggctttgctgaatattgcggtaccatcaggaggctcaaaatttgtgattgaagctccctatatcgtccctgcaactatcgaagttggtaatgacttaggtaagattttgcaggcttatcaattaggagatgccacaacaaacttgatagttcctttttgggccttatcttacctctcaaacttcaaactaaaattcaatcaaattgtggcttatactattccttgtgtcttggtggtcacaggtattgccatcatttacctatttgtattttag

SEQ ID NO: 38166 - DNA, 1185 bp, Streptococcus pyogenes
atgactaaagaagtggtgatcacatctgcttatcgtaccccgataggaaattttggaggagtctttaaatctttatcagccgtagatttgggggtgacagttgttacaaaaattttagctgataccggtcttaaaagtgatgccattgatgaagtgatctttgggaatgtgttacatgcaggtctgggtcaaaatgttgcccggcaagtagcgctaaatgcggggctttcttatgatacccctgcttttacgattgatatggtctgtggttctggcttaaaagcagttgagttaggtgctcaaaagattcaaacgggcaacgctgatattgttttagttggtggtaccgaaaacatgagtcaagcaccttacgttttacaaggccaacgttggggatctcgtatgggagatagtaaagtagtagataccatgcttaaagatgggttgagtgatgcttttgcaggttatcacatgggtataacagccgaaaatattgtgcaacagtatggactgaccagagaagaacaagatgcctttgcagctgatagccaacgtaaagcccaacttgccatagaaaaaggtcgtttcaaagaagagattgcacctgtcactattcctcagcgtaaaggtgaacctttactcgttgatcaagatgaataccctaaatttggaacgacagtggataagttagcaaagttacgccctgcttttatcaaagatgaggggacagtaactgctggtaatgcttcaggaatcaatgatggagcagcggcaattttattgatgagtaaagaaaaagctgaagaattagggctccctattttagctaaaatcactagttatgcaagtgcaggtgtagacccaagtattatgggctgcggaccaatacctgctacgaaaaaggctcttgcaaaggctcagctgacaattgatgacattgatttgattgaagcaaacgaagcttttgctgctcaggctttagcggtttcacgagaccttggttttgacaatgaaaaagttaatgtcaatggaggagctattgctttgggtcacccgattggagcatcaggtgctcgtattttagtcaccttattagcagaaatggctaagcgtgatgtgagacatggcttagcaacgctttgtattggtggtggccaaggtcaaagtatcatcgtaacaagatag

SEQ ID NO: 38167 - DNA, 1293 bp, Streptococcus pyogenes
atgacatctgtagttgttgttggtacccagtggggtgacgaaggtaaaggtaaaatcactgatttcttgtcagcggatgcagaagtaattgcacgctatcaaggtggtgataatgctggtcatacgatcgtgattgatggtaagaagtttaaacttcacttgatcccatcaggaattttcttcccgcaaaaaatttccgttattggtaatggcgttgtggtcaaccccaaatctttggtcaaagagttggcgtacctgcatgatgaaggagtgacgacagataaccttcgcatttcagaccgagctcatgtcattttaccttatcatatccagctggatcaactgcaagaagatgcaaaaggtgacaataaaatcggaacaactattaaagggattggtccagcttatatggataaagctgctcgagttggtatccgtatcgcagatttactggataaggatatctttgcagagcgcctacgcattaatttagctgagaaaaaccgtttatttgaaaaaatgtatgacagtacacctcttgattttgatgctatttttgaagaatactatgcttacggtcaagaaatcaagcaatatgtgacagatacttctgtaattttaaatgatgcacttgatgccggtaaacgtgttctttttgaaggtgcacaaggggttatgcttgatattgaccaaggaacgtacccatttgtaacgtcttcaaacccagttgctggtggtgtaaccattggttctggtgttggcccaaataaaatcaacaaagtagttggtgtctgtaaagcctacacaagccgtgtcggtgatgggccattccctacagaactctttgatgaagtgggtgagcgcattcgtgaagtgggtcatgagtacgggacaacgaccggccgtccacgtcgtgtcggttggtttgattcggttgtcatgcgccacagtcgtcgtgtatcaggtattactaacctctctctgaattcaattgatgttctttcagggcttgatacggttaagatttgtgtggcttatgaccttgatgggaaacgtattgactattacccagcaaaccttgaacaactcaaacgttgcaaaccaatctatgaagaattaccaggctggcaagaggacatcacaggtgttcgtagccttgatgagcttcctgaaaatgcccgcaactacgttcgtcgtgttggagaattggttggcgttcgcatttcaaccttctcagttggtccagggcgtgaacagaccaatattcttgagtcagtctgggcatctatctaa

SEQ ID NO: 38168 - DNA, 540 bp, Streptococcus pyogenes
atgctagattcatttgataagggctggttcgtcctccaaacttactcaggctacgaaaacaaagtaaaagaaaacctcttgcaacgtgcccaaacctataacatgttggacaatattttgcgcgtcgaaattccgacacaaacggttaacgttgaaaaaaatgggcaaaccaaagaaatcgaagaaaatcgctttccagggtatgtcttggttgaaatggtcatgacagatgaagcttggtttgttgtgcgtaacacaccaaacgttacaggttttgtgggatcacacgggaaccgatcaaaaccaacaccacttcttgaagaagaaatccgtgctatcttgttgtctatgggtcaaaccattgatgtctttgataccaatatcaaagaaggcgatgtggttcagatcatagacggtgcctttatgggacaagaaggccgtgtggtagaaatcgaaaacaacaaagtgaaactgatgctcaacatgtttggctctgaaacagtagcagaagttgaactttatcaaattgcagaactatag

SEQ ID NO: 38169 - DNA, 2502 bp, Streptococcus pyogenes
atgacattttacgatcacaccgctattgaacccaaatggcaagccttttgggcagataatcatacttttaaaacaggaacagacgcatcaaaacctaagttttatgccctagatatgttcccatacccatctggagctggtctccacgttggtcacccagaaggctatacagcaactgatattctcagccgtttcaaacgtgcccaaggtcacaatattctccacccaatgggttgggatgcctttggacttcctgctgagcagtacgctatggatactggtaatgacccagccgagtttacagctgaaaacatcgctaacttcaaacgccagattaatgctcttggtttctcatacgactgggatcgtgaagttaacacaactgaccctaactactacaagtggacacagtggatctttaccaagctttatgaaaaaggcctagcctacgaagctgaagttcccgttaactgggttgaagaattgggaacagctatcgctaacgaagaggttctccctgatgggacatcagaacgtggcggctacccagttgtcagaaaacccatgcgccaatggatgctcaaaatcactgcctatgcagagcgcttgctagaagacttggaagaagttgactggccagaatcaatcaaggacatgcaacgcaactggattggtaaatcaactggtgctaatgtaaccttcaaggttaaggatacagataaggacttcactgtctttacaacacgtcctgacacgctttttggtgcaacttacgccgttcttgctcctgagcatgccttggttgatgctattacaacagctgaccaagcagaagccgttgccaaatacaaacgtcaagcaagtctcaaatcagaccttgctcgtacagatcttgccaaagaaaaaactggtgtgtggacaggtgcctatgcgattaacccagttaatggtaacgaaatgccagtttggattgcggactatgtccttgccagctacggtactggtgctatcatggctgttccagcccacgatgaacgtgactgggaattcgcaaaacaatttaagctagacatcatccctgttcttgaaggtggtaatgttgaagaggctgcctttacagaagacggtcttcacatcaactcaggcttcctagatggtcttgacaaagcgtcagctattgccaaaatggtcgaatggcttgaagcagaaggcgtcggtaatgagaaagtcacttaccgtcttcgtgactggctctttagccgtcaacgttattggggtgagccaatcccaatcatccactgggaagatgggacctcaacagcggttcctgagagtgagttgccactggttcttccagtaacgaaggatatccgtccttcaggtactggtgagagcccacttgctaacgtgacagactggttggaagtgactcgtgaagatggtgtgaaaggtcgtcgtgagactaacaccatgccacaatgggcaggttcaagctggtattatcttcgttacatcgatccacacaacactgaaaaactggctgacgaggaactcctcaaacaatggttgccagttgatatctatgtcggtggtgcagagcatgccgtgcttcaccttctctacgctcgcttctggcacaaggttctttacgatctcggtgttgtacctaccaaagagccattccaaaaactctttaaccaagggatgattttggggacaagctaccgcgatagccgtggtgctcttgtggcaactgacaaggttgaaaaacgtgatggtagcttcttccatgtggaaactggggaagagcttgaacaagcaccagctaagatgtctaaatcacttaagaacgttgtcaacccagatgatgttgttgagcagtacggtgctgacactcttcgtgtttacgagatgttcatgggaccacttgacgcttccatcgcctggtctgaagaaggtcttgaaggctcacgtaagttcttggaccgtgtttaccgtttgatcacaactaaagagatcactgaggaaaatagcggagcccttgacaaggtttacaacgaaaccgttaaggccgttactgagcaagttgaccaaatgaaattcaacacagctatcgctcaactcatggtatttgtcaatgcagccaacaaggaagacaaactctttagcgactatgccaaaggctttgttcaattgattgcaccatttgcaccgcacttaggtgaggaactctggcaagccttgacagcctcaggtgagtcaatctcttacgtgccatggccaagttatgatgaaagcaaattggttgaaaacgatgtggaaatcgttgtccaaatcaaaggtaaggtcaaagctaaacttgtagttgctaaagacctttcacgcgaagaattacaagaagttgctcttgctaacgaaaaagtccaagccgaaatcgcaggcaaagacatcatcaaagtcatcgcagtaccaaacaaactcgttaatattgttatcaaatag

SEQ ID NO: 38170 - DNA, 705 bp, Streptococcus pyogenes
atggcgaaaaacttgcaagaaatgcgtgaacgtgtctgtgcggctaacaagtctctaccacaacacggtcttgtcaaatttacgtggggcaatgtctctgaagtttgtcgtgaattaggacgtattgtcatcaagccttctggggtggactacgacctcttgacaccagaaaatatggttgttacagaccttgatgggaatgtggtcgaaggtgatttgaacccttcttcagatctgccaacccatgtggaactttataaagcttggccagaagtgggcggtattgtccacactcactccacagaagctgttggttgggcacaggcaggtcgtgatattccgttttatgggactacgcatgctgactacttctatggaccagttccgtgtgctcgttctctcacaaaagcagaagttgatggggcttacgagcaagaaactggcaacgtgattttggaagaatttagcaagcgaggcttagatcctatggcggttccaggaatcgtggttcgcaatcatggcccatttacgtgggggaaaaccccagagcaagccgtttaccactcggttgtcttagaagaagtggctaggatgaatcgcttgacagaacaaatcaatccacgcgtagagccagcgccaagatacattatggataagcattatttgcgtaaacatggcccaaatgcttattacggtcaaaaatga

SEQ ID NO: 38171 - DNA, 2643 bp, Streptococcus pyogenes
atggaaaacaagaataaattactattaattgatgggtcatctgttgcctttcgtgccttttttgccctctacaatcaaattgaccgctttaaaaaccatagcggtcttcataccaatgccatttatggctttcatttgatgctagaccacatgatgaagcgagtccagcccacacacgtgctggtggcttttgatgcgggcaaaaccaccttccggacagaaatgtatgccgattataaggcgggtcgcgctaaaaccccagaggaatttcgtgagcagtttccttatattcgtgagatgttgacagcccttgggattgcttattatgagttggaacactacgaagcagacgatattatcgggacgcttgataaaatggcggagcgcacagaagtgccttttgatgtgaccattgtcagtggtgataaagatttgatccagttaactgacgaaaataccgtggttgaaatttctaaaaaaggggtagccgaatttgaagaattcacaccggcttacctcatggaaaaaatgggattgacgccaaaccagtttattgacctcaaagccttgatgggagataaatcggataatattccaggagtgaccaaaatcggtgaaaaaactgggctcaagctccttcatgaatttggtagtttagaaggtatctacgagcatattgatggattcaagacctcaaaaatgaaagaaaacttgattaatgatcgtgaccaagctttcctatctaaaacgctcgccactatcaatacagcatctcctatcacaattggcttagatgatattgtctacaatggtccagatgttgctagtctctctcaattttacgatgagatggattttgtgcaactcaagaaaggtcttgctagccagatgcctcaagagccagtagctgtcatttcctatcaagaagtgaccaatgtgtctgctgatttgtttagcgcagaagacatcttctactttgaaacgcttcgggacaattaccatcgtgaggccatcattggttttgcttggggacatggtgagcagatttacgcatccacagaccttggcctattagcgacggatagttttaagcaggtcttccaaaaacccattgccacttatgattttaaacgtagcaaggtcttgttgagccacttaggaattgagttggtagcacctagctatgatgctagattagctaattaccttctgtcaactgtagaagacaatgagcttagcaccattgcccgcatttttactgacatctctttggaagaagacgatacagtctatggtaaaggtgctaaacgggctgttcctgataaagacgtcttactagaacacttagctcgtaaggtcaaagtattattagatagcaagtctcaaatgctagacaagctcactgcccatgagcaactagacctctatcagaatattgaattgcctttggctaatgtccttgctaaaatggaaattgaagggatcaaggttaatagggcgactttgcaagatatggcagagcaaaacaaggtcattattgaagcgctcacccaagagatttatgatatggctggccaagaatttaatatcaattcgcctaaacagttaggcagtatcttgtttgagaagatgcaactacctcttgagatgactaagaagaccaaaacaggttattctacagctgttaatgttttggaacgtttggcaccgattgctccaattgtggctaaaattttggattaccgccagattaccaaattacagtctacttatgtgattggtttacaggattatattctggctgatggcaagattcatacccgctatgtgcaggatctcacgcagacagggcgtttgtctagtgtggaccctaatcttcaaaacattcccattcgtttggaacaggggcgtttgattcgtaaggcctttaccccatctcatgaagatgccgtcttgttgagttcagattactcacagattgaattgcgggtactggcacatatttcaggggatgagcatttgattgctgcctttaatgaaggggcagacattcatacctcaacggctatgcgtgtgtttgggattgacagggcagcagatgttactgccaatgaccgccgtaatgccaaggctgttaactttggaattgtgtatgggatttctgattttggtttgtcaaataaccttggtatcacccgtaaacaggccaagtcttacattgatacctattttgaacgctatcctgggattaaagcctatatggaaaatgtggtgcgtgaggctaaagacaagggctatgtagagaccctctttaagcgtcgtcgtgaattaccggatatcaactctcgtaatttcaacgttcgctcttttgcggagcgtacagccatcaactcgcccattcaaggaagcgcagctgatattctcaaaatcgctatgattaatctggataaggccttgcaagcaggtggttttagagctaaaatgctgcttcaagtgcatgatgaaatcgttttggaagtgccaaatgatgagttgactgctataaaaaaacttgtcaaagacaccatggaagctgctgttgatttagctgttcctttatgtgtcgatgaaagtactgggcatagctggtacgaagccaaataa

SEQ ID NO: 38172 - DNA, 807 bp, Streptococcus pyogenes
atgctacttgaaatccttgatttatcacgctccacctattactatcaagtgaagcgactagctcaaggagataaggatatagaactaaagcatgtgattcgagagatttatgatgagcataaaggtaattacggttatcgtcggattcatatggagttgcgtaaccgaggatttgtggtcaatcataagaaagttcaacgtctcatgaaagtcatgggcttagcagcccgcattcgtcggaagcgcaagtattcttcttacaaaggagaggttggtaagaaggctgataatctgattaaacgtcacttcgaaggctctaaaccttacgaaaaatgttacactgatgtgacggagttggccttacctgaaggaaaactctacttatcacctgttcttgatggctataacagtgagattattgatttcactctatctcggtctcctaacttgaaacaggttcaaaccatgcttgagaagacttttccagcagattcatacagcggaactattcttcatagtgaccaggggtggcaataccaacaccagtcctaccatgattttttagagtctaaaggtattctggcatccatgtcccgcaaagggaatagtccggataacggcatgatggaatccttctttggcattctcaaatctgaaatgttttatggactcgagacaacttatcaatcacttgacaagcttgaagaagctattacagattacattttttactacaacaacaaacgaattaaagcaaaactaaaaggatttagtcctgtccaatacagaactaaatcctttcaataa

SEQ ID NO: 38173 - DNA, 516 bp, Streptococcus pyogenes
atgaaatttaatcaagaaacgaaagttaagatttatgagttacggcaaatgggagagtccattaaatccatatcaaaaaagtttgatatggcagaatccgatctcaaatatatgattcgcttgattgataggtatggggtaaccattgttcaaaaatgtaagaatcattattattctccagaactgaagcaagagataataaataaagtcctgattgacggccaatctcagaaacaaacatccttagattatgctttaccaacttctagtatgctctcaaggtggatagcgcaatacaagaaaaacggttatactattcttgaaaaaccaagagggagaccgagtaagatggggcgtaaacgtaagaaaaatttggaagagatgacagaggttgaacgtcttcagaaggaattagaataccctagagcggagaatgctgtgctaaaaaagctgagagaataccgcttgagggacgaagcaaaactcaaagagcaacagaaatcattcaagcattaa

SEQ ID NO: 38174 - DNA, 1143 bp, Streptococcus pyogenes
atgacagattatccgattaagtatcgccttatcaaagcagaaaagcacaccggtgcacgcttgggcgaaattatcacccctcacgggacctttccgacaccaatgtttatgccagtgggaactcaggctactgttaaaacacagtctccagaagagttaaaagcaattggatcagggattattttatcaaacacttatcacctctggttgcgtccaggagatgagttgattgctcgctctggtggtctgcacaagtttatgaactgggatcagccaatcttaaccgattcgggtggttttcaagtttactctttagccgattcacgaaacatcactgaagaaggagtgactttcaaaaatcacttgaatggctcaaaaatgtttctatcacccgaaaaagccatttccattcagaataaccttggctcagacatcatgatgagttttgacgagtgcccgcaattttaccaaccttatgattacgtgaaaaaatccattgaacgtactagccgttgggcagaacgtggcttgaaagcccatcgtcgtcctcatgaccaaggattatttggaattgtgcaaggagctggatttgaggaccttcgtcgtcagtctgcggcagatttggtggctatggatttcccaggttattctattggtggtttagctgttggggagagccatgaagaaatgaatgccgtccttgactttacgactcccctcttaccagaaaataaacctcgttacctgatgggagtgggagcaccagatagcttgattgatggtgtgattcgtggtgtcgatatgtttgactgtgtcttgccaacgcgtatcgcccgtaacggaacttgtatgactagtgaggggcgtcttgtgattaaaaatgccaaattcgctgaagattttaccccacttgatcatgactgtgactgctacacttgtcaaaactatagccgtgcctacattcgtcacttgctaaaagcggacgaaacttttggtattcgtttgacaagctaccacaacctttatttcttggttaacttgatgaaaaaagtacgtcaggctattatggacgataacttacttgaattccgccaagattttcttgaacggtatggttataataaatcaaaccgtaatttctaa

SEQ ID NO: 38175 - DNA, 312 bp, Streptococcus pyogenes
atgacggactgttttggaattgaccttgaccaagagtatcggtgcctacattatcataccccgcttgatattgttgggctcaaatgtgcttcttgtcagacttattatgcttgttaccattgccatgaccagttaacagatcatgcctttgtgccaacaggacatcaagaaacatctcctgttatttgtgggcattgtcgaaagctcttgagtcgagctgagtatggttgtggatgctgtccttattgtcaaagtccctttaatccagcctgtcataggcacaaggatatctattttttaaaggagtcgtaa

SEQ ID NO: 38176 - DNA, 1350 bp, Streptococcus pyogenes
atgtcacatattacatttgattattcaaaagtcctcgagtcatttgcgggacaacatgaaattgattttttacaaggccaagtaacagaagctgacaagttattgcgtgaaggaactggaccaggttcagatttcttgggctggcttgatcttccagaaaactatgataaagatgaatttgcacgtatcttgactgctgctgaaaagattaaggcagacagcgaagttcttgtggtgatcggtatcggtgggtcataccttggtgccaaagcagcgattgattttttaaatcatcattttgctaacttgcaaactgccaaagagcgcaaagccccacaaattctttacgctggaaactctatttcatctacttaccttgccgatttagttgaatacgttcaagacaaagagttctcagtaaacgtgatctctaaatcaggtacaaccactgaaccagctattgcctttcgcgtgttcaaagaacttttggttaaaaaatatggccaagaagaagctaacaaacgtatctacgctaccacagacaaagttaagggtgctgttaaggtagaagctgacgctaacaactgggaaacatttgtggtgccagataatgttggtggtcgtttctcagtcttgactgctgttggtttgcttccaattgctgcatcaggtgcagatattactgctcttatggaaggggcaaatgctgctcgtaaagacctttcttcagacaaaatctctgaaaacattgcttaccaatacgctgctgttcgtaatgtgctttaccgtaaaggctacatcactgaaatcttggctaactacgagccatctcttcagtactttggcgaatggtggaaacaattagctggtgaatcagaaggaaaagatcaaaaagggatttacccaacttcagctaacttctcaacagaccttcactcacttggtcaatttatccaagaaggttaccgtaatctctttgaaacagttattcgtgttgataatcctcgtaaaaatgttatcattcctgaattagcagaagacctagatggacttggttaccttcaaggtaaagacgttgatttcgttaacaagaaagctacagatggtgtgcttcttgcccacacagatggcggcgtgccaaacatgtttgtcactcttccagctcaagacgagtttacccttggttacactatttacttctttgagcttgccatcgctgtttcaggctacatgaatgctgttaacccatttgatcaaccaggtgttgaagcttacaaacgtaacatgtttgcgcttcttggaaaaccaggttttgaagcattatcagcagagcttaatgctcgcctctaa

SEQ ID NO: 38177 - DNA, 900 bp, Streptococcus pyogenes
atgaccaaagtcagaaaagctattattcccgcagcaggtttaggcacacgttttttacctgcaaccaaggcccttgccaaggagatgctacctattgttgataaaccaactattcaatttatcgttgaagaagctctaaaatcaggtatcgaagaaattcttatcgttactggaaaatccaaacgctccatagaagatcattttgattctaattttgaattagaatataatttacaggctaaaggaaaaatcgaacttctaaagttagtagacgagaccacttctattaatcttcactttattcgacagagtcatccaagaggattaggagacgcagttcttcaagcaaagacctttgttggcaatgaaccttttgttgtcatgctaggtgatgatctgatggatattacaaatccaaatgtaaaaccattaaccaaacaattgatcgatgactatgaagaaactcatgctgcaactattgccgtcatgagggttcctcacgaggatgtctctaactacggtatcattgctcctcaagcaaaagcagtaaaaggactctatagtgtggatacttttgttgaaaaaccacaacctcaagatgcacctagtgatttggcaattattggacgttacttgctcacaccagaaatttttagtattttagaaaaacaagaacctggtgcaggcaatgaagttcaactgactgatgctattgataccctcaataagacacagcgtgtctttgctcgtgagtttaaagggaaacgctatgatgttggcgataaatttgggtttatgaaaacttctttggattatgccctgaaacaccctcaagtcaaagatgacttgaaagcctacatcatccaactgggcaaagcactagagaagacaaaaccataa

SEQ ID NO: 38178 - DNA, 1017 bp, Streptococcus pyogenes
atgacaaaacaaaaagtagctattttaggacctggttcttggggaactgccctttctcaggttcttaatgacaatggccatgacgtccgtttatggggaaatattcctgatcaaattgaagagataaataccaagcataccaatagacactacttcaaagacattgtgttagacaaaaacattacggcaactcttgatttaggtcaagccctatcagatgttgatgcggtgctttttgttgtgccaactaaagtaacacgattagttgctagacaagttgccgccattttagatcataaagtagtggtcatgcatgcctcaaaaggtctagaaccagagacccacgaacgtttatcaactatcctagaagaagaaattccagctcattttcgtagtgaagtggtcgttgtatcaggtcctagtcatgctgaagaaactatcgttcgcgatattactctcatcacggcagcctcaaaagatattgaagctgcaaagtatgttcagtccctctttagtaaccactacttccgactttataccaataccgacgtcatcggagttgaaacagctggtgccctcaaaaacattattgctgttggagcaggagctctccatggacttgggtatggagataatgccaaagcagcggtaattactcgtgggttagctgaaatcacccgtctaggcgtcaagcttggtgctgacccgttaacctacagtgggttatctggtgttggtgatctaattgtaacaggtacttctgtccattcacgtaactggcgggctggagctgcccttggacgtggtgaaaaattagaagatattgaacgcaacatgggtatggttatcgaaggtatcgcaacaactaaggtagcctatgaaattgcccaagacctcggagtttacatgccaattacaacagctatttataagtccatctacgagggcgctgatatcaaagaaagcatcctcggcatgatgtcaaatgaatttcgttctgaaaatgaatggcattaa

SEQ ID NO: 38179 - DNA, 1707 bp, Streptococcus pyogenes
atgcttaaagacgcaatcttacgttataaatggtatgctttaggctcattttttatggttattggggttgttgcaagtagtctcttgcaaccacattatcttaaatctgtgctaagcgctgttattcaaaataatcaagagaaaatttatgaggttgggaaaccattacttattattgcccttttagggttaatgtctggagcgattaatacggttttagctgctaaaatagctcaaggtgtatctgctgatatgagggagaagacctttcgaaaaatccaagacttttcatatgccaatattgaagcttttaatgctggtaatcttgtggttaggctaactaatgatatcaatcaaatccaaagtttagtcatgatgatgtttcaaattctctttcgtttgccgatcctttttattggcgcgtttattatggcagttcagacattccctcaattatggtgggtcattgttgtaatggttatcttaattgccctcatcatgggtttggtgatgcgtcaaatgggtcctcgttttggtaaatttcaacggttaatggataagattaatcgcatcgctaaggaaaatctccgtggcgttcgcgtggttaaatcatttgtacaagaacaacaacaatacactaaatttaaagaaacgtccaatgatcttttggcgttaaatttatctattggttatggtttttcactaatgcagccggctttaatgttggtgtcttatttggcagtttatgtttctataaatgttgtttcgaccatggtcgaaacagatccaacagtgattgggaatattgcctctttcatgacttatatgatgcaaattatgttttcaattattgtggttggttccatggggatgcaagttagtcgtgcttttgtttctatggctagaattaggcaaatattgtctacagaacctgccatgacatttgaaaatgaaaaggaagaaaccatctcaggaagcattgtatttgacgatgttagttttacatatcctaatgatgatgagccaaccttgaagcacatttcttttgctattgaacctgggcaaatggtcggcatcgttggtgcaacaggatctgggaaatcaacgcttgcacagctcatccctcgcttatttgatcctcaagatggccaaattttgttaggaggaaagccgattaaaaccctaagtcaaacaaccctgcgccaatcggtttccatcgtgttgcaaaaggctattctcttttcaggaacgatagctgataaccttcgccaaggctcagcaaaagctgatattgatgctatgcaaaaagccgctcaaatcgcgcaagcaaaagaatttattgatcgtatggatagccgttatgagagccaagttgaagagcgaggtagtaacttgtctggcggacaaaagcaacgtctgtctattgcacgtggtgtcattaatcatcccaaaattcttatattagacgattccacttcagctcttgatgcaaaatctgaaaaacgcgttcaagaagccttaagtcataaattagaaggtacaactacagttattgttgctcaaaaaatttcatcggtagttaaggcagataagatcttagtccttgaccaaggacagttaattggagaaggaacacacgcagagttggtggctaataatgcgatttatcgtgaaatttatgagacacaaaaaggaagggaggagtag

SEQ ID NO: 38180 - DNA, 1362 bp, Streptococcus pyogenes
atggcaaagaaaaaagcaacctttatctgtcaggagtgtggctaccagtcgccaaagtatttagggcgctgtccaaattgctcggcctggtcttcttttgtggaagaagtagaggtcaaagaagtcaaaaatgcccgtgttagtctagctggagaaaagtccagaccggttaaactaaaagatgtggataatattagttatcacagaacacagactgacatgtctgaatttaatagagttcttggagggggtgtggttcctggaagcttgattttaattggtggtgatccaggtattggaaaatccaccttactcttgcaggtatccacgcagctcgctaataagggaacggttctctatgtgtctggggaagaatcagcagagcagattaaactgcggagtgagcgtctgggtgatattgacaatgaattttacctctatgccgaaaccaatatgcaagctattcgcacagaaattgaaaatattaaaccagattttttaattattgactccattcagaccatcatgagccctgatattacaggtgttcaaggatcagtcagtcaggtgagagaagtcactgcagaattgatgcagcttgcaaagacgaacaacattgcaacctttattgtgggtcatgtcaccaaggaaggaaccttggctgggcctcgtatgttagaacatatggtggataccgttctctactttgaaggggaaaggcatcacacctttcgcattctgcgggctgtgaaaaaccgctttggctccactaacgagattggcatttttgaaatgcagtctggcggcttggtagaggtcttaaatcctagtcaagtctttttagaggaacgcttagatggggcaacaggatcggctgtcgttgtaacgatggaaggaagtcgtcctatcttagcagaggtgcaatctttagtgacaccaaccgtttttggcaatgccagacgaaccactacgggacttgatttcaatcgcgtaagcctaataatggcagttttagaaaagcgctgtggtttactcttacaaaatcaagatgcctacctcaagtcggctggtggtgtcaaactagacgaacctgccattgatttggcagtcgctgtggctatcgcatccagttataaggaaaaaccaaccagccctcaagaagctttcttaggcgagatcgggttaacaggtgagattcggcgagtgacccgtattgagcaacggattaatgaagcagcaaagcttggctttaccaaggtctatgctcctaaaaatgccttgcaaggcattgatatccctcaaggtattgaggttgtcggagtgactacggttggtcaggttttaaatgcagtttttagctag

SEQ ID NO: 38181 - DNA, 1446 bp, Streptococcus pyogenes
atgtctaaaccaattcgtgtgcgttatgcaccaagtccaacagggcttttacatatcgggaatgcccgcacagccctatttaattacctttatgcccgtcgtcacggaggtacttttatcattcgtattgaagatactgaccgtaaacgtcatgttgaagatggtgaacgttctcaacttgaaaacctaaaatggttaggaatggattgggatgaaagcccagaaacgcatgaaaattaccgccagtctgaacgtctagcactttatcaacaatatattgatcaattgttagctgaaggaaaagcctacaagtcttacgtgactgaggaagaattggcagcagagcgtgaacgccaagaagcagctggcgaaacgcctcgctatatcaatgaatttattggtatgtcagctgacgaaaaagctaagtacattgctgagcgtgaagcagcaggtatcgttccaacagtccgtcttgctgttaatgagtccggtatttacaaatggactgacatggttaaaggcgatatcgagtttgaaggtggtaacatcggtggtgactgggttattcaaaagaaagatggctatccaacttataactttgccgttgttgttgatgatcatgatatgcaaatttctcacgttatccgtggcgatgaccatattgccaatacgccaaaacaattgatggtctatgaagctcttggctgggaagcgccagagtttggtcatatgactcttatcatcaattctgaaacgggtaaaaaattatcaaaacgcgacaccaataccctccaattcattgaagattaccgcaaaaaaggttatatgcctgaagctgtctttaacttcatcgcccttcttggctggaatcctggcggagaagaggaaatcttctctcgtgagcaactgattgccctttttgatgaaaatcgccttagcaagtcgccagctgcctttgaccagaagaaaatggattggatgagcaatgagtatcttaaacatgcggattttgaaacagtttatgccctctgcaaaccattccttgaagaggcaggccgtttgacagaaaaagctgagaagctagtagaattatacaaacctcaattaaaatctgcagatgagattattccattgactgaccttttcttttctgatttccctgaattaacagaagccgaaaaagaagtgatggcaggtgaaacagtttcgacagtcttgcaagctttcaaggctaagttggaagctatgtcagatgaagacttcaaaccagaaaatattttcccacaaattaaggctgttcaaaaagaaacaggaatcaaagggaaaaacctctttatgcctattcgtattgcagtatctggtgaaatgcatggcccagaattaccaaatacgatttatttattgggacgtgataaatccattgagcacatcaaaaacatgctataa

SEQ ID NO: 38182 - DNA, 360 bp, Streptococcus pyogenes
ttgaagaagacctatcgtgtcaagcgtgagaaagatttccaagccatatttaaggatggaaaaagtacagcaaatcgaaaatttgtcatttatcatttaaatagaggccaagaccacttccgtgtgggtatttctgtcggtaaaaaaataggaaatgcagtcaccagaaatgcagtcaaacgaaagatacgtcatgttatcatggcattagggcatcagctgaagtcagaggatttcgtggtgattgcccgtaagggtgtccactctttggagtatcaagagcttcaacaaaatttacatcatgttttaaagttagcacaattgcttgagaaaggttttgagagtgaagaaaaacattaa

SEQ ID NO: 38183 - DNA, 828 bp, Streptococcus pyogenes
ttgagaaaggttttgagagtgaagaaaaacattaaaattgcaagaatagtccccttagttctattattagtggcctgtggtcgtggtgaggtaacggcacaatcatctagtggttgggaccagttggtttacttatttgccagagcaattcaatggctttcctttgatggttcaattggtgttggcattattctttttacccttactatccgtctcatgctcatgcctttgtttaacatgcaaatcaaatcaagccagaagatgcaagacatccaacctgagcttagagaattgcaaaggaaatacgctggtaaagacacacaaacgcggatgaagttggctgaagaaagtcaagccctttacaaaaaatatggggttaacccttatgctagtctcttacccctcttaattcagatgccagttatgattgccttattccaagccttgacacgggtatctttcttaaaaacagggactttcttgtgggtggaattggcacaacatgatcatttgtaccttttaccagttttggcagctgtcttcactttcttgtccacttggttgaccaatctagcggctaaagaaaaaaatgtcatgatgactgttatgatttatgtgatgccgctaatgatctttttcatgggctttaacttggctagtggagtagtgctctattggacggtctccaatgcctttcaagtggtacaactactgttattaaacaatccttttaagattattgcggaaagacaacgtcttgccaatgaagaaaaagaacgccgtcttcgtgaacgtcgtgctcgtaaaaaagcaatgaagagaaaatag

SEQ ID NO: 38184 - DNA, 135 bp, Streptococcus pyogenes
gtgaaacgtacttatcaaccaagtaaaatccgtcgtcaacgtaaacacggattccgtcaccgtatgtcaactaaaaacggacgtcgcgtgcttgctgcacgtcgtcgtaaaggacgtaaagtattatcagcttaa

SEQ ID NO: 38185 - DNA, 939 bp, Streptococcus pyogenes
atgaagcattatttagcaattgatattggtggtactgctatcaagtatggcttgatttctgaaacaggagacctgttggaaaaagaggaaatggccactgaggcttataaaggtggtccctctattttggaaaaggtcaagggcttggtaaagacctatcaagaccaaatggatctggctggagtggccatttcttctgcaggaatggttaatcctgatgagggagaaatcttttatgccggccctcagattcctaactatgctggaactcagtttaaaaaagagattgaagagactttcgggttaccgtgtgaagtggaaaacgatgttaactgtgctggtctggccgaagctatttctggtagtgccaaggattatcctgtggctctttgcttgacaattgggacgggaatcggtggctgtttattgtttaattcccaagtttttcatggtagtagtcattcagcttgcgaagttggttaccttcatttgtcagatggtcagtttcaggatctggcatctaccacagctcttgttcaagaggtggtcttagcttatggcgatgacattagccaatgggatggtcgtcgtatttttgagcaggctaaagcgggtgatgcgatttgtatagcagccattagtaagcaggtggattacttaggacaaggtattgctaatatctgctacgttgttaacccaaatgtggtggtgcttggtggcggtatcatggcgcaaaaagactatttagctgataaattaaagacagctcttgatagctacttggtttctagtcttgccaagaaaactcagctgaagtttgctagtcatggaaataatgctggtatattaggagcttactaccattttaaacaaaagaatgagcgatcttgttcatttataactcttgagaaaatcgaaaataatttagcgagtagctaa

SEQ ID NO: 38186 - DNA, 831 bp, Streptococcus pyogenes
atgcctaaaaaccaccgcctaattaccaaaatcgaagcatcattggaacatatgaccagtttagaaaaagggattgctcatttttttattacaaccgatctgacacctcaagagttgaccgcatccgagatagttaagcgactacacatctctcaagccgccttgactcgatttgcaaaaaaatgtggttttactggttatcgtgcttttgcctttgattaccttcacagtcttcaagaatcacaagagactttccaatctattcacttagaattgacaaagcgcgtgctgatggactacgacgctcttattaataaaacctatgagctcgttaatgaggaaaaattactgaacttagccaagctgatcgattcttctgagcgagtctatttctttggcaaaggatcttctggactagtagcaagagaaatgaagctacgctttatgcgacttggtttaatctgtgatgcttattcagacactgatggttttacttgggcaaatagcctcgtcaatgaaaattgccttgtttttggtttttctttatctggcaaaacaaactctgtcatcacagcacttcatcaagctagtcagcgaggagccaaaactgtcctcttaacaacagataatcaaaccgaatttgacgactccttagatattattcccgtatcatcaactcaccaactacattatgggaatcgtgtgtcaccacaatttcctcttcttattatgatggacattatttatgcttacgttttagcgattgacaaaccgcacaaagaaaaaatcttcaaaaacactattattgacaaagaaaataacgacctttag

SEQ ID NO: 38187 - DNA, 825 bp, Streptococcus pyogenes
atgtggttaagatctttatgttataataacatcatgacaaataaagtagaaaaactaactatttttgatacccatacgcacctgaatgtagcagaatttcaaggacacgaaactgaagaattgactttggctcaagaaatgggcgtggcctaccataatgtggttggctttgaccaggccactattagtggggcactaactctagccaataaatatgccaatatttatgcaactattgggtggcatccaacagaagcaggttcttattcagaggctgttgaggaggctatcgtctctcaattatcacattccaaagtgattgccttaggtgaaattggcttagactattattggatggaggaccccaaagaggtgcaaatagaggtttttaagcgccaaatgcaattagcaaaagaccatgatttgccttttgtggtgcacacccgcgatgccttggaagatacctatgaggtcatcaaagcagctggtgttggccctcgtggaggcatcatgcattcttactcagggtcattagagatggctgaacgtttcattgaacttggcatgatgatttccttttcaggtgtggtcactttcaaaaaggctcttgatattcaagaggcagcgcagcacttgcctttggataagattttggtggaaacagatgccccttatcttacaccagttccaaaacgtggcaaacaaaatcatacagcttatacccgctatgtggttgataaaatcgcagagctacgggggatgactgtggaagaagttgcaaaagcaacgactgctaatgcaaagagggtattcaagcttgactga

SEQ ID NO: 38188 - DNA, 570 bp, Streptococcus pyogenes
ttgactgaaaaaattaatattcaagaggttcttgttgtagaaggcaaggacgacacggctaacctacgccgtttttacgaggtggatacctatgagactagaggctctgctatcactgaagaagatttagaacgaatcaatcgcctaaacgatttgcgtggtgttatcgttttaacagacccagattataatggtgagcgcattcgtaagctcattatggctgctgtgccaacagctcgtcatgcctttttaaaccgaaacgaggcggttccgagttctaagagtaagggtcgttccttaggggttgaacatgccaattttgaggatctccaaaaggcacttgctcatgtcactcagcaatatgatgatgagtcttattttgacattcgtcaaacagacctgattcgtctagggcttttaatggcgtcagatagccgtaaacgcagggaatacttgggtgaaaagctccgcatcggttatgccaacggcaaacaactgctcaagcgcctcgaattatttggcattaccctagcagaagtggaagaagtgatggagacatatgaggagtaa

SEQ ID NO: 38189 - DNA, 873 bp, Streptococcus pyogenes
atgagaattgcagattatagcgtgaccaaggctgtccttgatcgtcacggatttacctttaagaaatcttttggtcagaactttttgaccgataccaatattttacagaaaatcgttgacacggctgagattgatcagaatgtcaatgttatcgagattggtcctggaattggggctttgacggaatttttggcagaaaatgctgctgaagtgatggcttttgagattgatgaccgcttggtgccgattttggcagataccttgcgcgattttgataatgtgcaagtggtcaatcaagatattttaaaagctgatttgcagacccaaatcaagcagtttaaaaatcctgatttgcccattaaggtggtggctaatctaccttactacatcacaacgcctattctcatgcacttgattgagagcaaaattccattccaagagtttgtggtcatgatgcagcgtgaagtggcagatcgtatttctgcggagccaaacactaaagcttatggttccttgtccattgcggtgcagtattacatgactgccaaggttgccttcattgtgccgcgcaccgtctttgtacctgcaccaaatgtcgatagtgctatcctcaaaatggtgcgtcgcgaccagcctttgattgaggttaaggacgaagatttctttttcagagtgtctcgtctcagttttgtccatcgtcgcaagaccctgtggaataacttgactagccattttgggaagtctgaagacatcaaggctaaacttgaaaaaggtctggcactagcagatatcaagccttctattcgtggtgaggccttgtcgattcaagattttggcaaattagctgatgctttaaaagaagttggattataa

SEQ ID NO: 38190 - DNA, 939 bp, Streptococcus pyogenes
atgaaaattaatcaaatgaaaaaagaccagctttttgaagggttctacctcattaagtcggcagaggttcgtaagacaagagctggtaaagattttattagccttacctttcaggatgacactggcgagatttcaggaaatctgtgggatgcccaaccttataacgttgaagaatttactgctggtaaagtcgtgtttatgaaagggcgacgcgaggtgtataatggtacccctcaggttaatcaaatcaccttgcgaaatgttcgcccaggtgagcccaatgatccaaaggacttcaaagaaaaggcacctgtcagtgtgacagaagtacgtgactatttggaacagatgctctttaaaattgaaaatgcaacgtggcaacgaattgtaagggctctttatcgtaagtatgataaagaattttatacttatcctgcagctaaaacaaaccaccatgcttttgagtcaggcctcgcctaccatactgctacgatggtcagactagcagatagcattggagatatctaccctgacttaaataagagtctactgtttgcaggtattatgttacatgacttagctaaagtcatagaattaacaggaccagataatacagaatacaccgttcgtggtaacttgattgggcatatttctctcattaacgaagaaattacaaaagtaatttcagaactacaaatcgatgataccaaagaagaagtcattgtccttaggcacgtgattttaagccatcacgggcaattagaatacggtagtccggtacgtccacgcatcatggaagctgaaattattcatatgattgacaatattgatgctaatatgatgatgatgacaacagctcttagccgtgttagcgagggcgagatgaccaatcggatttttgccatggataatcggtctttttacaagccaaactattga

SEQ ID NO: 38191 - DNA, 2622 bp, Streptococcus pyogenes
atggacttagaacaaacgaagccaaaccaagttaagcagaaaattgctttaacctcaacaattgctttattgagtgccagtgtaggcgtatctcaccaagtcaaagcagatgatagagcctcaggagaaacgaaggcgagtaatactcacgacgatagtttaccaaaaccagaaacaattcaagaggcaaaggcaactattgatgcagttgaaaaaactctcagtcaacaaaaagcagaactgacagagcttgctaccgctctgacaaaaactactgctgaaatcaaccacttaaaagagcagcaagataatgaacaaaaagctttaacctctgcacaagaaatttacactaatactcttgcaagtagtgaggagacgctattagcccaaggagccgaacatcaaagagagttaacagctactgaaacagagcttcataatgctcaagcagatcaacattcaaaagagactgcattgtcagaacaaaaagctagcatttcagcagaaactactcgagctcaagatttagtggaacaagtcaaaacgtctgaacaaaatattgctaagctcaatgctatgattagcaatcctgatgctatcactaaagcagctcaaacggctaatgataatacaaaagcattaagctcagaattggagaaggctaaagctgacttagaaaatcaaaaagctaaagttaaaaagcaattgactgaagagttggcagctcagaaagctgctctagcagaaaaagaggcagaacttagtcgtcttaaatcctcagctccgtctactcaagatagcattgtgggtaataataccatgaaagcaccgcaaggctatcctcttgaagaacttaaaaaattagaagctagtggttatattggatcagctagttacaataattattacaaagagcatgcagatcaaattattgccaaagctagtccaggtaatcaattaaatcaataccaagatattccagcagatcgtaatcgctttgttgatcccgataatttgacaccagaagtgcaaaatgagctagcgcagtttgcagctcacatgattaatagtgtaagaagacaattaggtctaccaccagttactgttacagcaggatcacaagaatttgcaagattacttagtaccagctataagaaaactcatggtaatacaagaccatcatttgtctacggacagccaggggtatcagggcattatggtgttgggcctcatgataaaactattattgaagactctgccggagcgtcagggctcattcgaaatgatgataacatgtacgagaatatcggtgcttttaacgatgtgcatactgtgaatggtattaaacgtggtatttatgacagtatcaagtatatgctctttacagatcatttacacggaaatacatacggccatgctattaactttttacgtgtagataaacataaccctaatgcgcctgtttaccttggattttcaaccagcaatgtaggatctttgaatgaacactttgtaatgtttccagagtctaacattgctaaccatcaacgctttaataagacccctataaaagccgttggaagtacaaaagattatgcccaaagagtaggcactgtatctgatactattgcagcgatcaaaggaaaagtaagctcattagaaaatcgtttgtcggctattcatcaagaagctgatattatggcagcccaagctaaagtaagtcaacttcaaggtaaattagcaagcacacttaagcagtcagacagcttaaatctccaagtgagacaattaaatgatactaaaggttctttgagaacagaattactagcagctaaagcaaaacaagcacaactcgaagctactcgtgatcaatcattagctaagctagcatcgttgaaagccgcactgcaccagacagaagccttagcagagcaagccgcagccagagtgacagcactggtggctaaaaaagctcatttgcaatatctaagggactttaaattgaatcctaaccgccttcaagtgatacgtgagcgcattgataatactaagcaagatttggctaaaactacctcatctttgttaaatgcacaagaagctttagcagccttacaagctaaacaaagcagtctagaagctactattgctaccacagaacaccagttgactttgcttaaaaccttagctaacgaaaaggaatatcgccacttagacgaagatatagctactgtgcctgatttgcaagtagctccacctcttacgggcgtaaaaccgctatcatatagtaagatagatactactccgcttgttcaagaaatggttaaagaaacgaaacaactattagaagcttcagcaagattagctgctgaaaatacaagtcttgtagcagaagcgcttgttggccaaacctctgaaatggtagcaagtaatgccattgtgtctaaaatcacatcttcgattactcagccctcatctaagacatcttatggctcaggatcttctacaacgagcaatctcatttctgatgttgatgaaagtactcaaagagctcttaaagcaggagtcgtcatgttggcagctgtcggcctcacaggatttaggttccgtaaggaatctaagtga

SEQ ID NO: 38192 - DNA, 414 bp, Streptococcus pyogenes
atgcctacaattaaccagttggtacgtaaaccacgtaaatctaaaattgaaaaatcagattcaccagctttgaacattggttacaacagtcacaaaaaagttcaaactaaaatggctgccccacaaaaacgtggcgttgctactcgtgttggaacaatgacacctaaaaaacctaactcagcccttcgtaaattcgctcgtgtacgtttgagcaaccttatcgaagtaactgcctacatcccaggtatcggacacaacttgcaagagcacagcgttgttcttatccgtggcggacgtgtaaaagaccttccaggggtacgttaccatatcgttcgtggcgcacttgatactgcaggtgttgctgaccgtaaacaaggccgttctaaatacggtgcgaaacgtccaaaaggataa

SEQ ID NO: 38193 - DNA, 471 bp, Streptococcus pyogenes
atgagtcgtaaaaatcaagcgcctaaacgcgaagtattaccagatccattatataactcaaaaatcgtaacacgtcttatcaaccgtgttatgcttgacggtaaacgtggtacagctgctactatcgtttacgatgctttcaacgctatcaaagaagcaacaggaaatgacgctcttgaagtatttgaaacagctatggacaacatcatgcctgtacttgaagtacgcgcacgccgtgtcggtggttctaactaccaagtcccagttgaagttcgtccagaacgtcgtacaacacttggacttcgttggttggtaaacgcatcacgtgctcgtggtgaacacactatgaaagatcgtcttgctaaagaaatcatggatgctgcaaacaacacaggtgcatcagttaagaaacgtgaagacactcacaaaatggctgaagctaaccgtgcctttgctcacttccgttggtaa

SEQ ID NO: 38194 - DNA, 2079 bp, Streptococcus pyogenes
atggctcgcgaattttcacttgcaaaaactcgtaatatcggtatcatggctcacgtcgatgctggtaaaacaactacaacagagcgtatcctttactacactggtaaaattcataaaatcggtgaaacgcacgaaggcgcatcacaaatggactggatggagcaagagcaagaacgtggtatcactattacttctgccgctacaacagctcaatgggatggtcaccgcgttaacatcatcgacacaccaggacacgtggacttcaccatcgaagtacaacgttctctccgtgttcttgatggtgctgtaaccgttcttgactcacaatcgggtgttgagcctcaaactgaaacagtttggcgtcaagcaactgaatacggtgttccacgtatcgttttcgccaacaaaatggataaaatcggtgctgacttcctttactcagtacaaacccttcatgaccgtcttcaagcaaatgcacacccaatccaattgccaatcggtgcagaagatgatttccgtggtatcattgacttgatcaagatgaaagcagaaatctataccaacgaccttggtacagatattcttgaagaagatattccagaagaatacttagaacaagctcaagaataccgtgaaaaattaatcgaagcagttgctgaaactgatgaagacttgatgatgaaataccttgaaggtgaagaaatcactaacgacgaattgattgctggtatccgtaaagcaacaatcaacgttgaattcttcccagtactttgtggttctgccttcaaaaacaaaggtgttcaattgatgcttgatgcggttatcgcataccttccaagcccacttgacatccctgcaatcaaaggtgttaacccggatacagatgctgaagaagaacgtccagcatctgatgaagagccatttgcagctcttgccttcaagatcatgactgacccattcgtaggtcgtttgacattcttccgtgtttactcaggtgttcttaatagcggttcttacgttatgaacacatcaaaaggtaaacgtgagcgtatcggacgtatccttcaaatgcacgcaaacagccgtcaagaaattgaaacagtttacgctggtgacatcgctgccgctgttggtttgaaagacacaacaactggtgactcattgactgatgaaaaagcaaaagttattcttgagtcaatcgaagttccagaaccagttatccagttgatggttgagccaaaatctaaagcagaccaagacaagatgggtgttgcccttcaaaaacttgctgaagaagatccaacattccgtgttgaaacaaacgttgaaactggtgaaacagttatcgctggtatgggtgaacttcaccttgatgtccttgttgaccgtatgaaacgtgagttcaaagttgaagctaacgttggtgctcctcaagtatcttaccgtgaaacattccgtgcttctacacaagctcgtggattcttcaaacgccaatctggtggtaaaggtcaattcggtgatgtttggattgaatttacaccaaatgaagaaggtaaaggtttcgaattcgaaaatgctatcgttggtggtgtggttcctcgtgaatttatcccagctgttgaaaaagggttgatcgaatctatggcaaacggtgttcttgctggttacccaatggttgacgttaaagctaaactttacgatggttcataccacgatgtcgactcatctgaaactgccttcaagatcgcagcatctcttgctcttaaagaagcagctaaatcagcacaaccagctatccttgagccgatgatgcttgtaacgattacagctccagaagacaatcttggagacgttatgggacacgtgacagctcgtcgtggacgcgttgatggtatggaagcacatggtaacagccaaatcgttcgtgcttatgttccacttgctgaaatgttcggttatgcaacagttcttcgttctgctactcaaggacgtggtacattcatgatggtatttgaccactatgaagatgttcctaagtcagttcaagaagaaatcattaagaaaaacaaaggtgaataa

SEQ ID NO: 38195 - DNA, 1011 bp, Streptococcus pyogenes
atggtagttaaagttggtattaacggtttcggtcgtatcggacgtcttgcattccgccgtattcaaaacatcgaaggtgttgaagtaactcgtatcaatgaccttacagatccaaatatgcttgcacacttgttgaaatacgatacaactcaaggtcgttttgatggaacagttgaagttaaagaaggtggatttgaagtaaacggaaacttcatcaaagtttctgctgaacgtgatccagaaaacatcgactgggcaactgatggggttgaaatcgttcttgaagcaactggtttctttgctaaaaaagaagcagctgaaaaacacttacatgctaacggtgctaaaaaagttgttatcacagctcctggtggaaacgatgttaaaacagttgttttcaacactaaccacgacattcttgacggtactgaaacagttatctcaggtgcttcatgtactacaaactgtttagctcctatggctaaagctcttcacgatgcattcggtattcaaaaaggtcttatgactacaatccacgcttacactggtgaccaaatgatccttgacggaccacaccgtggtggtgaccttcgtcgtgcacgcgctggtgctgcaaatatcgttcctaactcaactggtgctgctaaagctatcggtcttgttatcccagaacttaacggtaaacttgacggtgctgcacaacgtgttcctgttccaactggatcagtaactgagttggttgtaactcttgacaaaaacgtttctgttgacgaaatcaacgctgctatgaaagctgcttcaaacgatagcttcggttacactgaagatccaatcgtttcttcagatatcgtaggcgtatcatacggttcattgtttgacgcaactcaaactaaagtaatggaagttgacggatcacaattggttaaagttgtatcatggtatgacaacgaaatgtcttacactgctcaacttgtacgtactcttgagtacttcgcaaaaattgctaaataa

SEQ ID NO: 38196 - DNA, 1569 bp, Streptococcus pyogenes
atgaaaaagctaatccttagctgtttggtcgccttggcccttctgtttggaggaatgagccgggctcaagcaaaccaatatttaagagtcggaatggaagcagcctatgctccttttaactggactcaagatgacgcttcaaacggggctgttccaattgaaggaactagccaatacgccaacggttacgatgtccaagtcgctaaaaaagtcgctaaagctatgaacaaagaacttttagtcgttaagacctcttggaccggtttaattccagcattaacttctggaaaaatcgatatgatcgctgctggtatgagtcctaccaaagagcgtagaaacgaaattagcttctcaaacagctcctacactagccaacctgttctagtcgtaactgccaatggcaaatatgctgatgcaacaagcctcaaggatttttctggagctaaagtaactgcccagcaaggcgtttggcatgtcaatctcttaactcaactaaaaggtgctaagttacaaacaccaatgggagatttctctcaaatgcgacaagcccttacttcgggtgttatcgatgcctatatttctgaacgacctgaagccatgactgctgaagctgctgatagccgtttgaaaatgatcactcttaaaaaagggtttgctgttgctgaatcagatgctgctatcgctgtcggaatgaaaaaaaatgacgatcgtatggcaactgtcaaccaagtgcttgaaggattttctcaaacagatcgtatggccctgatggatgatatggttaccaaacaacccgtggaaaagaaagccgaagatgctaaagcatcatttctaggccaaatgtgggctatttttaaaggtaactggaagcaattcttacgtggaactggaatgacccttctgatttccatggtcggaaccattacaggtctctttattggattattaatcggtattttccgtacagctcctaaagctaagcataaagtagctgccttgggacaaaaactctttggttggttactcactatttatatcgaaatcttccgtgggacacctatgattgttcaatctatggttatctactacggaacagcgcaagcctttggtatttcgatcgaccgtaccctagcggctatttttatcgtatctatcaatacgggggcctatatgagtgaaattgttcgcgggggtattttcgctgtcgacaaaggtcaattcaaagcagcaactgctcttggctttactcacggacaaaccatgcgtaaaatcgtgctaccacaagttgttcgcaacattttaccagcaacaggtaatgagtttgtcatcaatatcaaagatacttctgtcttgaatgttatctctgttgtggaactttacttctcaggtaataccgtagccacacaaacctaccaatatttccaaacctttacgattatcgccattatctactttgttcttaccttcacggtgacacgtatccttcgttatattgaacgccgtttcgatgccgatacttacaccactggagcaaaccaaatgcagattgcggaggtctcaaatgtctaa

SEQ ID NO: 38197 - DNA, 1170 bp, Streptococcus pyogenes
atgttttcattcacaatagattatgtccttgttctgataggggctttgttaatgtccttattcttaacccctcttgttcgctttttagcctttcgtgtgggtgcagtagacaatcccaatgccagacgggtcaataaggttccgatgccaaccagtggtggattagctatttttatgtcttttttagtagcaagtttgggacttattccgattgcttctaaaggcgccatgttttttggtcagacctacttcagttatattttacctgtcgtgattggtgctacagtaattacccttactggttttttagatgatttgtatgagttaagtcctaaattaaagatgtttggtattctaattggtgcagtgattgtctgggcttttaccgactttaaatttgatagcttcaaaattccttttggagggccgttgttagtttttggtcctttcttaaccttattcttaacagtcctgtggattgtttccatcactaatgctattaacttgattgacggtttggatggtttggttagtggggtctctattattagtttagtgaccatggctattgtatcttatttctttttacctcaaaaggatttctttttgacgttaaccattttggtcttgatttctgctattgcaggattttttccttataattaccatccagctatgatttatttgggtgacacaggagccctctttattggctttatgataggggttttgtctcttcaaggattgaaaaattcaacggctgtggctgtggtgacacctgttattattcttggtgtacccattatggataccatcgtggctattattcgacgtagtttatcaggtcaaaaattctacgagccggataagatgcacctgcatcatcgactcttatcaatgggctttactcatcgaggagctgtcttagtagtttatggtattaccatgcttttttcccttatttctttacttttaaatgtttctagtcgaattggtggcgtcctcttgatgcttggacttttatttggtttagaagtttttattgaaggattggagatctggggtgaaaagcgaacgcctttgtttaacttgttaaagtttattggtaatagtgattatcgtcaagcaatgcttctgaaatggaaagaaaagaaggatttgaaacactaa

SEQ ID NO: 38198 - DNA, 771 bp, Streptococcus pyogenes
atgtcaattcttgagattaataatttacatgtttcaatagaaggtaaagagattttgaaaggggttaacctaactcttaaaactggggaagtagctgccattatggggccaaatgggacaggaaagtctaccctttcagcagctattatgggaaatcctaactacgaagtgacccaagggcaaattttgcttgacggggtcaatattctcgatctagaagttgatgagcgtgcgagactgggactttttctcgccatgcaatacccttcagaaattccagggattaccaacgctgaatttatgcgtgcagcaatgaatgccggtaaggcagatgaggataagatttccgtgcgagattttatcaccaaacttgatgagaaaatggctttgttaggtatgaaagaagagatggcagagcgttacctcaatgaaggtttttctggtggggagaaaaaacgcaatgaaattcttcaattgctcatgttagagcctaaatttgctttgttagatgagattgattctggtcttgatattgatgccctaaaagtagtctctaaaggggttaatgagatgcgtgggaaagactttggagctatgattatcacccactatcaacgtttgttgaattacattaccccagacctagttcatgttatgatggatggtcgtattgtcttatctggtgatgctgccttggctactcgtcttgaaaaagaaggctacgcaggtattgcacaggatctgggaatcgagtataaggaagaaagttaa

SEQ ID NO: 38199 - DNA, 480 bp, Streptococcus pyogenes
atggcactctctaaactgaaccatctatacatggctgtggtagcggaccattcgaaacgtccacatcatcatgggcaactagatggcgtagaggctgttcaactgaataatccgacttgtggtgatgtgatttctttgaccgttaagtttgacgaagataaaattgaagatattgcttttgcaggcaacggctgtaccatttccacagcttcatcaagcatgatgacagatgctgttattggtaaaagtaaagaagaagcactcgcgttagctgatattttttcagagatggtacaaggacaggaaaatcctgctcaaaaagagctaggtgaagcagaattgttggcaggagttgcaaaatttccacagcgtatcaaatgctctaccctagcttggaatgctctcaaggaagccattaaacgaagtgccaatgctcagcacctcacggaccaaaatgtaaaggaagggaaaaatgtctga

SEQ ID NO: 38200 - DNA, 1071 bp, Streptococcus pyogenes
atgacaaaagaaaataatgtaatcttaactgccaaagatgtggtggtagaatttgatgtgcgtgatcgtgttttaacagctatccgtaacgtctcactggaacttgttgaaggagaagtccttgcttttgtaggggaatcaggctcaggtaaatctgttttaacaaagacctttacagggatgttggagtctaatggacgcattgctaatggttcaattgtctatcgtgggcaagaattgacagatttaaaaacaaataaagagtgggcaaagattcgcggctcaaaaatcgcaacgattttccaagacccaatgaccagtcttagtcccattaaaactatcggtagccaaatcacagaagtgattattaagcaccaaaaagtaagtcatgccaaagctaaagaaatggcccttgattacatgaataaagtgggtatcccaaatgccaaaaaacgctttgaagattacccatttgagtattcaggaggaatgcgtcaacgtattgttatcgctattgctttagcttgtcgcccagatattcttatctgtgatgagccaacaacagcccttgatgtgactattcaagctcaaatcgttgagttattgaagtcgcttcaacgagaatatcatttcaccattatctttattacgcacgatttaggtgttgtggcaagcattgcagataaagtggctgtcatgtatgcaggagaaattgttgaatttggaacagtcgaagagattttctatgatccaagacacccctatacatggagtttgctgtctagcttaccgcagttggcagatgaatctggtgaactttacgctattccaggaacgcctccatcactttattcaccaattatcggagatgcctttgcacttcgctcagaatatgctatggttttagactttgaaaaagcacctccggcgattaacgtatctgagactcattgggccaaaacatggcttttacacccagaggctccaaaagttcaaaaaccagaagtcattcaagatttgcatcaaaaaatcttaagaaaaatgtcacaacaggaggaaggaaatgtctga

SEQ ID NO: 38201 - DNA, 924 bp, Streptococcus pyogenes
atgtctgagaaattagtcgaagtaaaagacctagaaatttccttcggagaaggaaagaaaaaatttgttgcagttaaaaatgctaatttctttattaaaaaaggagaaaccttttctttagttggagaatctgggagtggtaaaacaacaattggtcgtgctattattggtttgaacgatactagttcaggtcaaattttatacgatgggaaagtaattaatggcagaaaatcaaaatcagaagccaatgagctcattcgtaaaattcaaatgattttccaagatcccgctgctagtttgaatgaacgggcaaccgttgactacatcatttcagaaggtctttataactttaatctgtttaaaacagaggaagaacgtaaagaaaaaattaagaacatgatggccgaagttggtttgctatcagagcatttgacgcgctaccctcatgaattttcaggaggtcaacgtcagcggatcggtatcgctagagccctagtaatgaaccctgaattcgttattgctgatgaaccgatttcagctttggacgtttccgttcgcgcacaggtcttgaatcttcttaaaagaatgcaagccgaaaaaggtttgacttatctcttcattgcccatgatctttcagtcgttcgctttatttcagatcgtattgcggttatccataaaggggttattgtagaagttgcagaaacagaagaactgtttaataacccaattcatccctacacccaatctttgttatcagccgtgcctatcccagatccaattttagagcgtcaaaaagaacttgttgtctatcatccagaccaacatgattatacattagataagccatcaatggttgaaatcaaaccaaatcactttgtttgggcaaaccaagcagaaattgaaaaatatcaaaaagaattgtaa

SEQ ID NO: 38202 - DNA, 1119 bp, Streptococcus pyogenes
atggaagaattattttgtataggctgtggtatccagattcaaactgaagataaagaaaaagctggttttacgccagctgctgctttgaaaaagggtatggaaacaggagaactctattgtcagcgctgctttagattgaggcattataatgaaattacagatgtccatattaccgatgatgaatttttaagacttcttcacgaagtgggtgatagtgatgctcttgtggttaatgtgattgatatttttgactttaatggttctattattccaggtctatctcgctttatttctggtaatgatgtcttactggttgggaataaaaaagatattttgccaaagtctgttaaggatggtaaagttactcaatggttgacggaacgtgcacacgaagaaggtcttcgcccattagacgttatgttaacgagcgctcaaaataaatatgcgattaaagacttgattgggcgtatcaatgagttacgtaatggtcgagatgtttatgttgtgggggtcactaatgttggtaaatcaaccttgattaatgctattatccaagagattactggtaacaaggatgtcatcacgacgtctcgttttcctgggacaactcttgacaaaattgaaattcctttggatgatgggacgttcatttttgatacgccaggaattattcacaggcaccagatggctcattatttatcccctaaagagctaaaaatagtgagtcctaagaaggaaatcaagcctaagacgtatcaattaaatccagaacaaactctctttttaggtggtctggctcgctttgactttatcaacggtgagcgtcaaggatttacagctttttttgacaatcaactagaattacatcgtacaaaattagctggagcagatgctttttatgataagcatgttggaactttgttaaccccgccagataagaaagagttgactgcatttcctaaattagttcgtcatgaatttacaattgatcagaaaatggatattgttttttctggtctaggatggattcgtgttaatggtcaaaaagactcaaaagcgatagttgctgcatgggctcctgaaggggttgctgtcattgttcgtaaagcgattatttaa

SEQ ID NO: 38203 - DNA, 594 bp, Streptococcus pyogenes
atgacatatgaagattatcttccttatagcaggaccgaactgttagcaaaaattgcagagcagatgagccctaaacggtttaaacatgtacttggcgtggaaaaggcagccttgtccttggcagagtgttatggttgtaacccagacaaagcagggttagcagctcttttacatgattatgccaaggagtgccctgaccaggtctttttagacttaattgacaagtaccaattatctccagaattagctaaatggaataataatgtctggcatggtatggttggtatttataagattcaagaagacctggggctaaaagacaaagatatcttgcgagctattgaaattcacaccgttggtgctgctgagatgaccttgctggataaggtcttatacgttgctgattatattgaagaaggtcgcatttttcctttggttgatgacgctagaaaaatcgcgaagctcgatttgaatcaggctgttgcctatgaaacagtgaacactgtcgcttatttagcctcaaaagcgcagcctattttcccacaaactctggatacctataatgcgttttgcagctatttaaaggaatactaa

SEQ ID NO: 38204 - DNA, 717 bp, Streptococcus pyogenes
atgggacgtaaatgggcaaatattgttgctaaaaaaactgctaaagatggagcaacatcaaaggtctatgccaaatttggtgttgaaatttatgtggctgccaaacaaggcgagccagatccagagttaaatacagctcttaaatttgtcattgatcgtgcaaagcaagcacaagtgccaaagcatgttattgataaagcgattgataaagctaaaggaaacacagatgaaactttcgtagagggacgctatgaaggttttggtccaaatggttcaatgattattgtggatactttgacatcaaatgttaaccgtacagcggcaaatgtacgtacggcttacggtaagaacggtggcaatatgggagcttcaggatctgtatcctacttatttgataaaaaaggggtcatcgtttttgctggtgatgatgctgacagtgtctttgaacaattacttgaagcggatgtagacgtagatgatgttgaagcagaagagggaacaataacagtttacactgccccaacagatcttcataaaggtatccaagcacttcgcgataatggtgtagaagaattccaagttactgaacttgaaatgattcctcaatcagaagtagttttggaaggtgatgaccttgaaacttttgaaaagcttattgatgcacttgaatcagatgatgatgttcaaaaagtgtatcataatgtagcagatttttaa

SEQ ID NO: 38205 - DNA, 846 bp, Streptococcus pyogenes
atgtcttttaaaaaatggattggaatagtcggaatcgctttagcatcaactgtattggttgcttgttctgaaaaacaagatgataaaaacactttaactattggggtgatgacaaaaacagaatctgatcaagcgagatgggataaagttgaagaattattgaaaaaagacaatatcactttgaagtacaaagaatttacagattactcgcaacctaataaggcagttgctaatggtgaagtcgatattaatgccttccaacactataatttcttaaataactggaataaggaaaataaggaacatttggtggccattgctgatacctatatcagcccaattaaccttttctctggaaccagtcaagatggaaaggctaaatacaaatcagtagctgatctgccaaatggtactcaaattgcagtaccaaatgatgcgaccaatgaaagccgtgccctctatgtgctgcaatcagctggcctcattaaattgaatgtgtctggtgatcaattagcaaccattgccaatatctcagagaacaaaaagaaattagatatcaaggaattagatgctagccaaacggcacgtgctttagtatctgctgatgcagctgttgtcaataatagttacgctgttcctgcaaaaattgactacaaaacctctcttttcaaagaaaaagcagatgacaattcaaaacagtggattaacattattgcaggtcaaaaagattgggaaaaatcagagaaggctgatgctattaaaaaactcatcaaggcctaccaaactgatgaggtgaagaaagtcgtggaaaaaacttcaaatggtatagatgtatccgtatggtaa

SEQ ID NO: 38206 - DNA, 663 bp, Streptococcus pyogenes
atgtttatgaactcggatggtcatggagatgcaggttggggcttagcgatttggaatactttatacatgaccattgtgccttttattgttgggggggctattggtctcttattaggcttgttattagttttaacaggaccggacggtgttattgaaaacaaaacgatttgttgggttattgataaagttacctctatttttagagccattccttttgttattttgattgctattttagctagctttacctatttgcttttaagaacaactttaggagcaacagcggccttggtacctttaacctttgcgacttttcctttttatgcccgtcaggtccaagttgttttttcagaattagacaagggtgttattgaagcagcacaagcttcaggtgctactttctgggatattgtcaaagtgtatctcagtgaaggtttaccagatcttattcgtgtttctacagtcaccttaatttctttagttggggaaactgccatggcaggagctatcggtgctggaggattaggaaatgtagcgatttcttatggttataatcgttttaacaatgatgtgacttgggtagcgactattattattcttttaattatttttgctatccaatttattggtgatagcttgactagaaggtttagtcataaataa

SEQ ID NO: 38207 - DNA, 1371 bp, Streptococcus pyogenes
atgaaacaaaaaaatgtatatatcgtcattggattcatgctatttgcgctattttttggagcagcaaacctcatttacccagcttttttaggcatctactcaggtcatcagattctatggtctatcattggtttttgtttaactggtgtctccttgcctttactcggtgtcattgctgttgctaaatctggatcaggcgatgttgaaagtttggcacgccccatctctaaatggtatgcaatcttctattcttccattttgtatttatctattggcccattttttgctattccaagaacaggagccacttctttttcagtcggtatcgctcctatcttaggagataatacaaccaataaagctatttatgctatactattttttggtctgtcctacttccttgctatcaaacctagtaaactagctgaaaatatcggaaaatttttaacgccaacgttgttagttgttatttctattttggttatcgcgtcctttgtccatcctgctggaaattacggtgatgcttttaacgctggggtcggtgttaataatgcctttaaagattttccttttatagcaggattaattcaaggttatggcactatggatgcactagcttctcttgtttttgctattttagtcattgaggctaccaaacaatttggcgctaagacggacaaagaaatgaccaaaataacacttatttctggggctattgccattttgctattagcacttgtctatatctttgtcggtcgtattggagcaacatcacaatcattatttccttttattgatggcagctttacccttcatggtaatccagttaatggcggtcaaatcttaagtcatgcttctcgtttttacctaggtggcatcggacaagcatttctagctgttgtgattttcctggcctgtctaaccacttcaacaggcttaatcacgtcaagtgctgaatacttccataaattagtgcctgctttatctcatattgcttgggcaactatctttactttactatcagctttcttttattttggtggcttatcagtcattatcaactggtcagctcctgttttattccttttatacccattaacagtcgatttaattttccttgttttggcacaaaaatgcttcaataatgatcctattgtctatcgaactacaattggtctaacctttattcctgccatatttgatgcactcctaacactatcacaaatgactggattatttcatttaccagaagccgttgtaacttttttccaaaaaactgttccactagggcaattctcaatgggatggattatctttgctgctattggttttttaatagggcttatactaagtaaaacgaagaaaagctaa

SEQ ID NO: 38208 - DNA, 675 bp, Streptococcus pyogenes
atgttaaaacgtaaaactgtcggcgttcttggccttggtatttttggccgtactgttgccagagaattaagtaactttgatcaagacgttattgctattgatatcagagaaagtcatgtcaaagaggtggccgacttggtcactaaagccgctgttggagatattactgacaaagaatttctattagctgtagggattgaacattgtgatactgtcgttatcgcttcagggaataacttggaatcttctgttcttgcagtcatgcactgtaaaaaactcggtgttccaaccattattgccaaggctaaaaataaaatttttgaagaagttctatatggcatcggagcaactaaagtcatcacccctgaacgtgattctggaaaacgtgtagcttcaaatctgttaagacgtcatatcgaaagcatcatctatttggaacatggtatttcgatgattgaatttgtcattcctaaaagctgggaaggacaatctctttccgaactagatgttcgtcgtaaatatgagttaaatgtgattggcatgcgtcaaaaagaagttaaaaccttagatactaatgtcaaaccttttgaacctttagaaccgaatactatcattgtggccatcgctaatgaccacacctttgaaaaatttgattatcttggctatcttaaataa

SEQ ID NO: 38209 - DNA, 714 bp, Streptococcus pyogenes
atgacaccccaagacttttaccgaacactagaggaagatggtttttccttatcatcgaaacaaaaagaacaatttgacacctacttcaaatcactagtggaatggaacactaaaattaatttaacagctattacagaagaaaatgaggtttacctcaagcatttttatgattccatcgctcctattttacagggctttttagctaatgaaccaatcaaattattggacattggagctggagctggttttcctagcctacccatgaaaattcttttcccaaaccttgaggttaccattattgattctcttaataagcggatttcttttctgacactccttgctcaggaattgggcttggaaaatgtccacttttttcatggtagagcagaagatttcggacaggacaaggcctttcgaggtcaatttgatgttgttactgccagagcggttgctcggatgcaggttctatctgaattaaccatcccctttttaaaaattggaggaaaattaatcgccttaaaggcacaagctgctgaccaagagttagaagaagctaagaatgctctttgtcttctttttggtaaagtcattaaaaaccatagctaccaattgccaaatggagattctcgcttcatcaccattgttgagaagaaaaaggaaacacctaacaagtatccaagaaaagctggcttgcctaacaaaaaacctctataa

SEQ ID NO: 38210 - DNA, 1311 bp, Streptococcus pyogenes
atggttttacctaccgttgccattgtgggccgtccaaatgtgggcaagtccaccttatttaatcgaatcgcaggagagcgcatttcaattgtagaagacgttgaaggggttactcgtgaccgtatttatgctactggggagtggcttaaccgccaattctcattgattgatacaggtggtattgatgacgttgatgccccgtttatggagcaaatcaagcaccaggctcaaattgccatggaagaagctgatgttatcgtttttgttgtttctggtaaagaaggggtgaccgacgctgacgaatatgtgtctaaaattctgtatcgaaccaataccccagtcattttagctgttaataaggttgataatcctgaaatgcgtaatgacatttatgatttttattcacttggtttgggtgatccttatccagtttcttctgttcatggtatcggaacaggggatgtcttagatgcgatcgttgaaaacttgccagtagaagaggctgaagaaaatgatgatattattcgcttcagtttaatcggtcgtcctaatgttgggaaatctagcttgattaacgctattttaggtgaggaccgtgttatcgctagccctgtcgcagggacaacacgtgatgccattgacacgcattttacggatgctgacggtcaagaatttaccatgattgacacggctggaatgcgcaaatctggcaagatttacgaaaatacagagaaatattctgtcatgcgtgccatgcgtgccattgaccgctccgatgtggtcttgatggttatcaatgctgaagaaggtatccgtgaatacgacaagcgtatcgctggctttgcacacgaagctggtaaaggaatgattatcgtggttaacaaatgggataccattgacaaggataatcataccgttgctaagtgggaagccgatattcgtgaccaattccaatttttgacatacgctccgattatttttgtgtcagctttgacgaagcagcgcctcaacaaattgcctgacttgattaaacgtatcagtgagagtcagaataaacgtatcccatctgctgtcctcaatgatgttatcatggatgctattgccattaatccaacgccaacggataagggtaaacgtttgaaaattttctatgccactcaagtgtcagtaaagccaccaacatttgtcgtctttgttaacgaggaagaattgatgcacttctcttatctacgcttcttggaaaaccagattcgcgcagcctttacctttgaagggacaccgattcatctaattgctcgcaaacgaaaataa

SEQ ID NO: 38211 - DNA, 1329 bp, Streptococcus pyogenes
atgtcaaaaacgtatcattttatcggaattaaagggtcaggaatgagtgccttggcccttatgttgcatcaaatggggcataaggtgcaaggtagtgatgttgaaaaatactatttcactcaaagaggattggaacaagcgggcatcactatcttaccttttagcgaggacaacattacgccagatatggaacttatcgttgggaatgcctttcgtgaaaacaacaaagaagtggcctatgctttgagacaccagattcctttcaaacgttatcatgactttttaggtgattttatgaaatcatttatcagttttgcagtagcaggtgctcatggtaaaacttctacaacgggtttattgtcacatgtcttgaaaaatatcacagacacatcttatttaattggtgatggtactgggcgtggatctgctaatgcacagtattttgtttttgaatcagacgaatacgaacgccattttatgccttatcacccagaatactctatcattactaatattgattttgaccatcctgattatttcacaggaattgctgatgtgcgaaacgctttcaacgattatgctaagcaggtcaagaaagctttgtttgtttatggtgaagatgacgaactaaaaaagatcgaagcacctgcacctatttactattatggttttgaagagggcaatgattttatcgcttacgacattacgcgtactacgaacggatcggactttaaggtaaaacaccaaggagaggtcattggtcagtttcacgtacctgcttatggaaaacataacattttaaacgctacagcagtaattgcaaacttgtttgtagccggcattgatatggctctagtggcagaccatcttaaaactttttcaggtgtgaaacgtcgttttacagagaaaattatcaatgacactattattattgatgactttgctcatcatccaaccgaaattgtggcaacaattgatgcggctagacaaaaatacccaagtaaagaaattgtagcaatattccagccacatacttttactcgcactattgccttattagaggattttgcttgtgctttaaatgaagctgacagtgtttatttagcccagatttatggttctgcacgtgaagtagataaaggtgaagttaaggttgaagatttggctgctaagattatcaaaccatcacaagtagtaacggtggaaaatgtctctcctcttcttgatcacgataatgctgtttatgtttttatgggagctggagatattcagctatatgaacattcttttgaggaattacttgcaaatttaactaaaaataaccaataa

SEQ ID NO: 38212 - DNA, 924 bp, Streptococcus pyogenes
ttgaaactaacattaaatcgcatcctcttttcaggactagcactgtcaattctactcaccttgacaggctgtgtgggaagagacgctcacggaaatcccaaaggtatgatttgggaatttcttggaaaacccatgtcatactttatcgattactttgcaaacaatgctggactaggttatggactggctatcatcatcgtaaccattattgttagaacacttatcttaccactaggtctatatcaatcttggaaagcaagttatcaatctgagaaaatggccttcttgaaacctgtttttgaaccaatcaacaaacgtatcaaacaggcaaatagtcaggaagaaaaaatggctgcccaaacagaattaatggctgctcagcgtgctcatgggattaaccctcttggaggtattggatgtctacctcttctcatccagatgccattcttttctgccatgtattttgccgctcaatacactaaaggagtatcaacaagcacctttatgggtattgatcttggtagccgtagtttagtgttaacagcaattatcgctgctctttacttcttccaatcatggttatcaatgatggccgtttcagaagaacaacgtgagcaaatgaagacgatgatgtacaccatgcctatcatgatgatcttcatgtccttctcactccctgctggtgttggtctttactggctagttggtggtttctttagtattattcaacagttaatcacaacctacctcttaaaacctcgattgcataagcaaattaaagaagaatacgctaaaaacccgcctaaagcataccaatcaacttcttctcgtaaggacgttacgccttcacaaaacatggaacaggctaacttgcctaaaaaaataaaatccaatcgtaatgctggaaaacagcgaaagcgttaa

SEQ ID NO: 38213 - DNA, 738 bp, Streptococcus pyogenes
atggttattacatcaaaagcaaatcaactaattaagcaaacaaaaaaattattgcaaaaaaagcatcgaaaacagtcctatttgattgagggctggcacctttttgaagaagcccaaaaatcaggacaagtttttcgccacatctttgttttagaggaaatggtggagcgtctagcaggtgagcaagaactcgttattgttagcccacaagtgctcaaggagttgactgactctcctagtccacaaggcattgttgctgaggtggagatacctaagttagcctttccatcagattacaaagggaaatatttggttttagaggacgtccaagacccaggaaatcttgggaccatcattcgtacagcagacgctgcacggtttgatggggtctttctttctgaaaaatcagcagatatttacaaccaaaaaaccctacgttccatgcaaggtagccattttcatttaccaatttggcgaacagatgtctatcagctttgtcgagagctccaagagtatgaaactcccatcctagcaacaactctgtcaaagaaatctgttgattataaaagcctcacacatcatgaaaggttagctttggtgttgggaaatgaaggccagggcattagtgctgaaatggcagccctagcagaccaactggttcatattacaatgcctggtcaggcggaaagtttgaatgttgccgtagcagcaggaatcctcattttcagcttgatttaa

SEQ ID NO: 38214 - DNA, 795 bp, Streptococcus pyogenes
atggatacaagaccaattgggtttttagattctggtgtgggaggtctgaccgtcgtttgtgaattgattcgtcagctccctcatgagaagattgtatatattggtgattcagcaagagccccctatggtcctagacccaaaaaacaaattaaggagtatacttgggagctagtcaattttttgctgactcaaaatgttaaaatgattgtttttgcatgcaataccgcaacagcggtggcttgggaagaagtaaaagcagctttagatattcctgttttaggagttgtcttaccgggggcaagcgcagctattaaatcaacgacaaaaggccaggttggggtcatcggaaccccaatgacagtggcttcagacatttatcgcaaaaaaatccagctattagcaccatctattcaagtaaggagtcttgcttgcccgaagtttgtaccgattgtggaatcaaatgagatgtgttcgagtatagctaaaaaaatagtttatgacagtctagcaccattagtcggtaaaatagatacccttgtactaggatgtactcactatcccttgttacgaccaattatccaaaatgttatggggccatctgttaagctgattgacagtggagcagaatgcgtccgagatatctctgtcttattaaactattttgacattaacggtaattatcatcaaaaagctgtcgaacaccgcttttttacaacagcaaatcctgagatttttcaagaaattgcctcgatttggctgaaacaaaaaataaatgtggagcatgtcaccttatga

SEQ ID NO: 38215 - DNA, 987 bp, Streptococcus pyogenes
atgagtgaaaaaatttacgaatacaaagatgaaaataactggtttatcggaaagatgactggtcataatttaatatcgggctggggagtcaaacacacgacaatcaaaaaaatagatgaccttttagacggtattgccgcaacgttagattgggaaaatcctaaaggttacgatgtttcggtggtgcgtcatcagtctcctttatctctcatcacctttattatcgacatgataaatcaagagacccagcgtgagattaaggtaactccccatgcaggcacgattttattaatggaaaatgcgaaactgcttgcagtttatctcccagaaggtggagtttcaacggctacattttttgcgactagtgaacagggatttggggatattattttaatcgctacacgaaacgagggaaaaaccaaagagttccgcaatctgtttggccagctaggttatcgtgtggaaaatcttaatgattatccagaattgccagaagtagcagaaactggtactacttttgaagaaaatgctcgcttgaaagcagaaacgatttcacgcctcacaggaaaaatggtattagcagacgattcaggactaaaagttgatgccttgggtggtttacctggtgtttggtcagctcgtttctcaggaccagatgccacagatgccaagaataatgccaaactcttacacgaattagctatggtgtttgaccaaaagaagcgctcagctcaatttcatacgactttggtagtggctgctcccaataaagatagtttggttgtggaagccgattggccaggctatattgctacgcagcctaagggagaaaatggttttgggtatgatcctgtctttatcgtcggagagactgggcatcatgctgcagaattagaggctgaccaaaaaaatcagttgtcgcatagaggtcaagcagttcgaaaattaatggaggtctttccagcatggcaagcaaaacaatcatag

SEQ ID NO: 38216 - DNA, 723 bp, Streptococcus pyogenes
atgcgaattaacaaatacattgcccatgcgggtattgccagtcgtcgtaaggctgaagaattgattaagcaaggcttagtaaccttaaatggtcaggttattacggatttagcaaccactgtaaaatcgggagacgtggttgaaatagaaggaagtcctatttacaacgaggaaaaggtttactatttgcttaataaacctcgtggcgctatctcaagtgtgtcagatgacaaaggccgtaaaacggtactggatttactacctcaggttaaagaacgcatataccctgttggacgattggattgggacacatcaggggtccttattttaacgaatgatggtgattttacagatactatgattcatcctagaaatgaaatagacaaggtttatctggcgcgtgtcaaaggtattgcaacgaaagaaaatcttcgtcccttaactcgaggaattgttattgatggtaaaaagaccaaaccagctcgctacaatattgttcgtgtagaagctgataagagtcgatcgatcgtagaattgactatccatgaagggcgaaaccatcaagtgaaaaaaatgtttgagtctgtggggcttctggttgataaattatctcgtacacgttttgggaccgtcgacttaaagggactaagaccaggagaagcaagacgcttaaataaaaaagaaataagtcaactgcataacttagctaatacgaaaaaatga

SEQ ID NO: 38217 - DNA, 549 bp, Streptococcus pyogenes
atgacgacaaaagaacttatcaacaaaaacgacaaagtaaaaaaggctcgcaatcatattgtcctgtttcaaccccaaattccacaaaatactggtaatattgctagaacatgtgctgcaactaatgcacctttacatattattaaacccatgggatttcctattgatgaccgcaaaatgaagcgtgcaggcttggattactgggacaagttagaactgcatttttatgatcatttagaacagtttatcaatcaatgtcacggacagcttcacctgattagcaagtttgcagttaataattattctcaagctacttatgctgatggcgattcccattatttcttgtttggacgagaagatacaggcctgccagaagattttatgcgagaacatgctgaaaaagcacttcgtattccgatgaatgatgagcatgtacggagtttaaatgtctcaaatacggtttgtatggtgatttatgaagcccttagacaacagggctttcaagggttagagttaaagcatacttacgaacacgataaactaaaataa

SEQ ID NO: 38218 - DNA, 654 bp, Streptococcus pyogenes
atgatgacaaacaaacaaactcactttttaatagcttcttttgcattgctaatctttgttataataggctatacggtcaaattttttcctgaacgtttggcacttctagataatactattcaagcagagattagaggcaaccttcctatagtgctgacgcaattctttaggggtgttactgtatttggaaatgtcatgacacaagttttgttagttattgtgtcggtcctagttttattctttatgaagtggaaaattgaagccttgtttatcttgtcaaatggtgccattgcagcatttttgattacgactctcaagctcttttaccaaagaccaagacctgctattgagcatttggtttatgctggtggctattcgtttcccagtggccatgcgatgggtagcatgctgatttttggtagcctattgattatttgttatcagaggctacattcaaaactattacaatttgtgactagcatgatctttataatactaattttattaattgggttatctcgtatttatctaggagtacactacccaagtgatattttagcaggctttgtattaggatttggtattttgcactttatttatcctttttataagcaaaaacgatttgaatggcgatttcttttgaaacaagactaa

SEQ ID NO: 38219 - DNA, 1335 bp, Streptococcus pyogenes
atggaagaccctgtgagtcagtccttagtgattcaatttttattgttagttgttttaaccttgttaaatgcttttttttcagccagtgaaatggccttagtttctctcaatcgttctcgggtggaacaaaaagcagcagacggtgataaaaaatacgctcgtttgttgcgggttttagaggaacctaatcattttttatcaacgattcaagttgggattacctttattagtttactatcaggagcaagtttatcagcttctttgggtaaggtgatctcaggttggctaggtaattcagcgaccgcaaggacagctggtactatcatctccttggttttcttgacttatgtctctattgttttaggagaattgtatccaaaacggattgccatgaacctcaaagacaagttggcgattgtttcagcccctattatcattgggttagggagactggttagtccctttgtatggctcttatcagcttctactaatttactgagccgacttacccctatgacctttgatgatgcagatgagcaaatgacacgtgatgaaatcgagtatatgttatcaaaaagtgaggcgacccttgatgctgaagaaattgagatgttgcaaggagttttctcacttgatgaaatgatggcgcgtgaagtcatggtcccaaggaccgatgctttcatgattgacattaacgatgatccgcttgaaaatattcaggaaatcttaaaacaaagtttttcacgcattcctgtttatgatgtggataaagataaaattatcggtctcatccacactaagcgtctcttggagtcaggtttccgccagggatttgatcagattaacatgcgaaaaatgttacaagaacctctttttgttcccgaaaccatttttgtagatgatctcttacgccagctgcgcaatacccaaaatcagatggctattttgctagatgaatatggtggtgtggcaggacttgtgactttggaagacttgcttgaagaaatcgtcggtgaaatcgatgatgaaaccgataaagcagaacaatttgttcatgagattggagacaatacctatattgttgttggtactatgactttaaatgagtttaatgactattttgataccgaactagaatcagatgatgtagataccattgctggtttttatttgacaggtatcggaaccattccaagccaggagcaaaaagaagcctacgaaatagataacaaagacaaacatttagttctaatcaacgataaagtcaaagatggccgtattacgaaattaaaattaatcctgtctaatatagaacagattattgaggaagactag

SEQ ID NO: 38220 - DNA, 936 bp, Streptococcus pyogenes
atgtcaaaaattttagtttttggtcatcaaaatcctgatacggatgctattgcatcatcttatgcttttgattacttatcccaaaaagcgtttggtttggatactgaagtcgtagctttaggaacacctaacgaagaaacagcttttgcccttgattattttggtgttgaggcaccacgtgtggtagagtctgctaaagcacaagggtctgaacaagtgattttgacagaccacaatgaattccaacaatccattgcagatatccgtgaggttgaggtatatggtgtggttgatcaccaccgtgtggctaattttgaaactgcaaatcctttatacatgcgtgtggaaccagtaggatcagcctcatctattgtttaccgtatgtttaaagaaaatggcatcgaggtgccaaaagcgattgcagggatgctcttgtctggtttgatttcagataccttgttgttgaaatctccaacaactcatgtgtctgatcaccttgtcgctgaagaattggcagagctggcagaagtgaacttggaagactatggaatggctcttttaaaagcaggtacaaaccttgcaagcaaatcagaagtagaattgattggtattgatgccaaaacatttgaattaaatggcaatgctgtgcgcgtggcacaagtgaacactgttgacattgcagaagtcttagaacgtcaagaagctattgaagcagccattaaagatgccatggctgcagaaggttattcagattttgttttgatgatcacggatattgttaactcaaactctgaaattctagctattggagcaaacatggacaaggttgaagcagcctttaacttcacccttgacaacaatcatgccttcttagcaggtgccgtttctcgtaaaaaacaagtggttccacaattgacagaaagttttggagcttaa

SEQ ID NO: 38221 - DNA, 933 bp, Streptococcus pyogenes
atgaaaaaattaactctactattaacactctgtttgacaactattaccttaatcgcctgtggtaatcaagcaactaatcattctaacaccgcctcaaaaagtttatcgcctatgcctcaaattgctggtgtgacttattacggagatattcctaaacagcctaagcgagtagtcagtctggcttcaacttacactggttacctcaaaaaattagatatgaatctagtcggggttacttcttatgacaagaaaaaccccatcttagcaaagactgtaaaaaaagcaaagcaagttgctgcaactgatttagaagccgttacaacgcttaagcctgacctcattgttgttggctctacagaagaaaatattaaacaattggcagaaattgcgcctgttatctcgattgaataccgcaaacgtgattatttacaagtgttatctgacttcggccgcatctttaacaaagaagacaaagccaagaagtggttaaaagattggaaaactaaaacagcagcttatgaaaaagaagtcaaggccgttacaggtgacaaagcaacctttactattatggggctttatgaaaaagacgtttacctttttggtaaagactggggacgtggcggagagattatccatcaagctttccattatgatgctcctgaaaaagtgaagactgaagtttttaaacaaggttacctgtcattgtcgcaggaagtcttgccagactatattggtgattatgtcgtcgttgctgcagaagatgataagactggttctgctctatatgaaagcaagctatggcaatccattccagctgtgaaaaaacaccatgtgatcaaagtcaatgccaatgttttttactttactgatcctctttctttagaatatcaattagagactttacgagaggcaatcttatcaagtgaaaactaa

SEQ ID NO: 38222 - DNA, 783 bp, Streptococcus pyogenes
atgacaacaattagtgctgaagacctcacaattgcctatgaacagcgtaccatcatcgataaattatcgttttatattcctgaaggtaaaattacgaccattattggcgccaatggctgtgggaagtctagtttattaaaagcactgacaagattattaccaccaaaacagggagttgtatatttaaatgggcaaaacattgccacattagaaactaaagaggttgctaaaaaactagctcttttacctcaagttcaagaagcaactaacggcataactgtttacgaattggtttcttacggacgttttccccatcaatcttactttggaaatcttagtccagctgacaaaaaagccattcattgggctatgcaagccaccaatgtcatggcctatgctgatcaacctgttgatgctctttctggggggcaacgtcaaagggtttggcttgcaatggcattagcccaaggcactgatactatttttttagatgagccaactacttatttagatttaaatcatcaactagaaatcctagagctcgttaaatccctaaataaggatgccggcaagactattgttatggttcttcacgacctcaatctttcagcccgctattcggatcatctgattgctatgaaacatggcaagatccattatactggtactatagcagatgttatgacttcacctatcattcaagacatcttccaaatcaaaccggtactggttgatgatcctatccacaactgtcctatagtgctgacttatcagcttcaataa

SEQ ID NO: 38223 - DNA, 1446 bp, Streptococcus pyogenes
atgataaccattgaacaattattagacattttaaaaaaagaccataattttcgtgaggttcttgatgccgacggataccactaccattatcaaggctttagttttgagcgcttgagttacgatagccgtcaagtagatggcaagacccttttttttgctaaaggggcaactttcaaagctgactaccttaaagaagcaatcactaacggattacaactctatatttcagaggtagattacgagcttggtattcccgttgttttggtcactgatatcaaaaaagctatgagtctaattgccatggctttctatggcaaccctcaagaaaagctcaaactactagcttttacaggtactaagggaaagacgacggctgcttattttgcctaccacatgttgaaagaatcctataaacctgccatgttttctaccatgaataccaccttagatggcaagacctttttcaaatcacaactcacaactcctgagagcttggatctttttgctatgatggctgagtgtgtgactaatggcatgacccacttgattatggaagtttctagtcaggcttacctcgttgaccgtgtctatgggcttacgttcgatgttggggttttcctaaatattagtcctgatcatattggcccaatcgagcatccaacgtttgaagattatttctatcataagcgtcttttaatggagaatagcagagctgttgtgatcaatagcgggatggatcatttttcatttctagcggatcaggtagcggatcaagagcatgtgttttatggtcccttgtctgacaaccagatcaccactagccaagccttctcctttgaagctaaaggacaattagctggccattatgacattcaattaattggccattttaaccaagaaaatgctatggcagctggacttgcctgccttcgtttgggtgctagcctagctgatattcaaaaaggtatcgctaagactcgcgtcccaggccgtatggaagtcctcactatgacaaatcatgctaaagtttttgttgattatgcccataatggtgacagcttagaaaaattactcagcgttgtggaagaacatcagacaggcaaattaatgttgattttaggtgcaccaggaaataaaggcgagagcagacgagctgattttggtagggtgattcatcagcatccaaacctcaccgtcattctcactgctgatgaccctaatttcgaggatccagaagatatttcaaaagaaattgccagccatatcgcacgcccagtagagattattagtgaccgtgagcaagctattcaaaaagccatgtctctttgccaaggagcaaaagatgctgtgattatcgctgggaaaggcgcagatgcttatcaaattgttaaaggacaacaagtagcttatgctggtgatttagcaatcgccaaacactacctctag

SEQ ID NO: 38224 - DNA, 1635 bp, Streptococcus pyogenes
atgtcgacagaaaaaaaacaactgacacaagaagaattgatggttcagggagcagcctggtccacagctggtaatttcattagccgacttttgggagtgttatacattattccctggtacatttggatggggcaatacgcgattcaagccaacgctcttttcaatatggggtataatgtttatgcttattttttattgatttcaaccacaggactcaatgttgcgattgctaagcaggttgccaagtacaattccatgggacaaactgagcatagctatcaattaatccgaagtaccctaaaactcatgcttggtctgggccttattttttcagccattatgtatctgggctctcctttatttgcgagcttatctggtggtgatgacacacttgttcccattatgcacagcctttctttagcagtttttatttttcctgtaatgagtgtgattcgaggcatctttcaaggccacaataatatcaagccttatgcagttagtcagattgctgagcaactcattcgggttatctggatgcttttgaccaccttttttatcatgaagttgggttctggtgattacgcttcagcagtgactcagtcaacttttgcagcctttatcgggatggtggctagtatgggtgttctggggtactatctttggaaacagggacttctagcagctatttttagtaagccagatcatactgtttctattgatatcaagggcttgttgcttgaaaccttaaaagaatccatcccctttatcgtaacaggaagtgccattcaagcctttcaattgattgatcaatggacttttgtcaatacgatgactctttttacagattatagccgttctcaattgcttgttttatttggttactttaacgcaaacccagccaaaattacaatggtcttaattgcagtagcagcatctattggtggtgtaggtattgccttgttaactgaaaattatgtcaaaaaagacatgaaagcagctgctcgtttaatcattaacaacattgaaatgttagtgatgtttttgttacctgctcttactggggcaattattttagcaagacctctatattctgttttttacggagctagcgaggagcgtgccattcacctctttgtggcggttctctttcaaaccttgctactggcgctttacaccctcttttcaccgatgcttcaagctctttttgaaaatcgaaaagcgatttactactttgcctatggtatcttgattaagttagttttacagataccgcttatttatttgctacatgcttatggtcctttactagcgacgacgattgctttagtggtgccgatttatttgatgtatcgacgcctatatcaggttactcattttaaccgcaaactgttgcaaaaacgtttattattaaccttaattgaaaccttattaatgggactggtcgtgtttgtggccaactggctattgggctatgcctttaaaccgacaggccgcttgaccagccttctttacctcctcattattggtggcttgggaatgacggtttacacggcactcaccttgctgacgcatcaactggataaattaattggtagcaaagctagtcgccttcgtcagaaattaggctggcattaa

SEQ ID NO: 38225 - DNA, 630 bp, Streptococcus pyogenes
atgggaaaatgtcaagttatttcgcatccgcttatccaacacaaactttcaatcttacgtcgtcaaaccacatcaactaaagattttcgtgagttggttaatgaaattgcgatgctgatgggatatgaagtgtcacgcgaccttcccttagaagatgtcgacatccaaacgccagtctcaaaaacggtccaaaaacagttagctggtaaaaaattagctattgttccgattcttcgtgctggtattgggatggttgatggcttgttaagtttggtaccagctgcaaaagttggccatatcggcatgtaccgtaatgaagaaacccttgaacctgttgaatacctcgttaaactaccagaagatattaaccaacgacaaattttccttgttgatccaatgttggcaacaggtggctcggctatcttagcagtggattcgttgaaaaaacgtggcgcagcaaatattaagtttgtctgtttagttgcagcaccagaaggggtgaaaaaacttcaagaagctcatccagatattgatatcttcacagcagcacttgatgatcatttaaatgaacatggctatatcgtgccaggattgggcgatgctggtgatcgtttatttgggacaaaataa

SEQ ID NO: 38226 - DNA, 636 bp, Streptococcus pyogenes
atgatcacaggaaaactcataaccgttgaaggtccagatggcgcagggaaaacgactgttttagagcaactcattccactgttaaaacaaaaagtggctcaggatatcttgacaacaagagagcctggaggtgttgccatttcagaacacattagagaacttattttagacatcaaccatactgctatggaccctaaaacagaactcttactttatattgcggctcgaaggcagcatttggtggaaaaggtactaccagctcttgaagcaggccagttggtttttattgatcgtttcatcgatagttcagtagcttatcaaggtgcgggacgcggtttgatcaaagcagacattcagtggctcaacgagttcgcaacagatggtttagagcctgacttgaccctttattttgatgttccttctgaaattggtttagcacggattaacgcgaaccaacaaagagaagtcaatcgtttagatttggaaacaatagagatacatcaacgagtacgaaaaggatacctagccttagctaaggagcatccaaaacgtattgtcacaattgatgcgactaaaccattgaaagaagttgtctctgtcgctttggaacatgtcttagccttgcttttagcctag

SEQ ID NO: 38227 - DNA, 876 bp, Streptococcus pyogenes
atggatttagcgcaaaaagctcctaacgtttatcaagcttttcagacaattttaaagaaagaccgtctgaatcatgcttatcttttttcgggtgattttgctaatgaagaaatggctctttttttagctaaggtcatcttttgtgaacagaaaaaggatcagacgccctgcgggcattgtcgctcttgtcaattgattgaacaaggagattttgccgatgtgacggtattggaaccaacagggcaagtgattaaaacggatgtggtcaaagaaatgatggctaacttttctcagacaggatatgaaaacaaacgacaagtttttattatcaaagattgtgacaaaatgcatatcaatgccgctaatagcttgctaaaatacattgaggagcctcagggagaagcttacatatttttattgaccaatgatgataacaaagtgcttccgaccattaaaagtcggacacaggtttttcagtttcctaaaaacgaagcctatctttaccaattggcacaagaaaagggattattaaaccatcaggctaagctagtagccaaacttgccacaaacaccagtcatctagaacgtctgttgcaaacgagcaagcttttagaactgataactcaagcagagcgttttgtatctatttggctgaaagatcagttgcaggcatatttagcgttgaaccgtctggtacagttagcaactgaaaaagaagaacaagatttagttttgacccttttgaccttgctcttggcaagagagcgtgcgcaaacgcctttgacacaattggaggctgtctatcaggctaggctcatgtggcagagcaatgttaattttcaaaacacattagaatatatggtgatgtcagaataa

SEQ ID NO: 38228 - DNA, 864 bp, Streptococcus pyogenes
atgcaggttcaaaaaagttttaaagacaaaaaaacaagcggaaccttgtatttggttccaaccccaattggcaatctgcaggacatgacctttagagcagtggcaacgttaaaagaggttgattttatttgtgcagaagacacaagaaacacaggtcttttgctaaaacactttgatattgctaccaagcaaatcagctttcatgagcacaacgcctatgagaagattcctgatttaattgatttattaatatcaggacggtcactagctcaggtgtctgatgcaggaatgccatcgatttctgatcctgggcatgatttggtcaaggctgctattgatagtgatatcgcagtcgttgctttaccaggtgcctcagcagggattacagctttgattgctagtggactggctcctcaaccccatgttttttatgggtttttacccagaaaagcagggcaacaaaaggctttctttgaggacaaacaccattacccagagacacaaatgttttatgaatcaccctatcgcatcaaagataccctgaccaatatgttggcttgttatggtgatcgtcaagtggtgcttgtcagagaattaaccaagctttttgaggagtaccaacgggggtcgatttcagaaatcttgtcctaccttgaggaaacacccctcaaaggggagtgtctgctgattgtggctggagcccaagcagacagtgaggttgagctgacagctgatgttgacttagtgtctctagtgcaaaaagaaattcaagcaggagccaagccaaatcaggctattaaaacaattgctaaagcttaccaggtaaatcgccaagagctttaccaacaatttcatgacttataa

SEQ ID NO: 38229 - DNA, 1188 bp, Streptococcus pyogenes
atgtcaatggcacaaaaaacagtcatcaccgaagaaacaaccgattttgttatggatttcaaaacaagtagcgctgagggaaatgttgattttattaacgtttttgaccttgagaaaatggcacaacaggtcatccctaaaggagcctttggttatattgctagtggtgctggtgatacctttaccctccatgaaaatattcgctcatttaatcataaattaattgtccctcactccctcaaaggggttgaaaatccgtcaacagagattacgtttgatggtgattacttaacctctcctcttattttagcacctgtagcggctcataaactggccaatgaacaaggagaagtagcgtctgctaaaggattgaaggaatttggaagtatctacaccactagttcctactcaacaactgacctgccagaaatcagtgctgccttaggtgggacaccccattggtttcaattttattacagtaaagacgatggcattaatcgtaatattatggatcgtgtcaaagcacaaggttgcaaagctatcgttttgacagcagatgcaacagttggaggaaaccgcgaagttgataggcgaaacggttttgtttttccggtcggtatgccaattgttcaagaatatttacctgatggtgcaggtaaaacaatggattatgtctataaatcagctaaacaagcgcttacctcaaaagatattgaatatatcgcaacttactcaggcctgcctgtttatgtcaaaggaccacagtgtgctgaggataccttgcgggcattggacgcaggagcatcaggtatctgggtaaccaatcatggtggccgtcaattagatggtggtccagctgcttttgattccttacaagaagtcgctgaagcagttgatcaaaaagttcctattgtctttgactcaggtataagacggggtcaacatattttcaaagctcttgcttcaggtgctgaccttgttgccttggggcgtccagcgatttacggcttggctatgggaggaagcattggtactcgtcaggtctttgaaaagttaaatgacgagttaaaaatggttatgcaactggctgggacacaaactatccaagatgttaaagcctttaaccttcgccacaatccgtatgattcatcgattccatttgatcaaaatgcgctacgcttagattag

SEQ ID NO: 38230 - DNA, 4944 bp, Streptococcus pyogenes
gtggagaaaaagcaacgtttttcccttagaaaatacaaatcaggaacgttttcggtcttaataggaagcgttttcttggtgatgacaacaacagtagcagcagatgagctaagcacaatgagcgaaccaacaatcacgaatcacgctcaacaacaagcgcaacatctcaccaatacagagttgagctcagctgaatcaaaatctcaagacacatcacaaatcactctcaagacaaatcgtgaaaaagagcaatcacaagatctagtctctgagccaaccacaactgagctagctgacacagatgcagcatcaatggctaatacaggttctgatgcgactcaaaaaagcgcttctttaccgccagtcaatacagatgttcacgattgggtaaaaaccaaaggagcttgggacaagggatacaaaggacaaggcaaggttgtcgcagttattgacacagggatcgatccggcccatcaaagcatgcgcatcagtgatgtatcaactgctaaagtaaaatcaaaagaagacatgctagcacgccaaaaagccgccggtattaattatgggagttggataaatgataaagttgtttttgcacataattatgtggaaaatagcgataatatcaaagaaaatcaattcgaggattttgatgaggactgggaaaactttgagtttgatgcagaggcagagccaaaagccatcaaaaaacacaagatctatcgtccccaatcaacccaggcaccgaaagaaactgttatcaaaacagaagaaacagatggttcacatgatattgactggacacaaacagacgatgacaccaaatacgagtcacacggtatgcatgtgacaggtattgtagccggtaatagcaaagaagccgctgctactggagaacgctttttaggaattgcaccagaggcccaagtcatgttcatgcgtgtttttgccaacgacatcatgggatcagctgaatcactctttatcaaagctatcgaagatgccgtggctttaggagcagatgtgatcaacctgagtcttggaaccgctaatggggcacagcttagtggcagcaagcctctaatggaagcaattgaaaaagctaaaaaagccggtgtatcagttgttgtagcagcaggaaatgagcgcgtctatggatctgaccatgatgatccattggcgacaaatccagactatggtttggtcggttctccctcaacaggtcgaacaccaacatcagtggcagctataaacagtaagtgggtgattcaacgtctaatgacggtcaaagaattagaaaaccgtgccgatttaaaccatggtaaagccatctattcagagtctgtcgactttaaagacataaaagatagcctaggttatgataaatcgcatcaatttgcttatgtcaaagagtcaactgatgcgggttataacgcacaagacgttaaaggtaaaattgctttaattgaacgtgatcccaataaaacctatgacgaaatgattgctttggctaagaaacatggagctctgggagtacttatttttaataacaagcctggtcaatcaaaccgctcaatgcgtctaacagctaatgggatggggataccatctgctttcatatcgcacgaatttggtaaggccatgtcccaattaaatggcaatggtacaggaagtttagagtttgacagtgtggtctcaaaagcaccgagtcaaaaaggcaatgaaatgaatcatttttcaaattggggcctaacttctgatggctatttaaaacctgacattactgcaccaggtggcgatatctattctacctataacgataaccactatggtagccaaacaggaacaagtatggcctctcctcagattgctggcgccagccttttggtcaaacaatacctagaaaagactcagccaaacttgccaaaagaaaaaattgctgatatcgttaagaacctattgatgagcaatgctcaaattcatgttaatccagagacaaaaacgaccacctcaccgcgtcagcaaggggcaggattacttaatattgacggagctgtcactagcggcctttatgtgacaggaaaagacaactatggcagtatatcattaggcaacatcacagatacgatgacgtttgatgtgactgttcacaacctaagcaataaagacaaaacattacgttatgacacagaattgctaacagatcatgtagacccacaaaagggccgcttcactttgacttctcactccttaaaaacgtaccaaggaggagaagttacagtcccagccaatggaaaagtgactgtaagggttaccatggatgtctcacagttcacaaaagagctaacaaaacagatgccaaatggttactatctagaaggttttgtccgctttagagatagtcaagatgaccaactaaatagagtaaacattccttttgttggttttaaagggcaatttgaaaacttagcagttgcagaagagtccatttacagattaaaatctcaaggcaaaactggtttttactttgatgaatcaggtccaaaagacgatatctatgtcggtaaacactttacaggacttgtcactcttggttcagagaccaatgtgtcaaccaaaacgatttctgacaatggtctacacacacttggcacctttaaaaatgcagatggcaaatttatcttagaaaaaaatgcccaaggaaaccctgtcttagccatttctccaaatggtgacaacaaccaagattttgcagccttcaaaggtgttttcttgagaaaatatcaaggcttaaaagcaagtgtctaccatgctagtgacaaggaacacaaaaatccactgtgggtcagcccagaaagctttaaaggagataaaaactttaatagtgacattagatttgcaaaatcaacgaccctgttaggcacagcattttctggaaaatcgttaacaggagctgaattaccagatgggcattatcattatgtggtgtcttattacccagatgtggtcggtgccaaacgtcaagaaatgacatttgacatgattttagaccgacaaaaaccggtactatcacaagcaacatttgatcctgaaacaaaccgattcaaaccagaacccctaaaagaccgtggattagctggtgttcgcaaagacagtgtcttttatctagaaagaaaagacaacaagccttatacagttacgataaacgatagctacaaatatgtctcagtagaagacaataaaacatttgtggagcgacaagctgatggcagctttatcttgccgcttgataaagcaaaattaggggatttctattacatggtcgaggattttgcagggaacgtggccatcgctaagttaggagatcacttaccacaaacattaggtaaaacaccaattaaacttaagcttacagacggtaattatcagaccaaagaaacgcttaaagataatcttgaaatgacacagtctgacacaggtctagtcacaaatcaagcccagctagcagtggtgcaccgcaatcagccgcaaagccagctaacaaagatgaatcaggatttctttatctcaccaaacgaagatgggaataaagactttgtggcctttaaaggcttgaaaaataacgtgtataatgacttaacggttaacgtatacgctaaagatgaccaccaaaaacaaacccctatctggtctagtcaagcaggcgctagtgtatccgctattgaaagtacagcctggtatggcataacagcccgaggaagcaaggtgatgccaggtgattatcagtatgttgtgacctatcgtgacgaacatggtaaagaacatcaaaagcagtacaccatatctgtgaatgacaaaaaaccaatgatcactcagggacgttttgataccattaatggcgttgaccactttactcctgacaagacaaaagcccttgactcatcaggcattgtccgcgaagaagtcttttacttggccaagaaaaatggccgtaaatttgatgtgacagaaggtaaagatggtatcacagttagtgacaataaggtgtatatccctaaaaatccagatggttcttacaccatttcaaaaagagatggtgtcacactgtcagattattactaccttgtcgaagatagagctggtaatgtgtcttttgctaccttgcgtgacctaaaagcggtcggaaaagacaaagcagtagtcaattttggattagacttaccggtccctgaagacaaacaaatagtgaactttacctaccttgtgcgggatgcagatggtaaaccgattgaaaacctagagtattataataactcaggtaacagtcttatcttgccatacggcaaatacacggtcgaattgttgacctatgacaccaatgcagccaaactagagtcagataaaatcgtttcctttaccttgtcagctgataacaacttccaacaagttacctttaagataacgatgttagcaacttctcaaataactgcccactttgatcatcttttgccagaaggcagtcgcgttagccttaaaacagctcaagatcagctaatcccgcttgaacagtccttgtatgtgcctaaagcttatggcaaaaccgttcaagaaggcacttacgaagttgttgtcagcctgcctaaaggctaccgtatcgaaggcaacacaaaggtgaataccctaccaaatgaagtgcacgaactatcattacgccttgtcaaagtaggagatgcctcagattcaactggtgatcataaggttatgtcaaaaaataattcacaggctttgacagcctctgccacaccaaccaagtcaacgacctcagcaacagcaaaagccctaccatcaacgggtgaaaaaatgggtctcaagttgcgcatagtaggtcttgtgttactcggacttacttgcgtctttagccgaaaaaaatcaaccaaagattga

SEQ ID NO: 38231 - DNA, 2001 bp, Streptococcus pyogenes
atgatgaaaaaaccattttacattacgacacccatttattacccatctgggaaattacacattggttctgcctatacaactattgcttgtgatgtcttggcacgctacaagcgcctgatgggccatgaggtcttttacctcacaggactagatgaacacggacaaaagattcaaaccaaggcaaaagaagctggtattacacctcaaacctacgttgataacatggcaaaggatgtcaaagccctttggcaattgctagatatttcctatgacacatttatccggacaacggacgattaccacgaagaggtcgttgctgctgtctttgaaaaattgctggcgcaagatgacatttaccttggcgaatactctggttggtattctgtctctgatgaggaatttttcactgaaagccaattaaaagaagtctttagagatgaagacggtcaggttattggagggattgccccatcaggtcatgaggtcgagtgggtctctgaagaatcctacttcctacgccttagcaaatacgatgatcgtcttgtggccttctttaaagagcgacctgactttatccaaccagatggtcgtatgaatgaaatggtgaaaaactttatcgagccaggcctagaagatttggctgttagccgtactacctttacatggggtgtacctgttccatcagacccaaaacacgtggtttatgtctggatcgatgccctcttaaactacgcgacagctcttggttatcgtcaagctaatcacgctaactttgataagttttggaatggaacggttttccacatggttggaaaagatatcttgcgttttcatagcatctactggccaattttactcatgatgcttgatttaccaatgccagaccgcttaattgcccatggttggtttgtcatgaaagacggtaaaatgtctaaatcaaaaggcaatgtggtctatccagaaatgttagttgagcgctttggacttgatcctcttcgttattacctcatgcgttctttgccagttggttcagacgggacctttacccctgaagattatgtgggtcgtatcaactatgagttagccaacgaccttggcaatttattgaaccgtaccgttgccatgatcaacaagtattttgacggcacggtgccagcttatgttgacaatggaactgcctttgatgctgacttaagtcaactgattgatgctcagctagcagactaccataagcacatggaagcggtggactacccacgcgccttggaggctgtttggaccatcatcgctcgtaccaacaaatacatcgatgaaaccgctccttgggtgctcgctaaagaagatggtgacaaagctcaactagccagtgtcatggcacacttagcagccagcttgcgtctggtcgctcatgtgatccaaccctttatgatggaaacatcagctgctatcatggcccagcttggtttggaacctgtttctgatttgtcaacacttgctctagcagattttcctgccaatacaaaggttgttgccaaagggacaccgattttcccacgtcttgacatggaagctgagattgactacatcaaagcccaaatgggtgacagctcagctatttcccaagaaaaagaatgggtccctgaagaggttgcgctcaaatctgaaaaagacgtcatcacatttgaaacctttgatgctgtggaaatccgtgtggcagaagtcaaggaagtgtcaaaagtggaaggttcagaaaaattgctgcgctttagagtagatgcaggagacgggcaagaccgtcaaatcttgtcaggtattgccaaattttaccccaacgaacaagaattagtgggtaaaaaactacaaattgttgctaacctgaaaccgcgtaaaatgatgaaaaaatacatcagtcaagggatgattctatcagcagagcatggagatcagctaacggtcttaaccgttgattcctctgttccaaatggaagtatcattggctga

SEQ ID NO: 38232 - DNA, 489 bp, Streptococcus pyogenes
atggcagagctgattattgtgtatttttcatctaagtccaataacacccatcgcttcgtccaaaaattaggcctgcctgctcagcgcataccagtagataataggccacttgaagtttccacccattaccttttgattgtgcctacctatgcagctggtggctcagatgccaaaggagccgtttctaaacaagtgattcgttttttgaataatcctaacaatcgtaaacattgtaagggagtgatttcttctggaaataccaattttggcgatacctttgccttagcaggccctatcatttctcaaaaattgcaggtccccttattacaccaatttgaactattaggcactgctacagatgtcaaaaaggtacaggcgatttttgcccgcttaaagcatcacacacacgacaagcaaaaacaaaccaacaacctgattacagaaaggacacacccatgtcacaaaccaatgcgtcatacctctcattaa

SEQ ID NO: 38233 - DNA, 2181 bp, Streptococcus pyogenes
atgtcacaaaccaatgcgtcatacctctcattaaatgcactgacccgttttaaaaaaccagacggcagctaccattttgatagcgataaagaagctgttaggcgctacctggaagaacatgtctctcccaatcaaatggcttttaactcactagaagataagctagcttacctcatcaatgaagggtattatgagcaggccatttttgatgcctatcctaatgaccttatcaaggaggcctttcattatgcctatcaacaaggctatcgctttttaaatctcatgggcgctatgaaattttaccagtcctatgccttaaaaaccttggacggtaagcagtatctagaaacatttgaagaccgtgctgtgatgaatgcactctttttagctgatggagatcaaacctttgtctttgacgtgattgatgccatcttgcaccgacgctttcaaccagctaccccaacgtttttaaatgccggaaaaaaacgccgtggcgaatacatttcgtgctatcttcttcgtgtcgaagacaatatggaatctatctctcgcgccattagcaccagcttgcaactctcaaaaagaggaggcggagtcgccttgtgcctcaccaacctcagagaaatcggagcaccgataaaagggattgaaaatcaggcaacaggcatcgttcctgtcatgaaactactagaggactctttttcctatgccaatcaactaggtcagcgccaaggagcaggtgcggtttaccttcatgcccatcaccctgaggttttgacctttttagacaccaaacgtgaaaatgccgatgagaaaattcgcattaagtccctagcattgggacttgtgatcccagatattaccttccagttagccaaagaaaacaaagacatggcactcttttcaccctatgatatcaagcgtgcctatggcaaggacatgtcagacatctccatcacagaggaatacgataaactgctagccaatccagccatcaaaaagacctacatcagtgctagaaagttctttcagttaattgcagagctacattttgagtcaggctacccttacctcttgtttgatgacacggtcaataagcgcaaccctcatgccaaaaaaggcagaatcgtcatgtctaacctgtgttctgaaatcgctcaagttagcaccccaagcactttcaaagaagatttgagttttgaaaccattggagaggatatctgctgtaatttagggtctatcaatattgcccaggctatggcagatgcgccacactttgaacagctcatcacaacgagcatcagagcacttgatcgtgtctctagagtgtctgacctgaattgtgcgccttctgttgagacaggcaatgcagccaaccatgcagtaggattaggcgccatgaacctacatggttttttggcaaccaaccacatctactatgatacaaaagaagccgttgactttacagatctgtttttccatgccatggcctattatgcttttaaagcctcttgccaattagccaaagaaaaaggcgcttttgcaggattttcgttatcaacctattcagatggcacttattttgccaagtatttgcaagaagatgccaagccacaaacagccaaggttgccacattgttgcaagattacggcttcacgttgccaacggtggcggattggcaagccctagtagcagatatcaagcagtttggcctagccaatgcgcacttgctagcggttgctccgacaggctccatcagctacttatcatcctgcactccgagtctacaaccagtcgttgctcctgttgaggtccgaaaagaaggtagcctgggcaggatttacgtccctgcctatcagattgaccaggctaactatgcttactatgaacgtggtgcctatgaggtcggcccaaaagccatcatcgacgttgtagctgctgcccaaaaacacgttgaccaagccatctcattgaccctgtttatgaccgatcaagcgaccacacgtgacctgaaccgctcctatatccaagcttttaagcaaaattgtgcatcgatctattatgtgcgagtgaggcaagacgtcctagcaggcagcgaacagtatgacgaggatagtcttgtgacagctcctggagctagtgatgagaccaccacagagtgtcaaagctgtatgatctaa

SEQ ID NO: 38234 - DNA, 960 bp, Streptococcus pyogenes
atgaaattagcggttttggggacaggtatgattgttaaggaagttttgcctgtcttgcagaaaattgatggtattgatttagttgctatcttatcaacagttagaagtttaacgacagctaaagacctcgctaaggcacatcacatgcctctagctacgagtaaatatgaggctatcttaggcaatgaggagattgacacggtttatattggactgccgaatcacctgcattttgcctatgctaaggaggcccttctagctggcaaacatgtcatttgtgaaaagccctttaccatgacagcaggagaattagatgaactggtggtaatcgctagaaaacgaaaactcattttgttagaagcgattacgaatcagtacctgagtaacatgacctttatcaaagagcatcttgaccaacttggcgatatcaaaattgtagaatgcaattattcacaatattcttcacgctacgatgccttcaaacgaggtgatatcgcgccagcttttaatcctaaaatgggtggtggagctttacgtgatttaaacatctacaacattcattttgtggtagggttatttggtcgccctaaaacggttcaatatttagccaatgtcgaaaaaggcattgacacctcaggcatgcttgtcatggactatgagcagtttaaagtggtgtgtatcggggccaaagactgcactgcagaaatcaaatcaaccatccaaggtaacaaagggtcactggcagtgcttggagcaacaaataccctccctcaggttcagttaagtctacacggtcacgaaccacaagtgattaaccacaacaagcatgaccaccggatgtatgaagagtttgtcgcttttagggacatgattgaccaaagagactttgagaaagtgaatcaggctttggaacatagccgagctgtcatggctgtgttggagcgcgctgttcattcgtga

SEQ ID NO: 38235 - DNA, 1383 bp, Streptococcus pyogenes
atgacaaattatgccattattttagcagcgggcaaagggactcgcatgacttctgatctcccaaaagttcttcataaagtatctggactaaccatgcttgagcatgtttttcgtagtgtaaaagcgattagtcctgaaaaatccgtgacggttattggtcacaaatcagaaatggtacgtgctgtcttagcagatcaatcagcctttgtccatcaaacagagcagttaggaactggccatgccgtgatgatggcagaaacacaactagaaggactagaagggcataccttggtgattgcaggagatactcccttgatcactggagaaagcctgaagagtctgattgattttcatgtgaatcataaaaatgtcgccactattttaacagctacggctcaagatccatttggttatggtcgtattgttcgcaacaaagatggcgaagtgatcaagattgttgagcaaaaagacgccaatgagtatgagcaacaattaaaagaaatcaatacaggaacctatgtgtttgataacaagcgtctctttgaagcgctcaaatgcatcactaccaacaatgctcaaggagagtattacctgactgacgttgtggctatttttagagcaaacaaagaaaaggtaggagcctatatcctgagagacttcaatgaaagtctgggagtaaatgatcgtgtggccttagcaatagctgaaacagtgatgcgtcagcgcattacccaaaaacatatggtcaatggggtgactttccaaaatcctgaaactgtttatattgaaagcgatgttgagattgctccagacgtccttatcgaaggaaatgtgaccttaaaagggcgtacacatatcggctcaggaactgtcttgacgaatggtacttatattgtggattctgaaattggtgataactgtgttgttaccaattcgatgatcgaatcatctgttttagctgcaggagttacggttggcccttacgcccaccttcgaccgggaacgaccttagatagggaagtccatatcggtaactttgtcgaggtcaagggttctcacattggtgaaaaaacaaaggctgggcatctgacttatattggaaacgctcaggttgggtcttcagtcaatgttggggctggaaccatcactgtcaactacgacggccaaaacaaatatgaaacagtcattggagatcacgcttttattgggagcaactcgactctcattgcacctttggaagttggggatcacgctttaacagcagcaggttcaacgatttcaaaaacagttcctatcgatagcattgctattggtcgtagccgccaagtcacaaaagaaggttatgccaagcgcctagcgcatcacccaagtcgaagcaaataa

SEQ ID NO: 38236 - DNA, 696 bp, Streptococcus pyogenes
atgaaaataggaattattgctgctatggaggaggagttgtccctgctcttagcaaatcttttggatgctcaagaacatcaggtgctttcaaaaacttactatacgggtcgttttggcaagcatgagctcattttggtacagtcgggtgttggaaaagtgatgtctgctatgacagttgcgatcttggttgagcatttcaaagcccaagctattatcaatacaggatcagcaggggcagtcgcttcacatttagcgatcggagatgtggtggttgcagatcggttagtgtatcatgatgtggatgctactgcatttggttatgcttatggtcaaatggctggtcaaccattatactatgattgtgatccacagtttgtggctatcttcaaacaagtcctaaaacacgaaaagacaaatggccaagttggtttgattgcaacaggagacagttttgttgctggtcaggacaagattgaccagatcaaaacagcttttagcgacgtgttagcagtagaaatggaaggcgcagctattgctcaagcagcacatactgcagggaaacccttcatcgttgttcgtgcgatgagtgataccgcagcgcatgatgccaatattacttttgatcaatttattatagaagctggcaagcgttcggcccagacattaatgacatttttagaaaacttacctgtttaa

SEQ ID NO: 38237 - DNA, 2406 bp, Streptococcus pyogenes
atggttaaaagaaatcaaagaaaaaaaagtgcgcctaagaagcgtttaacaaaagcagaagtggaaaagcaacgtgccattaagaggatgattttatctgttttaatggctttgttgcttatttttgcgatgcttcgcttgggcgtctttggtgtgacaacttataatatgattcgttttttggtgggtagtttagcctatccgtttatgtttgcctggttaatttacttattttgttttaaatggttacggcaaaaagatggaatgattgcgggagttgttattgcctttttgggattgctagttgagtggcacgccttcttatttgcgatgcctaggatgcttgatcaagatatttttctaggcactgctcggctaattacaagagatttactagccctgcgcgtgactgaatttgttggtggaggaatgcttggtgcattactttataaacccatagcctttttattttcgaatatcggctcttactttattggttttttgtttatcttattaggattatttctaatgacgccttgggatatctatgatgtgagtcactttgtgaaagaggctgttgataaactagcagtggcttatcaggaaaataaagaaaagcggttcatcaaacgagaagagcaccgcttacaagctgaaaaagaggctttagagaaacaagcacaagaggaagaaaaacgtctagcagaattgacggttgatcctgagacgggagagattgttgaggatagtcagtctcaagtcagctatgatttggctgaggatatgacaaaagaaccagagattcttgcttatgatagtcacctcaaagacgatgagacaagcttatttgatcaagaagacttggcttacgctcatgaggaaattggggcttatgactctttatctgctttagcatcttctgaagatgagatggatatggatgaacctgttgaagttgatttcacaccaaaaacccatcttctttataaacttccaacgatagatttatttgcaccagataagcccaaaaaccagtccaaagagaaaaacttagtccgcaaaaatatcaaggtgcttgaagataccttccaaagttttgggattgatgtcaaggtagagcgagcagaaatcgggccttccgtcaccaaatatgaaatcaagccagctgtcggggtccgagttaatcgtatttcaaatcttgctgatgatttggcacttgctctggctgctaaagatgttcgtattgaagcaccaattcctggaaaatccttaataggtattgaagttcctaactcagaaattgcaacggtttctttccgcgaactttgggaacaatctgatgccaatcctgaaaaccttttagaagtaccactaggtaaagctgttaatggcaatgcgcgcagttttaacttagctagaatgccgcatcttttggtagctggttcaactggttcaggtaaatctgtggcagttaatggcattatttcaagtattttgatgaaggcacgtccagatcaagttaagtttatgatgattgaccccaaaatggttgaattatctgtttataatgatattccacatttattaatcccagttgtaaccaatccgcgtaaagccagtaaggcactccaaaaagtggttgatgagatggaaaaccgctacgagttatttagtaaaattggtgtgcgtaatatagcaggttataatacaaaggttgaagagtttaatgcttcttctgagcaaaaacaaataccgttgcctttaatcgttgtcattgtagatgaattggctgacttgatgatggtggctagtaaagaagttgaagatgctattattcgtttgggacaaaaagcacgtgctgcaggtatccatatgattcttgcaactcaacgtccctctgtagatgttatttctggtttgattaaagcaaatgttccgtcgcgtatggcatttgctgtttcaagtggtactgatagccgtacgatccttgatgaaaatggtgctgaaaagctcttgggacggggtgatatgctctttaagccgattgatgaaaatcaccctgttcgcttgcaagggtctttcatctcagatgatgatgtggagcgtattgtcaactttatcaaagaccaaactgaagcggattatgatgacgcctttgatcctggtgaagttagcgacaatgatcctggtttttctggaaatggcggagctgctgaaggtgatcctctttttgaagaagcaaaagccttggtcttagaaacacaaaaagctagtgcctcaatgattcaaaggcgtttgtcggttggatttaatcgtgccacgcgcttgatggatgaattggaagaagcaggtgttatcggtccagcagaaggaaccaagcctcgtaaggtattgcagacaaactaa

SEQ ID NO: 38238 - DNA, 426 bp, Streptococcus pyogenes
atggctaaaaaagtcgaaaaacttgtaaaacttcaaatccctgctggtaaagctacaccagctccaccagttggaccagctcttggtcaagcaggtatcaacatcatgggcttcactaaagaatttaacgctcgtacagctgatcaagctggtatgatcatcccagttgttatctcagtttatgaagacaaatcatttgatttcatcactaaaacaccaccagctgctgttcttttgaaaaaagctgcaggtgttgaaaaaggatcaggtacacctaacactactaaggttgcgacagttactcgtgcacaagtacaagaaattgctgaaactaagatgccagatttgaacgctgcaaacattgaagctgcaatgcgtatgatcgaaggtactgctcgttctatgggattcactgttactgactag

SEQ ID NO: 38239 - DNA, 690 bp, Streptococcus pyogenes
atggctaaaaaaagcaaacaaatgcgtgctgcacttgaaaaagtagatagcacaaaagcgtacagtgtagaagaagctgtagcattagtaaaagaaacgaacttcgcaaaatttgatgcgtctgttgaagttgcttacaacttgaacattgacgttcgtaaagcagaccaacaaatccgtggcgcaatggtattgccaaacggaactggtaaaacacaacgtgttcttgtttttgcacgtggtgcaaaagctgaagaagcaaaagcagctggtgcagacttcgtaggtgaagacgaccttgttgcaaaaatcaatggtggatggcttgactttgacgttgttatcgcaacgccagacatgatggctatcgtaggtcgtcttggacgtgtccttggacctcgtaacttgatgccaaaccctaaaactggtacagtaacgatggatgttgctaaagccgttgaagagtctaaaggtggtaaaatcacttaccgtgctgacaaagcaggtaatgttcaagctcttattggtaaagtttcatttgatgctgacaaattggttgaaaacttcaaagccttccacgatgtaatggctaaagctaaacctgcaacagctaaaggaacttacatggcaaacgtctcaatcacatcaacacaaggtgttggtatcaaggttgatcctaactcactttaa

SEQ ID NO: 38240 - DNA, 729 bp, Streptococcus pyogenes
gtggaacctaaatatcaacgtatattaattaagttatctggtgaagcattagcaggtgaaaaaggagttggcattgacattccaactgttcaggctattgcaaaagaaattgccgaagttcatgtgtcgggagtacagatcgctcttgttattggtggaggcaatctctggcgtggagagcctgcagcagacgctggaatggaccgtgttcaggctgattacactggcatgcttggaacggtgatgaatgccctagtcatggctgatagtcttcaacattatggtgttgatacccgtgtgcaaacagctattcctatgcaaaatgtagcagaaccttatattcgcggacgtgccttgcgccatctagaaaaaaatcggattgttgtttttggagctggtattggctcgccttatttttcaacagacaccaccgcggcactgcgtgctgctgagattgaagcagatgctattttaatggcaaaaaatggtgtggatggggtctataatgctgatcctaaaaaagatgctaatgcggttaaatttgatgaattaacacatggtgaagtgatcaaacgtggtctcaaaatcatggatgcaacggcatcgaccttatcgatggataacgatattgatttggtggttttcaatatgaatgaagctggcaatattcaacgtgttgtctttggagaacatattggaactactgtatcaaataaagtttgtgactaa

SEQ ID NO: 38241 - DNA, 558 bp, Streptococcus pyogenes
atggcaaatgcaattattgaaactgcaaaagaacgttttgcacaatcccatcagtctttatcacgtgaatatgccagcattcgtgcgggtcgtgccaacgctagtcttttagaccgtatccaagttgattattacggggcaccgacaccattaaatcaattggcttcaatcactgtaccagaagcgcgtgtcttattgatctcgccttttgataaatcttctatcaaagatatcgagcgcgctcttaacgcatcagatttaggcattacacctgctaacgatggctctgtcattcgtttggttattccagctttgaccgaagaaacacgtaaagaattagccaaagaagtgaaaaaagttggtgaaaatgctaaaattgcaatccgtaatatccgccgcgatgctatggatgatgctaaaaagcaagaaaaagcaaaagaaatcactgaagatgagttaaaaacacttgagaaagatatccaaaaagcaaccgatgatgctatcaaagaaattgaccgcatgacggctgaaaaagaaaaagaattgctctcagtgtaa

SEQ ID NO: 38242 - DNA, 1773 bp, Streptococcus pyogenes
atgtattatactagtggtaattacgaagcttttgcaacacctcgaaaacccgaaggggtagatcagaaatcagcttatattgttggtactggtttagctggtttagcagcagctgttttccttattcgcgatgggcatatggctggggaacgcattcatctgtttgaggaattgcctttagcaggtggttctttagatggtattgaaaagcctcatcttggttttgtgacccgtggtggtcgtgagatggaaaatcattttgagtgtatgtgggacatgtatcggtctattccctcactggaaattcccggtgcgtcttatttagatgaattttattggttggataaggatgatcctaactcatccaactgtcgtttgattcacaagagaggaaatcgtgtggatgatgacggccagtatacgctcggtaaacagtcaaaagaattaatccatttaatcatgaagacagaagaatctctaggagaccaaaccattgaagagttcttctcagaagatttctttaagagtaatttttgggtgtattgggcaaccatgtttgcttttgaaaaatggcattctgctgtagaaatgcgacgctatgcgatgaggtttatccaccatattgatggtttgccagatttcacctccctcaagttcaacaaatataaccaatatgactctatggtcaaaccgattattgcttacctagaatcacacgacgttgacatccaatttgacacaaaagtcactgatattcaggtggagcaaacagctggtaaaaaggtagcaaaaaccatccatatgacggtgtctggggaggctaaggcgattgagctaacacctgatgatttggtttttgtgaccaatggttctattactgaaagcagcacatacggtagtcatcacgaagtggctaagccaaccaaagcgttaggtggttcttggaatttatgggaaaatctagctgctcaatcagatgattttggtcatcctaaagtgttttaccaggacttgcctgctgaaagctggtttgtgtctgctacagcaaccataaaacacccagctatcgagccttatatagaacgtttgacccaccgtgacttgcacgatggcaaagtgaacactggcggcatcatcactattacagattctaactggatgatgagctttgccattcaccgtcaacctcattttaaagaacaaaaagaaaatgagaccactgtctggatttacggtctttattccaatagtgagggcaattacgtccacaagaaaattgaggagtgtacaggtcaagaaatcacagaagaatggttgtaccaccttggggtacctgttgataaaatcaaggacttagcgagtcaggactatatcaatacagttcctgtttacatgccttatattacgagttactttatgccacgcgtcaaaggagaccgtccgaaagttatcccagatggttcagtcaacttggcctttattggtaactttgcggaatctccatctcgagatacggtctttacgactgagtattctattcgtactgccatggaagcagtgtatagcttcttgaatgtggaacgaggcatcccagaagtctttaattcagcctatgatattcgtgaattgctcaaagccttttattaccttaatgataaaaaggcaatcaaggatatggatttgccaattcctgcactgattgagaaaatcggacataaaaaaatcaaggatacctttatcgaagaattgctcaaagatgctaatcttatgtaa

SEQ ID NO: 38243 - DNA, 408 bp, Streptococcus pyogenes
atggccttacacgacaataataccaccaaacggaaatggaaaaacagaaccattacctcaagcttggagtttgccttgacaggggttttcacagcttttaaggaagaacgcaatctcagaagccaccttttgtctgcctgtttagcttgtgttgctggtttattttttagcatttcagccatcgaatggttatttttacttctagccatttttttggtcattaccttagaaattgtcaattctgctattgaaaatgtagttgatttggctagtgactatcacttttctatgctagctaaaaatgccaaggatatggcagcaggtgctgttttgatgatttctggctatgctgtcttgacaggacttattatttttattcctaaaatttggaatattttcgttcattaa

SEQ ID NO: 38244 - DNA, 897 bp, Streptococcus pyogenes
atgtttaaatcaggctttgtagccattcttggtcgtccaaatgttggcaaatccacctttttaaatcacgtcatggggcaaaaaattgccatcatgagtgacaaggctcagaccacccgtaataaaattatgggcatttacaccacagaaacagaacaaattgtctttattgatacgccaggtattcataaaccaaagaccgcccttggtgattttatggttgaatctgcttatagtactttacgtgaagttgagacggttcttttcatggttcctgccgatgaaaagcgtggtaagggtgacgacatgattatcgagcggctaaaagcagctaagattcccgttattttagtcatcaacaaaattgataaggttcatccagaccaacttttggaacagattgatgacttccatagccaaatggattttaaagaagtggtcccaatttctgccctagaaggtaataatgtgccaactttgatcaagttattaactgataatcttgaagaaggtttccaatattttccagaagatcagattactgatcatccagaacgtttccttgtgtcagaaatggttcgtgagaaggtactgcatttgacgcaacaagaggttccacattccgtagctgttgttgtcgaatccatgaagcgagatgaagagactgataaagtgcatatccgtgcaaccattatggtggagcgcgatagccaaaaaggcatcatcattggaaaacaaggagccatgctcaaaaaaatcggaaaaatggcgcgccgtgatattgaactcatgttaggcgacaaggtctacttagaaacgtgggtcaaagtcaagaaaaactggcgggataaaaagcttgatttagctgattttggctataatgagaaagaatactaa

SEQ ID NO: 38245 - DNA, 828 bp, Streptococcus pyogenes
atgccagaattaccagaagttgaaacggtccgacgaggacttgagactttagtgcttggccaagaaattgtggctgttacgcttaaagtgccaaaaatggttaaaaccgacttagagacgtttgccctgaccctacctggtcaaatcattcagtcagttggccgtcggggaaaatatttattaattgatttggggcaattagtgttggtatcacatttgcggatggaaggcaaatatttgctttttccagatgaggtccctgataacaaacactttcatgtcttttttgaattgaaaaatggttcgaccttggtttaccaagatgtgcgtaaatttggaacctttgatttgatagcaaaatctcaattatcagcgttttttgccaaacgaaaactaggccctgaaccaaagaaagagacctttaagttaaaaacctttgaggctgctctgctatcctcccaaaaacccataaaaccacatcttttagaccagaccttggttgctggtttagggaatatttatgtggacgaggtactttgggctgctaaggttcatccagaaactgcgtcttctaggttgaataaggcggagataaaacggctgcatgatgaaaccatacgaatcctagctttaggaattgaaaagggcggttcgaccgtccgtacttaccgtaatgctttgggagctgatggcaccatgcaggactatttgcaggtttatggtcaaactgggaaaccgtgtcctcgttgtggacaggctattgtcaaattaaaagttggaggaagggggacgcacatttgtccaaaatgccagaaaaaaagactatga

SEQ ID NO: 38246 - DNA, 1194 bp, Streptococcus pyogenes
gtgaactggcgacaaaatctaaaagtggcttggcttggtaacttctttactggggcaagcttttcacttgttatgccttttatggctctatatgtggaaaatttaggtactccgacagaattagtagaatactatgctggtctggcagttgctgtgacggcacttgcttcagctttatttgctcctgtttgggggaagttggctgatcgttatggccgaaaacctatgatgctgcgagccagttttgttatgacatttacaatgggtggtttagctattattcctaatgtgttttggttactcattttgagattattaacaggtgtctctgcgggctatgtgccaaatgccactgccttgattgccagccaagccccaaaagaggagtcaggttatgctttaggcacattagcaacaggagtgacagcaggcgctttaattggtcctttactagggggaattttggcagagctattaggaattcgacaagttttcttattagttggtgtgatattatttttatgttctttaatgacagctgtttatgttaaagaagagtttaagccggttaggcgctttgagatgatacctacaaaagtcattttaaaacaggtaaaaagtccccagattatgcttggtttatttgtgactagtatgattattcaaatttcagctcaatcagtggcccccattttatcattgtatattcgtcatcttggtcaaactcacaacttaatgtttacttcaggcctggtagtttcggccatggggttttctagcttatttagcagttcttacttaggaaaattaggagatcgatttggcaatcatcggttattgttagccgctttgtgttatagctttatcatgtattttagcagtgccttagcgcagaccagttttcaattaggagtactacgctttgcttatgggtttggtgtgggcgctttgatgccaagtattaactctttactaactaagttaacaccaaaagaaggtatttctagagtatttgcctataatcaaatgtttagtaaccttggtcaagtcattggcccttttattggatcaaatgtggctgtagtgttaggctaccgttctgttttttatgtgactagtttgattgtgtttgttaatttaatatggagtttgattatatttcgaaaatatattaaagttaaggatattgtgtga

SEQ ID NO: 38247 - DNA, 468 bp, Streptococcus pyogenes
atggcaaaaggtgaaggtcatatactggcgcaaaataaaaaggctagacatgattatcacattgttgaaaccgttgaagcagggattgtcttaacgggaactgagattaaaagtgttcgtgcagctcgtattcaactgaaagatggctttgcccaaattaagaatggggaagcgtggttggtcaacgtgcatattgcaccttttgaacaaggtaatatttggaacgctgatcctgaacgaacccgcaaactgctgctcaaaaaacgtgagattacgcatctagcaaatgaacttaaaggatctggcatgaccttagttcctctcaaagtttacctcaaggatggctttgctaaagttctgattggtctagctaaagggaaacacgagtatgacaaacgcgaaaccattaaacgccgtgatcaggaaagagatattaaaaaacaaatgaaacactacaatgcaaggtaa

SEQ ID NO: 38248 - DNA, 1335 bp, Streptococcus pyogenes
atgcgtataggtctattcacagatacctattttccacaagtttcaggagtcgctactagtattcgtacgttaaaagaagagctagaaaaagaaggtcacgaagtttatattttcaccactactgatagagatgtcaaacgctttgaagacccgaccattattcgactgccaagtgttccttttgtgtcatttacggatagacgtgtggtttatcgtggcctcatttcgtcatacaaaattgcaaaacactataatcttgatattattcatacgcaaactgagtttagcttaggcttattagggaaaatgataggcaaagctttgcgaattcctgttgtccatacttaccatacccaatatgaggactacgtgagttatattgccaacggaaaaatcattcgaccaagtatggtcaaacctcttcttaggggctatttgaaggatttggatggggttatctgcccaagtaggattgtcctcaatcttctagaaggttacgaagttactatccctaagcgggttatcccaacaggcattcctttggaaaaatatattcgtgatgacatcacagcagaagaagtaaccaacttaaaagcagaattgggcattgctggtgatgaaaccatgttattgagtttgtcacggatttcttatgaaaaaaatattcaagctatcatcaatcagatgccagctattttggctgaaaatgccaagataaagcttattattgtaggaaatggcccctatttgcaagatttgaaacacttggcgatgcagttagaggttgacaaacacgtgacctttacaggcatggtgcctcatgataaggttgctctgtactataaggcttgtgatttctttatctcagcatcaactagtgagactcagggcttgacctatattgaaagtttggctagtggcactcctattattgctcatggcaatccttatttagatgatgtggtgactgataaaatgtttggcactctttattacgctgaaacagatttaactgatgctattattgatgccatactaaaaacaccagttatggataaacggttattagcaaaaaaacgttatgaaatctcagcacagcactttggaaaatctatttacacgttctatttagatacgttaattgctagaaatagcaaagaagctcaaaagctgagtctttatcttaatcattctggtaaaagtagttctctaaaattagtgcaaggtgctattcacttgcctaaacgtgctgctaaggtcacagctatcacctcagtaaaagtagtcaaggctcctatcaagctggtccatgctatcaaagattttctggattaa

SEQ ID NO: 38249 - DNA, 1944 bp, Streptococcus pyogenes
atgattaagattacttttccagatggcgccgtgcgtgaatttgaatctggcgtaacaacgtttgacattgctgagtccatcagcaaatcattggctaaaaaagctttagctggtaagttcaatgatcaactcattgacaccactcgtgccattgaagaagatggcagtattgaaatcgtgacacctgaccacaaagatgcttatgaggtgcttcgccactctgcagcccatttatttgcccaagctgcaaaacgcttgttcccaaatcttcatttgggtgtgggccctgccattgcagaaggcttttactatgatacagataatgctgaaggccaaatttcaaacgaagatttgccacgtatcgaagctgaaatgcaaaaaatcgtgacagaaaattacccatgtatccgtgaagaagtgaccaaagaagaagctttggaattgttcaaagatgatccttacaaggtagaattgattaatgagcatgctggtgctggcttgacggtttaccgtcaaggtgaatttgtggatctttgccgtggccctcatgtgccatcaacaggccgtatccaagtcttccacttgctcaatgtggcgggtgcttactggcgtggtaacagcgacaataacatgatgcaacgtatctatggaacagcttggtttgataaaaaagacctcaaagcttacttgactcgtctagaagaagctaaagaacgtgatcaccgtaagcttggtaaagagcttgacttgttcatgattagccaagaagttggccaaggcttgccattttggttaccagatggagcgactattcgtcgtacacttgagcgctacatcacagataaagaattagcatcaggctaccaacacgtttacacaccaccacttgcttctgtagaattgtacaagacatcaggtcattgggatcattatcaagaagatatgttccctgtaatggatatgggagatggtgaggagtttgttcttcgtccaatgaactgcccacaccacattcaagtgtataaaaatcatgtgcgttcttatcgtgaattgcctattcgtattgccgagcttggcatgatgcaccgttacgaaaaatcaggtgccctatcaggacttcaacgggtacgtgaaatgaccttgaatgatggtcacattttcgtaacaccagagcaaatccaggaagaatttcaacgtgcccttcaattaatcattgatgtttatgctgacttcaacttgactgattatcgttttcgtttgtcataccgagaccctaacgatactcataaatattatgacaatgatgagatgtgggaaaatgctcaaagtatgcttaaagctgcacttgatgagatgggtgtagattactttgaagcagaaggtgaagcagctttttatgggcctaagcttgatattcaggtgaaaacagctcttggtaacgaagaaaccctatcaaccattcagttggacttcttgttgccagaacgctttgatctcaaatacattggtgctgatggcgaagaacaccgcccagtcatgattcaccgtggtgttatctcaactatggaacgtttcactgctatccttattgaaacttacaagggtgctttcccaacttggttggcacctcaccaagtaaccgtgattccaatttcaaatgaagcccacattgactatgcttgggaagtagcaaaaacccttcgtgaccgtggtgttcgtgcagatgtcgatgaccgcaatgaaaaaatgcagtacaagattcgtgcgtctcaaaccagcaaaattccttaccaattaattgttggggacaaagaaatggaagacaaatcagtcaatgttcgccgctatggtagcaagacgactcacaccgaatctgtggaagaatttgtggaaaacatcttggcagacattgctcgcaagtcacgtccagatgcacaagcttaa

SEQ ID NO: 38250 - DNA, 711 bp, Streptococcus pyogenes
atgaaaaaaatacttattgtggatgatgaaaaaccgatttctgacattattaagtttaatttgacaaaagaaggttatgacattgttacagcttttgatggacgcgaagcggtaacaatttttgaagaagaaaagccagatttaattattcttgatttgatgctccctgagttggacggtcttgaagtagccaaggaaattcgtaaaaccagtcatgtcccgattattatgttgtcggctaaagatagtgagtttgacaaggttattggacttgaaattggggctgatgattacgtgaccaagcccttttctaatcgggaattgctggcgcgtgtcaaggctcatctgcgtcgtaccgaaactattgaaacggctgttgcagaagaaaatgcttcttcaggtacacaggaactgaccattggtaatttacagattttaccagatgcgtttgttgctaaaaaacatggtcaagaggtagagttgacccatcgtgaatttgaactattgcatcatctagctaaccatatggggcaggtgatgacacgagaacacttattggaaattgtttggggatatgattattttggcgatgtgcgcacggttgatgtgactgttcgtcgcctccgtgaaaaaattgaagacacaccaagtcgtcctgagtatattttaacaagacgtggtgttgggtactacatgaaatcttatgactag

SEQ ID NO: 38251 - DNA, 1353 bp, Streptococcus pyogenes
atgactagagatatcattggaaacttatccacatttgaattagcgatccttatcttacttgtttttgttgctttttactttatccatcttgcggtgcgtgattaccgaaatgcacgtattattcggatgatgagccataaaatccgagacttgattaatggtcgctatactgatataatcgacgaaaaagcagacattgagttaatggagctttcagaccagttaaatgacctgtcagatgtttttcgcttgacgcatgaaaatcttgcccaagaaaaaaatcgcttggcaagtattttggcttatatgtcagatggtgtacttgctacagaccggtctggtaaaatcatcatgattaacgagacagctcgcaagcaattaaatttaagtaaagaagaggcactaaagaaaaacattacagatttgttagaaggtgatacttcatatacctaccgtgatttggtatccaaaacaccagtggtaactgttaatagccgaaatgatatgggtgagtttgtctcattacgcttgcgctttgcgttgaataggagagagagtggttttatttcgggcttggttgtggtgctccatgacaccacagaacaggaaaaagaagaacgtgaacgccgtctttttgtctctaatgtaagtcatgaattaaggacccctttaacttcggttaaatcctacttggaggctcttgatgaaggtgcacttaaagaagatattgctccaagtttcataaaagtttctcttgatgaaactaatcggatgatgcgtatgatttcagatcttttaaacctgtctcggattgataatcaagtaacccaattagcagtagagatgactaattttactgcttttataacttctattttaaacagatttgatttggttaaaaatcagcatacaggtacaggaaaagtctatgaaattgtaagagattaccctattacctctgtctggattgaaattgataatgataaaatgacacaggttatcgagaatattttgaacaatgccattaagtattctccagatggtggaaaaattacagtccgtatgaaaacaacagatacccaattaattatttccatttcagaccaaggactaggtatccctaaaacagatttgcctcttatttttgatcggttctatcgtgtagacaaggcaagaagtcgtgcccaaggagggaccggtctaggccttgccattgctaaagaaatcatcaagcagcaccatggctttatctgggctaagagtgactatggtaaaggatcgacctttactattgtcttgccttatgaaaaagatgcagccatctatgaagaatgggaggaagatgtagactaa

SEQ ID NO: 38252 - DNA, 3540 bp, Streptococcus pyogenes
atgtttttaaaagaaattgagttggaagggttcaagtcctttgcggacaagactaaaattgaatttgataagggagtaactgcagtcgtaggaccaaatggttcaggtaaaagtaatattacagaaagtttacgttgggctttaggagaatcaagtgctaaaaatctgcgtgggggcaagatgccagatgtcatttttgctgggacacaaaaccgtaatcctctaaactatgctaaggtagcggttgttcttgataattccgatcattttataaaaactgccaagaaagaaatccgtgtcgaaaggcatatttaccgaaatggagatagtgactatctgattgatggtcgcaaggtaaggctccgtgatattcatgatttgtttatggatacagggcttggtcgtgattctttctccattatttctcaaggtcgcgtagaggaaattttcaatagtaaacctgaagaaaggcgcgccatttttgaagaagcagctggtgttttaaaatataaaacacgtaaaaaagaaactcagattaaattaaatcaaactcaagataatttagaccgtctagaggatattatttatgagctagacacgcagttggcaccacttgaaaagcaagctaaagtagctaaacaatttttagaacttgatgccaatcgtaagcaactacaactagatattctagtcaaagatattgatatagctcaagaaagacagactaaagatactgaagctttagctgctttacaacaagacttagcatcttattacgctaagcgtcaatctatggaagaagattaccaaaaattcaagcaaaaaaagcaggttcttagtcaagagtcagatcaaacccaaacaacattattagaattaaccaagctaatagctgacttggaaaagcaaattgaattggttaagctagaaagtggccaagaagcagagaaaaaggcagaagccaaaaaacatctcgaacagttacaagaacaattggatggttttcaagcagaagaaaagcagtgtacagaacaattattgcatattgatcaacaactttgtgatgtcaaacaacagttaaacgaattgagcaatgcattagagcgtttttcaagtgatcccgaccaattaatggaaactctaagagaagagtttgtattattgatgcaaaaagaggcggccttatcaaatcagctgacagctttaaaagcccatttagacaaagaaaaacaggctcgtcaacataaggctcaagaatatcagctacttgttactaagcttgatcaacttaatgacgagtctcaaaaagctcaagctcattataaagctcaaaaagagcaagtcgaaatgttgctccaaaattatcaagaaggtgataaacgcgttcaggaattagaaagagattaccaactgaatcaagaaagactatttgacttgttggatcaaaaaaaaggaaaagaagctcgtaaggctagcttagaatctattcaaaaaagtcatagtcaattctatgcgggagtacgagctgtccttcaatcacaaaaaaagcttggagggatcataggtgcagtcagtgaacacctttcttttgattctgattaccaaacagctcttgaagttgcattaggtgctaatagtcagcatattattgtaacagacgaagctgcagcaaaaagagcaattgcttatttgaaaaaaaatcgccaaggacgagcaacttttttacctttaactactataaaggctagatcattatcagaacactatcatcgtcaattggcgacttgtgaaggttatctgggaactgcagaatcattgattcgctatgatgatagtctttcagctattatccaaaatcttttatctagtactgctatctttgaaactattgatcaagctaatattgcagcgcgcttattaggatataaggtaagaattgttactcttgatggaacagaattacgaccaggtggttctttttcaggaggagctaatagacaaagcaatacaacttttatcaaaccagagttagaacaaatcagtgaggaattaacgcgattagttgagcaattaaaaataactgaaaaagaagtagctgccttgcaaagcgatttgatagcaaaaaaagaagaactgacacaattgaaattagccggtgaccaggcacgcttagctgaacaaagagctcaaatggcttatcagcaattgcaagaaaaacaagaagattcaaaggctttgttagctgcccttgatcaaagtcagacgactcattctgatgaatctttattggcagaacaagctcgtattgaagaagcattaacagctattgctaagaaaaaaaatgccttaacttgtgatattgatgatatcaaagaaaacaaagatttgattaggcaaaaaacacaaaacattcaccaagctttatctcaagctcgtttgcaagaaagagatttacttaatgaaaagaaatttgagcaagctaatcaatctcgtctaagaactcagctgaagcaatgccagcaaaatattctcaaacttgaaagcatactaaacaataacgtaagtcaagacagcattcaaagactaccccagtggcaaaaacagttacaagatgccacagagcataagtctggtgctcaaaaacgtttagtccaattaagatttgaaatagaggactatgaggcccgcttagaagaaacagcagaaaaaataaccaaagaaagcgaaaaaaatgacacatttattcgtcgtcaaaccaagttagagacacatttagagcaagtggctaatcgcttacgagcctatgctaaaagtttatcagaagattttcaaatgacactagcagacgcaaaggaggtaacaaatagtattgatcacttagaaagtgccaaagaaaaattacaccatttacaaaagactattcgtgcactaggaccaattaatagtgatgctattaatcagtatgaggaagtgcatgagcgtttgacttttttaacaagtcaaaagacagatctgacaaaagctaaaaatcttttgctagagactattaatagtatggatagcgaagtgaaggctcgtttcaaagtgacttttgaggcaattcaaaaaagttttaaagaaacctttactcagatgtttggtgggggttctgctgatttggttttaacggaaacagacctcttgtctgctggtatagagatttctgtgcagcctcctggtaagaaaattcaatctcttaacttgatgtcaggcggagaaaaagctttgtcagcactggctttattgtttgctattatacgtgttaaaacgattccgtttgtgattttagatgaggtagaagcggctcttgatgaagcaaatgttaagcgctttggggatttcctcaatcgctttgacaaagatagtcaatttattgtcgtgacccatcgtaaaggaacaatggctgcagcagatagtatttatggaattaccatgcaggaatcgggggtctctaaaattgtatctgtaaaattaaaagaagctcaagagatgaccaattaa

SEQ ID NO: 38253 - DNA, 798 bp, Streptococcus pyogenes
atgataaaactaatagcaacagatatggatggtactttcctagctgaagatggtacttataatcaagagcaactagctgcgctcttgccaaagttagccgaaaaaggcattttatttgcggtttcgagtggccgctcgctcttagccattgatcagctctttgagccctttttggatcagattgctgttattgcagaaaatggttccgtggttcaataccgtggtgagattctatttgcagatatgatgaccaaagagcagtataccgaagttgcaaaaaagattttagccaatcctcactatgtagaaacaggtatggttttttctgggcaaaaggcagcctatattttaaaaggcgcatcagaagagtacattcaaaaaacaaaacattactatgctaatgttaaggttattaatggttttgaagatatggagaatgacgccatttttaaagtttctaccaacttcacaggccataccgtcttagaaggaagcgattggttgaatcaagccctcccttatgccactgcagtgaccaccggctttgattccattgatattatcttaaaagaggtgaataagggctttggtatggagcatctttgtcaagccttgggcattaagaaagcagaaacgattgcttttggggataattttaatgattaccagatgttggagtttgctggtagggctattgctacggaaaatgcaagacctgaaatcaaagtgatttcagaccaagtcattggccactgtaatgacggagcagtactaacgtatttaaaaggactagtgtaa

SEQ ID NO: 38254 - DNA, 1551 bp, Streptococcus pyogenes
atgggattatttgatcgtttatttgggaaaaaagaaaccccgaaggtagctgaggaaaagttagaagaaaatcttttgacagaaacaactcagaaagaggagctttctgaaaaagccaatgagcaagacaagattgaggcggttcaacaagaggacgtttcttcagagggcgcaggttcggtggaaaatggtcccgaagcagcttcagtaaacgcactggttgaggaagaaacaggtgacaatagtaatcatccatcagaagataccaatgagtttgctgccgacaaaacagaccttaaggtaagtgaacttagtcaatctacggcatcagaaccaaaagaccttgttgaccagccagttgtggaacagtttccaacaaaacaagcccaagctgatgcctcaaatgattcggcgaatgaagaagcagtagacacttcaaaagagcaatccagtagccaacaggttatggaagactactaccgtcgtaaggctgctcttgaaaaaagccttcaagaaaaagcagcggcaacggttccagtgatgccagaagaagttccacaagaaaatcaggcctctacctcagcagaagcttctcaaaacaaggcaacccacgataccattcctgagacagatcaagaaaaatacaagcgtagcttgaaaaaaacgcggactggcttctcagctcgtctgaacagtttctttgccaatttcaggcgagtggatgaagaattctttgaagacttggaagaaatgctgatcttatcagatgtcggtgtacatgtggcgacaactttgacagaggagttgcgttatgaagccaaactggaaaatgcgaaaaaaccagatgccttgaaacgtgtgattgtggaaaaattggtagatatctatgaaaaagatgggcgttataatgaagccattaattatcaagatggcttgacggttatgctttttgtaggtgttaacggggttggtaaaacgacttcaatcgggaagctggcttaccgttacaaacaagaaggtaaaaaagtcatgttggtggcagcagataccttccgagcaggggctgtggctcagctagtcgaatggggacgccgagtagatgtgccagtcattactggccctgaaaaggctgatccagcgtctgttgtttttgacgggatggaaaaagctgtggcaaaaggtgtagatattctcctgattgacacggctggtcgcctgcaaaacaaagaaaatctcatggcagagctggaaaaaatgggtcgtatcattaagcgcgtgctaccagatgcccctcatgaaacgcttttggccttagatgcgtcaacaggacaaaatgcgcttagccaagccaaggaattttcaaaaataacaccattaacaggtttgattttaacgaaaattgatggcacggccaaaggtggtgtagtcctagccatccgtcaagaattagacattccagtcaagtttatcggatttggtgaaaaagtggatgatattggagaattccactcagaagactttatgaaaggccttttggaaggtatcttataa

SEQ ID NO: 38255 - DNA, 1863 bp, Streptococcus pyogenes
atgacgtatcaagaaactgccaaggctattttagcggcggttggtggcaaaacaaatattcaacgtgtgacacactgtgtaacacgtctacgcttagtactgaaaaatgatgagaaagttaaagatcagcaagtcaaagccatttcaaatgtgattggcgtgatgcgcaaaaacggccagtaccaaattatcttgggcaatgatgtcaataattattaccaagcctttttaagcctagggcattttgacaatcaagatgaagatcattcttcaaaagcgaaaggaagtatccttgagcgcttgattgaaaccattgctggcgtgattacaccgctgattccagcccttcttggtggtggaatgctcaaagtggtgggaatcttgcttcctatgcttggcttagcgagtgcggactctcaaaccgttgcctttattaacttctttggcgatgcggcttattattttatgcctgtcatgattgcctattcagcagcggcgcgctttaaggtgacacctgttttagcagcgacgatcgcagggattttattgcatcctgcctttgttgcaatggtagcagaaggtaaaccattgactttatttggagcaccagtcactcctgctagctatggctcatctgttattcccattttgatgatggtttacttgatgcaatacattgaaaaatgggtcaatcgcttggtgccaagcgtgatgaaaagcttcttacagccaaccttaatcattttgatttctggctttttggctttagtggttgtaggtcctcttggtgtgattattggtcaagggttatctaataccatgctcgctatttatcatgtggctccgtggctagcacttgctattttgggagcgattatgccgcttgttgtcatgacggggatgcactgggcttttgcaccaatctttttggccgcttcggtcgcaacaccagatgtcttgattttaccagcaatgttggcttctaatttggctcaaggagccgcatctttggctgttgcctttaaaacaaagcagaaacaaacacgtcaagttgcccttgccgcggggatttcagctttgctggcaggtatcacggaaccggcactttatggggtcacactgaaatttaaaaagccactctatgcagccatgatttcaggtggtctggttggagcctttattggttttgtcaatattgcttcttatacctttgtcgtaccttctattattggtttaccacagtacatcaacccatcaggcggagctaattttacaaatgctttgattgccggaactgcgacgattgtgttagccttcagtttgacttggttcatgggaattgatgaagagtccccaaagcaagtgagtgttgcagcagatatgtcacaagttaagagcggcttgtcaaccaaacaaacgttgtatgctccaatgacaggtgagatgctttttctatcagaagttcctgatgaaaccttttcttccaagttattaggagaaggatttgccatattaccaagcgaaggtgaggtctatgccccctttgatggtgaagtcatcactttctttccaaccaagcatgctgttgccttaaaaaacacacgtggtgtggaagtcttgattcatgtcggtattgatacggttgagttaaaagggcaaggtttcgagcagttagtgtctgttggcgatgtcgtgaaacgaggccaggcacttctaaaaatggatattgatttcattacttcaaaaggctattcactcatcagtcctgtggtcgtgaccaattcggctgagcagttggagattattattcaagatgacaaaaaaatggtgactaaagaggacgctttgttagtcattttataa

SEQ ID NO: 38256 - DNA, 1425 bp, Streptococcus pyogenes
atgggaatttttccaaaagatttcttatggggcggcgcagtagctgccaaccaagtggaaggagcatttgaggcagacgcaaaaggtttgtccgtacaagatgttctaccaaatggtggactaggagaatggacagatagtcctaccagcgataatttaactttagaggcgattgatttttaccaccgctacaaagaagacattgctctttttgccgagatgggctttaaagtctttcgaacgtctattgcttggtctcgtatttttccaaatggtgacgatgaccagcccaatgaagcaggtttgcaattttatgatgacttattcgatgaattgttgaactatggcatcgaacccttagtgaccttgtcgcattatgagacacctctgcatttggccaaagcctataatggttggacagatagacgtctgattggcttttttgagcgctttgctcagacagtcatggaacgctataaggacaaagtcaaatactggttgacctttaacgaagtcaactcgattttacacatgccctttaccagtggtggcatcatgacagaaaaagaaaagctgagcctgcaagatttataccaagctattcatcatgaattggtagcatctgctagtgtcacaaagctagcgcatgaaatcaatcctgatgttaaagttgggtgtatgattttggcgatgcctgcttacccaatgacctctgatcctcgtgatatacttgctgcgcatgcatttgaaaatcttaatctcttattttcagatattcatgtgagaggcaagtatccttcatatattaagtcgtattttaaagaaaatgggattgagattgtttttgaagacggagacaaggaattattagcggaacatacggttgattttctatcctttagctattacatgagtgtcacacaagcccacaatcctgaagcttacacatctggtcagggaaatattctaggtggtttgtccaatccatatttagaatcttcggagtggggttggcagatagacccaattggtctgcgattggtcttgaatcagtactatgaccgctaccagattcctttgtttattgttgaaaatggcttaggtgcaaaggatcagctggtgcaaaccgcagatggcagcatgacggttcacgatgattatcgcattgactacatgagtcagcatctcgtacaagttgccaaagcgattgaagatggcgttgaggtcatgggttacacttcttggggctgtattgattgtgtctctatgtcaacagcccaattaagtaaacgctacggttttatttatgttgaccgaaatgatgatggtactggtcaactcacacgctataagaaaaaatcatttgattggtaccgacaagtcattcaaaccaatggacgttaccttgaggataatttttcctaa

SEQ ID NO: 38257 - DNA, 2133 bp, Streptococcus pyogenes
atggaaaataacaataatcacaacattgcagaggctttgtcagttagtctccatcaaattgaacaggtgcttgccctaacagcacaaggcaataccattccctttattgcacgttaccgtaaagaagtaacaggaaatctagatgaagtggtgattaagtccattattgatatggataagtctctcactaccctgaatgagcgcaaagcaaccattctcgctaaaattgaggaacagggaaaactgacagatcagttacgaacgagtattgaagcaaccgagaaactcgctgatttggaagagttgtacctgccttataaggaaaaacgccgtacaaaagcgacgattgcgcgtgaagcaggcttgttcccattagcacgtttgattttacaaaatgcgcaaaaccttgaaacagcagcagaaccctttgtcacagaaggatttgccagcccacaagaagctctagcaggagctgtggacatccttgtggaggccatgtcagaagatgctaaattacgctcttggacctacaatgagatttggcagtacagccgcttagtatcaacgcttaaagatgagcagttggatgagaaaaaggttttccaaatctattacgatttttctgaccaagtgtctaacatgcaaggatatcgtactttagcccttaaccgtggcgaaaagttaggcatcttaaaagtgtcttttgagcataacttggagaaaatgcaacgctttttcagtgtgcggttcaaagaaaccaacccttatattgaagaggtcatcaatcagaccatcaaaaagaaaattgttccagctatggaaagacgggttcgttcagaactcagtgatgccgcagaagatggggctatccacctcttttctgaaaatctccgtcatcttttgttagtgtctcctttaaaagggaaaatggttcttgggtttgaccctgcctttcgaacaggtgcaaaattggctatcgttgatcagactggaaaattgttgactactcaggttatttatcccgtagcaccagctagccaaacgaagattcaagcagctaaagaaacactgactcagctcattgagacttaccagattgatattattgccattggaaacggaacagccagtcgggaaagtgaagcctttgtagcagacgttttgaaagatttcccaaatacgtcctatgtcatcgttaacgaaagcggtgcttctgtttattcagcgtcagagttagcccgccatgagtttccagacctcacagtggagaagcgctctgctatttctattgctcgtcgcttgcaagacccactcgcagaattggttaaaattgatcctaaatctattggcgtcggtcagtaccagcacgatgtgagtcagaaaaagttgagtgagaatcttggttttgttgtggatactgtggttaaccaagtcggtgttaatgtgaacacggctagtccatctttattagcacatgtgtcaggtttgaacaaaacgatttcagaaaatattgtcaaataccgcgaagaaaatggagcactgacatcacgcgctgacatcaaaaaagtgccgcgtttaggagccaaggcgtttgagcaagcagcaggttttctcagaattccaggagccaaaaatattttagacaacacaggagttcaccccgagtcctacccagcagtcaaagaactctttaaggtacttggtattcaggacttggacgacgctgccaaggcaactttagcagcagttcaagttccccaaatggcagaaacattggctattgggcaggaaacccttaaagatatcattgctgatctccttaaaccgggtcgtgaccttcgtgatgactttgaagcaccaatcttacgtcaagatatccttgatttgaaagatttggaaattggccagaagcttgaaggaactgtgagaaacgtcgttgactttggtgcttttgtagacattggtgttcatgaagatgggcttattcacatttctgaaatgagcaaaacctttgtcaaccaccctagtcaagttgtttcagtgggtgacttggtaactgtttgggtctctaagattgacttggaccgccacaaggtcaatctcagcctattgccaccgcgtgacactcactaa

SEQ ID NO: 38258 - DNA, 933 bp, Streptococcus pyogenes
atgaccgttactgtaaagatgctagtgcaaaaagttaaacttgatgtggtttatgctacagataacttgctgtcaaaagagataacaacatcagatatttcacgtccaggtcttgaaatgactggttattttgattattatgctccagaaaggttgcagctatttggaatgaaagagtggtcttatcttacacagatgacttctcacaaccgttattctgttttaaaagagatgttcaaaaaggacactcctgcagtggttgtctctagaaatttagccattccaaaagaaatggttcaagctgcaaaagaagaaggtatttcacttttaagtagccgtgtttcaactagccgcttagctggagaaatgtcttattttcttgacgcttctttagctgaacgtactagtgttcacggcgttttaatggatatttatggtatgggggttcttatccaaggggattctggaattggtaaaagtgagactggtttagaattagttaagcgagggcatcgtttggttgcagatgaccgtgtggatgtctatgccaaagatgaagaaaccctttggggagagccagcagagatcttgcgccacttgcttgaaattcgtggggtaggtattattgatgtgatgtcgctttatggagctagtgctgtgaaggactcatcacaagttcaattggccatttaccttgaaaactttgaggctggtaaagtttttgatcgtctcggaaacggaaatgaggagataactttctcaggagtgagaatccctcgtattcgtattccggtaaaaacaggtcgaaatgtttcagtggttattgaagccgctgcgatgaatcatcgggctaaagaaatgggctttgatgctacaaaaacttttgaagatcgtttaactcaactaatcaccaaaaatgaggtgagtcaatga

SEQ ID NO: 38259 - DNA, 1287 bp, Streptococcus pyogenes
atgtcacatatgaaaaaacgtcccgaggtcttatcacctgctggaacacttgaaaaattaaaagttgcgattgactatggcgcagatgctgtttttgttggagggcaggcctatggcctaagaagccgcgctggtaacttctctatggaagaattgcaagaaggcattgattatgcacatgcgcgtggagctaaggtctatgttgctgctaacatggttacccacgaagggaacgaaattggtgcgggcgagtggtttcgtcaactgcgtgatatggggcttgatgcggtcattgtttcagatccagccttgattgttatttgttcaacagaagccccaggtttggaaattcatttgtcaacgcaagcttcatctaccaattacgagacctttgaattttggaaagccatgggcttgacccgagttgttttagctcgcgaggttaatatggccgagttagcagaaatccgcaagcggacagatgtggaaattgaagcctttgtccatggagccatgtgtatctcttattcaggccgctgtgttttgtcaaaccacatgagtcaccgtgatgccaacaggggcggctgctcacagtcttgccgctggaagtatgatttgtatgacatgccatttggaggagagcgccgctccttaaaaggggaaattccagaagactattctatgtcctctgttgacatgtgtatgattgaccatattcctgacctgattgaaaatggggttgatagcttaaaaattgaaggccgaatgaaatctatccactacgtctcaaccgtaaccaactgttacaaggcggctgtaggtgcttacatggaaagcccagaagctttttatgctatcaaagaggaattgattgacgagttgtggaaggttgcccagcgcgagttggctacaggtttttactatggtatcccaactgaaaatgaacaattatttggtgctcgccgcaaaattccacaatataaatttgtcggagaagtagttgcctttgactcagctagcatgacagcgaccattcgtcagcgtaatgtcatcatggaaggcgatcggattgaatgttatggaccaggtttccgtcattttgaaacggttgttaaggacttacatgatgcggatggccaaaagattgaccgtgccccaaatccaatggaactcttaaccatctctttaccgagagaagttaagccaggggatatgattagggcttgcaaggaaggtctggttaacctctatcaaaaagatggcaccagtaaaactgttagaacatag

SEQ ID NO: 38260 - DNA, 1494 bp, Streptococcus pyogenes
atgtctaatcaacacatcgaagaattaaatgaccaacagattgtccgtcgtgaaaaaatgacggcgctggctgaacaaggaattgatcctttcggtaaacgctttgaccgcacagccaattctgctgaattaaaagaaaagtatgctgataaaacaaaagaagaattacatgagttaaacgaaacagctattgttgctggccgcttgatgacaaaacgtggcaaaggtaaggttggttttgctcatcttcaagaccgtgaaggccaaatccaactttatgttcgcaaggactctgttggcgaagacaactatgaaatcttcaaaaaagccgatttaggcgactttatcggcgttgaaggcgaagtcatgcgtacagacatgggcgagttgtcaatcaaggcaaccaagttgactcacctttctaaatcacttcgtcctcttcctgaaaaattccacggattaactgatattgaaaccatttaccgtaagcgtcaccttgatttaatttcaaatcgtgaaagctttgaccgcttcgtgacccgttccaaaatgatttcagaaatccgtcgttatttagacggtcttgatttcctagaagtagaaacgcctgtgcttcataacgaggctggtggtgctgctgctcgtcctttcgttactcaccataatgctcaaaacattgatatggtgcttcgtatcgcaacagaacttcatttgaaacgtttgattgttggtggtatggaacgtgtctatgaaattggtcgtatcttccgtaacgagggaatggatgctactcataatcctgagttcacttctattgaggtttaccaagcctatgcagactatcttgatatcatgaacctgacagaaggcattatccaacatgctgctaaagctgttagaggtgatggccctattgattatcaaggaactgaaatccgtatcaatgaacctttcaaacgtgttcacatggtagatgctatcaaggaagtgacaggtgctgatttctggcctgaaatgactgtcgaagaagctattgcacttgccaaagaaaaacaggtcccactcgaaaaacacttcataagtgtcggacatatcatcaacgctttcttcgaggaatttgttgaagaaaccttggtccaaccaacctttgtgtttggtcatcctgttgaagtatcgcctttggctaagaagaatccagaagatacccgcttcaccgaccgcttcgaacttttcatcatgaccaaagaatacgccaatgctttcacagagttgaatgatcccattgaccaattatctcgttttgaagcacaagcacaagctaaagaacttggtgatgacgaagcaactggcattgactacgacttcgttgaagctcttgaatatggtatgccgccaaccggtggactcggaatcgggattgatcgtctttgcatgttattaacaaacacaacaacaatcagagatgtgcttttattcccaacgatgaaaccttaa

SEQ ID NO: 38261 - DNA, 1305 bp, Streptococcus pyogenes
atgattatctcaagaagtagagggaaaactatgaagattgataaaaggcacctcttaaattattctatattattgccttatttaattttatcggtgataggcttaataatggtttactcaaccacaagtgtcagcttgattcaagcacatgctaatccatttaaatcggtgattaaccagggagttttttggataataagtctagtggctattacatttatctataaattaaaattaaattttttaacgaatacaagggtattaactgtggttatgttaggagaggcctttcttttaatcattgcccgcttctttacaactgctatcaaaggagcgcatggttggattgtgatcggaccagtcagctttcagcctgctgagtatttaaagatcattatggtatggtatttggcattgacctttgctaagatccaaaaaaacattagcctttatgattatcaagcactaactcgtcgaaaatggtggccaacacaatggaacgatttacgggactggcgtgtttattctttgttgatggtacttttggttgctgctcagcctgacttgggaaatgcttccattattgtattgacagccattattatgttttctatcagtggcattggttaccgatggttttcggctatcctagtcatgattaccggtctatccacggtctttcttgggactattgccgttattggggtagaaagagttgctaagattcctgtttttggctatgtcgctaaacgttttagtgccttttttaatccttttcatgacttgaccgattcaggtcaccaattagccaattcttactatgctatgagtaatggtgggtggtttggccaagggttaggaaattccattgaaaagcgtggctatttgcccgaagcacagacagactttgtcttttcagttgtcattgaagagttaggtctaataggagcagggtttattttggcacttgttttcttcttaattttacgtattatgaatgttggtattaaagcaaaaaatccttttaatgccatgatggctttaggagtaggcggtatgatgctcatgcaagtctttgttaatattggtggtatctcaggcttaattccatctactggtgttaccttcccttttttgtctcaaggtggaaatagcttacttgtcttatctgttgcagtgggttttgtactaaatattgatgctagcgaaaagcgagatgatatatttaaagaagctgaattatcttatcgaaaggacactcgaaaagaaaatagtaaagttgtaaatatcaagcaatttcaataa

SEQ ID NO: 38262 - DNA, 1197 bp, Streptococcus pyogenes
atggcaaaagaaaaatacgatcgtagtaaaccccacgttaacattggtacaatcggacacgttgaccatggtaaaactactttaacagctgcaatcacaactgtattggcacgtcgcttgccttcatcagttaaccaaccaaaagattacgcttctatcgatgctgctccagaagaacgcgaacgcggaatcactatcaacactgcacacgttgagtacgaaactgcaactcgtcactatgcgcacatcgacgctccaggacacgcggactacgttaaaaacatgatcactggtgccgctcaaatggacggagctatccttgtagttgcttcaactgatggaccaatgccacaaactcgtgagcacatccttctttcacgtcaggttggtgttaaacaccttatcgtgttcatgaacaaagttgaccttgttgatgacgaagagttgcttgaattagttgagatggaaattcgtgaccttctttcagaatacgatttcccaggtgatgaccttccagttatccaaggttcagctcttaaagctcttgaaggcgacactaaatttgaagacatcatcatggaattgatggatactgttgattcatacattccagaaccagaacgcgacactgacaaaccattgcttcttccagtcgaagacgtattctcaattacaggtcgtggtacagttgcttcaggacgtatcgaccgtggtactgttcgtgtcaacgacgaaatcgaaatcgttggtatcaaagaagaaactaaaaaagctgttgttactggtgttgaaatgttccgtaaacaacttgacgaaggtcttgcaggagacaacgtaggtatccttcttcgtggtgttcaacgtgacgaaatcgaacgtggtcaagttattgctaaaccaagttcaatcaacccacacactaaattcaaaggtgaagtatatatcctttctaaagacgaaggtggacgtcacactccattcttcaacaactaccgtccacaattctacttccgtacaactgacgtaacaggttcaatcgaacttccagcaggtacagaaatggttatgcctggtgataacgtgacaatcaacgttgagttgatccacccaatcgccgtagaacaaggtactactttctcaatccgtgaaggtggacgtactgttggttcaggtatcgtttcagaaatcgaagcttaa

SEQ ID NO: 38263 - DNA, 1236 bp, Streptococcus pyogenes
atggcactaattgaaatttcacaagaacaatttgaccattactgccacagtctcgtccatcattcctttatccaaacctcagaaatggccagcttgatggctaaaagaggggcaaaaccacaatttcttggacttgaaaaagatggtgaactaaaggttgctgctatggtctttagccaaaaagtggctggaggttggcgtatggaactcaatgcaggccctaataccaatcatcccgaagaattagaacatttttacactcaacttaaagactatgccaaacaaaaagacgttatcgaactcattttaaaaccttacgacaattatcagtcatttgatactgatggcatccctatttctcgtccaaacactgaccttattagccttttaacggcgttaggatataaacatgacggtttaaaaacaggctatcctgagggtgaacctgtttggcattacgttaaaaagttagaaggaattgattcctcacgtttaacccgttccttcagcaaaaaaggaaaagctttaataaaaaaagctaatacttttggtattaaattacgtcaactgaaacgagatgagttacaccatttcaaagaaattactgaagcaacctctgatcgtagagattaccttgacaaatcattatcttactatcaggacttttatgatagttttggagactcttgtgaatttatggttgcgactcttaattttgaagattaccttaataaccttaaacaaagacaactacaactagcaaccagcatcaacaaagttaaaggagaccttggcaaaaatcctcattctgaaaaaaagcaaaatagattaaaagaactatccagccagttcgaaacctttcaggtaagaatttctgaagctctccattttcttgaagagtatggaactaaagatgtgttccttgcgggaagtctttttatctataccgaacaagaggccgtctacctcttttcaggatcttaccccaaatttaataaattttatagcccagctctattacaagagcatgctatgctcaaggcaattcacaagggcatcaaacaatataattttcttggtattactggaaagtttgatggttcagacggtgtcttgcgctttaaacagaatttcaatggctttattttgcaaaaaccagggacatttagatgttatccatttccaatcaaatatcatttcattagattggcaaaaaagctattaaaccgctattag

SEQ ID NO: 38264 - DNA, 1227 bp, Streptococcus pyogenes
atgtatacatataaaatcggaatatctcctgaagaacatgatcagtttgtcttagcacagccacaagctggcttacttcaaagttcaaagtggggaaaagtcaaagataactggaaacacgaacgcatcagcttttatgaaaatggggtacaagttgctgctgctgcttgtttaatcagaaaacttcctcttggtttcactatgatttatatcccacgtgggccaatcatggactacgccaattttgaactccttgatttcgtcattaaaacgctcaaaactttcggaaaaagcaaacgagcgctttttatcaaaattgatccaagtttagtcatcaaacaaactttagaaggaaaagagagcaaagaaaatgatgtgacactctctattattgcttttctaaaaaaactcggtgtcgaatggtctggcagaacaaaagaactcgaagacactattcaaccaagaatacaagccaacatctacgccaaggattttgactttgacagcctgcccaaaaaagccaagcaatccattcgtaccgctaccaataaaggtgttaatgtcacgattggtggcagtgaattgctagacgacttttcagccttgatgaaaaaaaccgagaatcgaaaaggcattatccttcgaggcaaatcctattatcaaaaattactaggtatttatgctggtcagtcctacattactatggctagtttagacttacctgaacaaaaaaaactcttgatccaacagttggacaaggccttagcagaacaagcacgattaacagataagagtaaacctagcaaagtagcagaaaatcaaaaaaccattgcacggctacaaaaagatttaaccattttaagcgagcagctcgctacaggccaaacccgtatcccattagccgccaccctaaccttgatttatggcgagacttctgaaaatctttatgcgggaatggacgatgattatcgcaattatcaagctcctcttttaacctggtatgaaacggctaaagaagcttttaaaagaggctgccgctggcataatttaggaggtgtggaaaatcaacaagatggtggactctatcatttcaaagctagactcaaccccactatcgaagaatttgcaggtgaattcaacattcctgtcggccttgtttcaagcttagccatcttaacctataacttaagaaaaaaattaaggagcacaactaatggcactaattga

SEQ ID NO: 38265 - DNA, 810 bp, Streptococcus pyogenes
atgtctatcaaactggttgctgtcgatattgatggcacattactcactgatgaccgtcgaattacagatgatgtttttcaagctgtccaagaggctaaagcccaaggggttcatgtggtgattgctactggcagacctattgccggagtgatttcattactcgaacaattagaactcaaccacaaaggaaaccacgttatcacttttaatggtggcttggtgcaagatgccgagaccggcgaagaaattgttaaagaattgatgacttacgacgattatctggaaacggaatttttgagccgaaaattaggagttcacatgcatgccattaccaaagaaggtatttacactgccaatcggaatattggaaaatacacagttcatgaatcgactttggtaaacatgcctattttctatcgcactcccgaagaaatgaccaataaagaaatcatcaaaatgatgatgattgatgaacctgaccttttggacgcggccatcaagcaaattcctcaacatttctttgataagtacaccatcgtcaagtcaacccctttttatttagagttcatgccaaaaaccgtcagcaagggtaatgccatcaaacacttagctaaaaaactcgggctagatatgtcacaaaccatggccatcggggatgctgaaaatgatcgtgctatgttagaagtcgttgccaaccctgttgtcatggaaaatggggttcctgaattgaaaaaaatagccaaatacatcaccaaatccaacaatgacagtggtgtggcacatgctattcgcaagtgggtattaaactaa

SEQ ID NO: 38266 - DNA, 2682 bp, Streptococcus pyogenes
ttgtctaaagaacaaagacatgaagcattttacacgcaaagtgaagagaccgtactggctcaattagagaccagtcgcgaaggtcttacgtctgcccaagcaaaagagcgcttagcagagtatggtcgtaatgagcttgatgaaggcgaaaaacgaagtttatttatgaaattccttgatcaatttaaggatttgatgattattattttgattgtggcagcccttctttcagttcttacagaggggatggaaggtttgacagacgccattattatcttggctgttgttatcctaaatgctgcttttggtgtttaccaagaaggacaagctgaagctgctattgaagccttgaaatcaatgtcaagtccactggctcgtattcgccgcgatgggcatgtgactgagatagactctaaagaattggtccctggagatattgtcttgctagaagcgggagatgttgtccctgctgatctgcgtcttttggaagctaactccttaaaaatcgaagaagcagcgcttactggagaatctgtaccggttgaaaaagacttgtcaacggctgtttcagaagatgccggtattggtgatcgcgtcaatatgggatatcaaaactcaaatgtgacatatggtcgtgggattggggttatcactaacactggcatgtacaccgaggttgggcatattgctggtatgcttgctaatgctgatgagacagatacaccattgaagcaaaaccttgacaacctttctaagattttgacttatgcgatccttgtgattgcagcggtgacttttgctgttggagtcttcttgcgtggtcaacacccgcttgaaggcttgatgacttcagtagcgcttgctgttgcagctattccagagggacttcctgcgattgttactgttgtgctttctcttggaactcaagtacttgctaaacgtaacgccattatccgtaaattaccagctgttgaaacgctaggatcaactgaaatcattgcttctgataaaacgggtaccttgacaatgaatcaaatgaccgttgaaaaagtttataccaacgggacactccaaagttcatcagctgatattgcttttgacaatacgacacttcgtgtaatgaactttgctaatgatactaaagttgatccttcagggaagttaattggtgacccaacagaaacagctttggtagagtttgggttagaccacaattttgacgtacgtgaggctatggtggcagaacctcgtgtggcagaactgccatttgattctgaccgtaagttgatgtcaaccattcataaacaagctgatggcaaatatttcatcgctgttaaaggtgcaccagatcagttattgaaacgtgtcacacagattgaagaaaatggacaaattcgtcctattacggatgctgataaaaaaaccattcttgataccaataagagtcttgccaaacaagctcttcgtgtcttgatgatggcttacaaatattctgatgcccttccaacactggaaacagaaattgttgaggctaatcttgtcttctctggtttggtagggatgattgaccctgaacgtcctgaagcagcacaggctgttaaagtagctaaggaagctggcattcgtccaatcatgattactggtgaccaccaagatacagcaaaagctattgcgaaacgtcttggtattatcgaagaagatggcgttgatcatgtctttacaggtgctgaactcaacgaattatcagatgaagagttccaaaaagtctttaaacaatactccgtgtatgcccgtgtatctcctgagcataaagttcgtatcgttaaggcttggcaaaatgaaggcaaagttgttgccatgactggcgatggggttaacgatgcaccatctcttaaaacggcagatattggtattggtatgggaattacaggtacagaggtttctaagggagcttctgacatggttcttgccgatgataactttgcaaccattatcgttgcggttgaagaaggacgtaaggtcttctcaaacattcaaaaaacaattcaatacttactttctgctaacatggcagaagtctttaccatcttccttgcaaccttgtttggttgggatgtgcttcaaccagttcacttgctttggattaacttggtaactgataccctaccagctattgctcttggtgttgaacctgctgagcctggtgtgatgaaacacaaacctcgtggacgtaagtcaagcttctttgatggtggggtgaaggaagccattctttaccaaggtgccttccaaaccattttggtgcttggggtttatggttttgccttgatgttcccagaacacacaagctatcatgatgtccatgcagatgctttgaccatggcttatgtgaccctcggtttgattcagttggtacatgcctacaacgtgaaatctgtttaccaatccatctttactgttggattgttcaaaaacaaattgttcaactattctattccagtggcctttgtagcattaatggcaacagttgttgttcctggatttaatcaattctttcatgtgacacacttgacgatcacacaatggttagtggttattatcggaagtctcttgatggttgttcttgttgaattggtgaaagctgttcaacgatcacttggtcaagatgaaaaagcaatttaa

SEQ ID NO: 38267 - DNA, 795 bp, Streptococcus pyogenes
atggaaaatatgttttcgttacaaggtaagattgccttgattaccggagcatcttacggtattggttttgaaattgccaaagcctatgctcaagcgggtgcaactattgtgtttaatgacatcaaacaagagttagttgataaggggttggctgcctatcgagagttagggatagaagcgcatggctatgtttgtgacgtgactgatgaagctggtatccaacagatggttagtcaaattgaagatgaagtaggtgctattgatattttggtcaacaatgcaggtattattaggcgtacgccgatgcttgaaatggccgcagaagattttcgtcaagttattgatattgatttaaatgctccttttattgtgtcaaaagctgtattaccatcaatgattgcaaagggacatggtaaaattataaatatctgttctatgatgagcgaattggggcgtgaaacagttagtgcctacgcggcggctaaaggtggcttgaaaatgttaaccaaaaatatagcctctgagtttggagaagccaacattcaatgtaatgggattggtcctggctacattgcgacgccccaaacagctccgttgagagagcgacaagcagatggtagtcgtcatccttttgatcaatttatcattgctaaaacaccagcagcacgttgggggacaacagaagacttagctggtccagctgtttttctagctagcgatgccagtaattttgtcaacggccatattctttatgtcgacggtggcattttagcttatattggaaaacaaccttaa

SEQ ID NO: 38268 - DNA, 1014 bp, Streptococcus pyogenes
ttggaagaggagattgctcttcttgaaaatcacatgactgagccagacttttggaatgacaatattgcagcgcaaaagacatctcaagaactaaatgagttaaaaggtaagtatgatactttccataatatgcaagaattatctgacgaaacagaactcttacttgagatgcttgacgaagatgattctttgaaagaagaattagaagaaaatctaatgcagctagataagataatgggtgcttatgaaatgacgcttctcttatctgaaccctatgaccacaataatgctatcttagaaatccatcctggttcaggaggaactgaagcgcaagattggggagatttactcttacgaatgtatacccgttttggcaatgctaatggtttcaaaatagaagtattggattatcaagcaggagatgaagctggtattaaatcggttaccctctcttttgaaggccccaatgcttatggtttgttgaaatcagaaatgggagttcatcgcctcgttcgtatatcaccttttgattcggctaaacgtcgtcatacctcatttgcttcagttgaagtgatgccagagttagatgatacgattgaagtagaagtacgtgatgatgacattaaaatggatactttccgttccggaggagctggtggtcagaatgtcaataaagtatcaacaggtgttcgtttgacgcatattccaactggaattgtggtatcgtctaccgttgaccgtactcaatatggaaaccgcgatcgcgctatgaagatgttgcaggctaagctatatcagttagaacaagaaaagaaagcacaagaagtagatgctctcaagggtgataaaaaagaaatcacttggggaagtcagattcgttcttatgttttcaccccttatacgatggtgaaggatcatcgtactaactttgagcttgctcaggtagataaggttatggatggagagatcaatggctttattgatgcctaccttaagtggcgcattgaagactaa

SEQ ID NO: 38269 - DNA, 1194 bp, Streptococcus pyogenes
atgcccaaactatcaaagcgagttttagaaatgaaagagagtgttactctggctgcaggtgctagagctaaggctttgaaagcgcagggccgcgatgtactgaatttaactttaggagaaccagatttttttacacctaagcacattcaagacaaggcgattgaatctattcaaaatggtacggctagcttttatacaaatgcttctgggcttccagaattaaaagctgcgattgccacatacctgaaaaatcagtatgggtatcacttgtctcctgatcagattgtggcaggaacaggtgccaagttcatcctttatgccttttttatggctgttttaaatcctggtgaccaagttctcattccaacaccatattgggtatcttattctgaccaagtaaaaatggcagaaggtcagccgatcttcgttcaaggactagaagaaaatcaattcaaggtaactgttgaccagctggaaagagcaaggacaagtaagactaaagttgtccttatcaattctccttccaatccaacaggcatgatttatggtgctgaggaattaagggccattggagaatgggcggtgcacaacgatattcttattctggcagatgatatttacgggtccttagtctataacggcaatcagtttgttcctatttcaacactctcagaagcgattcggcgtcaaaccattacggtcaatggcgtggctaaaagttatgccatgacaggctggcgggttggttttgcagcaggtgaaccagagatcatttcggcaatgagtaagatcatcgggcagactacctctaacctgacaaccgtttcacaatatgctgctatcgaggctttctgtggtagtcagtcatcacttgaagagatgcgattagcatttgaagagcgccttaatatcacttatccattgttgtgtcaggtccctgggtttgaggttgttaaaccacaaggagctttttacttctttccaaacgttaagaaagccatggaaatgacaggtttttccgatgtgacaagctttgctaatgctattttagaggaagtcggattagctgttgtgagtggagcaggctttggcgcaccggaaaatgttcgtctgagttatgctacagatatcgaaacccttaaagaagctgttcgtagactgcatgtctttatggaaagtaatgaaattaattaa

SEQ ID NO: 38270 - DNA, 1347 bp, Streptococcus pyogenes
atgtcaaaaaaacttatttcaattgttgatgttaaagattatgttggtcaagaagttactattggtgcttgggttgctaacaaatcaggtaaaggtaagattgcgtttgtacagttacgcgatggttctgcttttttccaaggtgtcgcttttaaaccaaacttcattgaaaaatatggtgaagaatcaggtcttgaaaaatttgacgttattaaacgtctcaaccaagaaacatctgtttatgtaacagggattgttaaagaggatgagcgttctaaatttggctatgaacttgatattactgaccttgaaatcattggagagtcacatgaatatcctataactcctaaagagcatgggacagacttcttgatggacaaccgtcatctttggttgcgttctcgtaaacaaatggctgttatgcaaattcgtaacgctattatttatgcaacttatgaattctttgaccaaaatggttttatcaaatttgatagcccaattttatcagaaaatgcagcagaagattcaacagagttattcgaaacagactattttgggaaaccagcatttcttagccaatctggtcaattataccttgaagctggagcaatggctctaggccgagttttcgactttggtccagtctttcgtgctgaaaaatctaaaacacgtcgccatttaacagaattttggatgatggatgctgagtattctttcttatcacatgaggaatcacttgaccttcaagaagcttatgttaaagcattgatccaaggcgttctagatcgtgcgcctcaagcacttgatattttagaacgtgatgttgaggctctcaaacgttatatcacagagccattcaagcgtgtttcttatgatgatgctattacacttcttcaagagcatgaagcagatgaagatacagattatgaacatttagagcatggtgatgactttggttccccacatgaaacttggatttctaattactttggagtaccgacatttgtagtgaattacccagcaagctttaaagcattttatatgaaaccagttcctggaaatccagaacgcgttctttgtgctgatcttttagctccagaaggttatggagagatcattggcggctcaatgcgtgaagacaactacgatgctcttgtggctaaaatggatgaactaggtatggataaatcagaatatgacttttaccttgaccttcgtaaatatggctctgttcctcatggcggttttggtataggtattgaacgtatggtaacttttgttgctggtaccaaacatattcgcgaagctattccattcccacgtatgttacatcggattagaccctaa

SEQ ID NO: 38271 - DNA, 891 bp, Streptococcus pyogenes
atgtcagacaaacacattaatttagttattgtgacaggaatgagcggcgctggaaaaacagttgccattcagtcttttgaggatctaggctactttaccattgataatatgcccccagccttggttccaaaatttttagaattaattgaacaaaccaatgaaaatcgtagggtggctttggttgtcgatatgagaagtcgtttgtttttcaaggaaattaattctaccttagatagtattgaaagcaatcctagcattgattttcggattctttttttggatgcaacggatggagaattggtgtcacgctataaagaaaccagacggagccaccctttggctgcggacggtcgtgtgcttgatggtattcgattggaaagagaactcctatctcctttgaaaagcatgagccaacatgtggtggatacaacaaaattgacccctagacaattgcgtaaaaccatttcagaccagttttctgaagggtctaatcaagcctctttccgtattgaagtgatgagctttgggttcaaatatggtcttcctttggatgcggatttggtttttgatgtgcgttttctacccaatccttattatcaggtagagcttcgtgaaaaaacaggactagatgaggacgtttttaattatgtgatgtctcacccagaatcagaggtgttttacaagcatttgttaaaccttattgtccctatcttaccggcttaccaaaaagaagggaagtctgtcttgacggtggctattggctgcacaggaggccaacaccgcagcgttgcctttgcccattgcttggcagaaagtctggcaacagattggtcggttaatgaaagccatcgtgatcaaaatcgtcgtaaggaaacggtgaatcgttcatga

SEQ ID NO: 38272 - DNA, 978 bp, Streptococcus pyogenes
atgaaaaatcctaaaatgactgttataggtgggggtactggcatctccattatcctaaaaagccttcgtaatgaagcagttgatattactgctgtggtcactgttgcagatgatggtggttcctcaggagaacttcgtaatgccatgcaattagctccgccaggagacttacggaatgtcttgttagcgatgagtgacatgccaaaattttatgagcgggttttccaataccgttttaacgagagtgatggagccttggctggtcaccctctaggcaatctcattattgctggtatctctgaaatgcaaggctcaacctacaatgccattcaaattttaaccaaatttttccatattacaggtaaaatttacccctctagcgagcaggccttgacccttcatgctgtttttaaagatgggcatgaagtagcaggagaaagttctattgccaaatacccaggcatgattgaccatgtctatgtgaccaacacctacaacgaccaaaagcctcaggccagtcgtaaggtggttgaggctattctagaaagtgacatgattgtcttgggaccaggctcactgtttacctctattttacctaatttggtcattccagaaattaaagaagctttgcgccagactaaagcagaagtggtgtatatttgtaatatcatgacccagtatggtgaaacagaacaattttcagatgcagaccatgtggctgttttaaatcagcacttaggaagagatttgattgatacggttttggtaaatgtggctaaggtgccgcaggcttacatgaattctaacaaatttgatgaatacctcgttcaggttgatcacgactttgctggcctttgcagggctgctaagcgtgtgatttcgtcttattttttacggttggagaatggcggagcttttcacgatggtaacttagtggtggaagaattaatgaatttagtgaggatagtcaagcaatga

SEQ ID NO: 38273 - DNA, 912 bp, Streptococcus pyogenes
atgagttttacaaccaaggtcaaagaggaattaattcacttgtccacaggtgacaacaatgaattggccgccattatcaaattatcaggcagcttgggcttagctcaccaaagccttcatttatccattaccactgaaaatgctaaaattgcccgctacatttattctcttattgaagacgcctatgttatcgtgccagaaatcaggtatcatcaaaagacgaacctgcgcaaaaaccgtgtttacaccgtctatgttgagcaaggtgtggaaaccattttagccgatttgaaattagcggactccttttttggtctggaaacaggcatcgaacctcaggttttatcagacgataatgctggccgttcttatcttaaaggggcttttctagcggcaggtagcatcagagatcctgagtcaggcaagtatcagttagaaatctattcagtttatcttgatcatgctcaagatttagctcaactcatgcaaaaatttatgctagatgccaaaaccatcgagcataaaagcggtgcagttacttatttgcaaaaggcagaagatatcatggactttttaattataattggtgccatgtcctgcaaagaagactttgaagccatcaaattacttcgagaagctcgaaatgatattaaccgtgccaataatgcagaaacagctaatattgccaaaactatcagtgctagcatgaaaaccattaataatattattaaaatcatggacacaattggtttagaaagtttaccgattgaattgcaacaggtagcccagcttcgggttaagcatccagactattccattcaacaagttgctgatgctcttgagttcccaatcaccaagagcggggtcaaccatcgcttgcgtaaaatcaataaaattgcagatgacttatag

SEQ ID NO: 38274 - DNA, 3261 bp, Streptococcus pyogenes
atggcagctgatggtaaggtaacgatacttgttgacgttgatggtaagcaggtaaaggtactcaatagtgagttagataaagttgccaagcacggtgacaaaggcagctcctctcttaaaaaatttgcggttggtgcaggagtctttaaattagcttcggctgcagttgatttggttagtcaatctcttggcaaggctatcacaagatttgacacgcttgaaaaatatccaagggtcatgaaagctatggggcatagcgctgagtatgttgctagatcaactgataagttagcgaacggaattgatggactaccaacaactttagacgaggttgtcggaaccgctcaacgtttgacctctattactaaggatatcaataaatcaactaatctcacactagcattaaataatgcctttttagcttcaggagcttcatcagaggctgcaagccgagggctggagcagtatgcccaaatgctatcagctggtaaggttgatatgcaagcttggaaaaccctccaagaaacaatgccttatgccttgcaacaaactgcggaagcttttggatttgcaggggcatcagctcaaaaggatttttatgaggcattaaaaaacgggcaaataacatttgaccaattttctaataagttgattgagttaaatgatggtgtcggcggttttgcagaactagccaaagaaaatagtaaagggattgaaacctcttttaacaacatcaagaacgctattgcaaaaggtgtggccaacagcattaaggctttggatgatttatctaaggctgcaacaggtaagggcatagctgatcattttgatagtttgaaagttgttatcaatgcctcttttagcgccatcaatgcaagtattaaagctagtacatcgctatttaaacttttgtttagtgttattggtgctggaatatcagtcgtcaaagctctgtcgcctgccttagttggtgtagcatctggtctagctgccatgagggcagttaatgagactataacaatgattaaagcgctaaatagagcttgggttatggcatctgcatcaatgagtattggagcaacaaccattaagactgtgactgcggtacaagcggtaagtaccacgatgactaaagcagatatggttgcaagactatctcagttaggtgtcttaaaagccagtaccgtgatttatggtgttatgacaggcgctatcagtttatctactgctgcaaccatagccagtactgctgcggtaactgcgttaaaagcagcacttgtagccttaacaggtcccgttggttgggtagttggagctatcggtgctttagttgctgtcggagtaagcttatggtcatggctaactaaagagtcagacgagaccaaaaagctgaaaaaagagcaggaggggctagtcgaaagcaacaaacagctaagagattctgtccgtgagggcgtgcaagagcgtaagaagggccttgagtccgtcaaagagagcactgcagctcatcaaaaattagctgacgaaatcattaagttagccgccaaagaaaacaaaactgcaggcgaaaaacaaaacttaaaaaataagattgatcagcttaatgggtctattgatggcttaaacttggcctatgacaaaaactccaattctctttctcacaatgcagatcaaattaagtcacgcattagtgccatggaagcagaaagcacatggcaaacagcacaacaaaacctgttaaatattgaacagaaacgtagtgaggttagtaaaaagctagctgaaaatgccgagctacgtaaaaagtggaatgaagaagctaacgtctccgactctgtccgaaaagaaaagattgccgaactcacagaagaagagggtaagcttaaaaatatgcagactcaattgcaggaggagtataacaagacatcagctactcaacaagctgctgcagacgctatggctgccgctgaagaatcaggatcagcaagacaggttatagcgtacgaaaatatgtcagaagctcaacgaactgccatagacaatatgcgcactaagtactctgaacttttagagacaacgacatctatttttgatgctatcgaacaaaagactgctctgtcagtggagcaaatgaatgccaaccttgaaaaaaatagagctgctactgaacaatgggctacgaatttggaaattttagctcagcgtggtgtagaccaaggcatcttggaacagcttaggcggatgggacctgagggggcaacacagacacaggtttttgtggatgccacagatgccgagctagcacccttgcaggaaaactttagagcagccacagaaactgctaaaaatgcaatggggagcgttttagactcagcaggtgtggaaatgccagaaaaagttaaagggatggtcactaatgtttctacgggattacaggcggaactgcaagctgctaactttgctcaacttggtcaagaaatccctaatggggtttctcaaggtataagtcaaggggcaggtaaagcaagtgacgcaagtgtcaaaatgggtcaagaagttaaacgctctttccaaggagagttgggtatccactcgccatcgcgagtatttactgagtacggtggccatattactgatggcttgagtaatggtgtgacaaatggaacgtcaaaagttatgcaaaccatgcagagcttggctcaacagatgtctcaaaaaggacagcagattgttaatgacatgcgtagcaagtcgaaccaaatcacagatgcttttagcacgatgagtggtccaatgcactctcatggtgttaatgccatgcaaggtttggccaatggtatttatgcagggtcgggggcagctttagcggcagctcaaagcattgcggcacgtatcaccgcaacaattcaaagtgccttagatatccactcgccatctcgtgttatgagggatgaggttggacgttttatccctcagggtatcgctgtaggtattgatgcggatagaaaagtcattgactcatctatgcaaaagctaaaagagtcaatgacgattaatgcgaccccagaaatagcctctggatttggcggaggagttgcggggattgctaatcagaccacaaataactcaaataacagttttacccttaatgtcaaggttgatgaatccgacggtaatagccgcgagaaatatcaacgcttattcagagaatttagctggtatattcaacaacaacaaggaaggttaggtgatgttaaatga

SEQ ID NO: 38275 - DNA, 261 bp, Streptococcus pyogenes
atgagaaaagacattcatccagattatcgtccagttgttttcctagatacaactacaggttaccagttccttagcggctcaacaaaagcttctaaagaaactgttgagtttgaaggtgaaacttacccacttatccgtgtggaaatttcatcagattcacacccattctacacaggacgtcaaaagttcactcaagcagatggacgtgtggaccgcttcaacaaaaaatacggtctcaaagacgcaaacgcagcaaaataa

SEQ ID NO: 38276 - DNA, 348 bp, Streptococcus pyogenes
atgaatccattaatccaaagtttgacagaaggtcaacttcgctctgatatccctaacttccgtcctggtgacactgttcgcgttcacgcaaaagttgtcgaaggaactcgcgaacgtatccagatctttgaaggtgttgttatttcacgtaaaggtcaagggatctcagaaatgtacactgttcgtaaaatctcaggtggtatcggggtagagcgtacattcccaatccacacaccacgtgttgacaaaatcgaagttatccgccacggtaaagtccgtcgtgcgaaactttactacttgcgtgcattacaaggtaaagcagctcgtatcaaagaaattcgtcgttag

SEQ ID NO: 38277 - DNA, 1953 bp, Streptococcus pyogenes
atgattgaagaaaataaacattttgaaaaaaaaatgcaagaatacgatgccagtcaaattcaggttctagaagggctggaggctgtccgcatgcgtccagggatgtatattggctcgacagctaaagagggtttgcatcatttagtctgggaaattgttgacaactcaattgacgaagcattagcaggttttgcctctcatattaaagtctttattgaagcagataattccattacagtagtagatgatggccgtggaattccagttgatatccaagccaagacaggacgtcccgccgttgaaacagtttttacagtcttacacgcaggtggtaaatttggtggaggcggctataaggtttctggaggattacatggtgtagggtcatctgttgttaatgctttatcaacacaattagatgtacgtgtttataaaaacggccaaattcattaccaagaatttaaacgcggggctgttgtagcagatcttgaggtcattggaaccactgatgtgactggcacgaccgtacactttacacccgatccagaaatttttaccgaaacgactcagtttgattacagtgttttagcaaaacgtattcaagagttagcctttttgaatcgtggtttaaaaatttccattacagataagcgctcaggtatggaacaagaagaacatttcctttatgaaggtggaattggttcttatgttgaatttttaaatgataaaaaagatgttatctttgaaacgcccatctatacagatggtgaattagaaggtattgcagttgaagtagccatgcaatacacgactagctatcaagaaacagtcatgagttttgctaataatattcatactcatgaaggtggaacgcatgaacaaggctttagagcggctcttactcgggtcatcaatgactacgctaagaaaaataaaattcttaaagaaaatgaggacaatttgacaggagaagatgttcgtgaaggtttgacggcggtaatttctgttaagcatccaaatcctcaatttgaaggtcaaaccaaaacaaaattgggcaactcagaagtggttaagatcactaatcgtctctttagtgaggcctttcaacgttttcttttggaaaacccacaagttgctcgtaagattgtggaaaaagggattttggcttctaaagctagaattgcagctaagcgagcccgcgaagtcacccgcaaaaaatcaggcttagaaatttcaaacttacctggaaaattagcagactgttcgtcaaatgacgctaaccaaaacgaacttttcatcgtcgaaggagattcagcgggtgggtcggccaaatcaggtcgtaaccgagagtttcaagctatcttgcctattcgcggtaaaattttgaacgtggaaaaagcaactatggataagattcttgccaacgaagaaattagaagtctctttaccgctatgggtacaggttttggtgcagattttgacgtgtcaaaagctcgctaccaaaagctggttatcatgaccgatgccgatgtggatggcgctcatattagaaccttacttttaaccttgatttaccgctttatgagacctgttctagaagctggctatgtttacatcgcccagccacctatttatggtgttaaggtcggtagtgagattaaagagtatattcagccaggtattgatcaagaagaccaattaaaaacagctcttgaaaaatatagtattggtcgttcaaaaccaactgttcaacgttataaaggtcttggggaaatggatgaccatcaactttgggaaactactatggatcctgaaaatcgtttgatggcgcgtgtgacagttgatgatgccgcagaagcagataaagtatttgatatgttaatgggagatcgtgttgaaccaagacgtgatttcattgaggaaaatgcggtttatagtacactggatatttag

SEQ ID NO: 38278 - DNA, 1308 bp, Streptococcus pyogenes
atgtcaattattactgatgtatacgctcgcgaagtccttgactcacgcggtaacccaacacttgaagtagaagtttatacagaatcaggtgcattcggacgtggtatggttccttcaggagcttcaactggtgaacatgaagccgttgaacttcgtgatggtgacaaatctcgttaccttggtctaggtactcaaaaagcagttgataacgttaataacattatcgctgaggcaatcatcggttacgatgttcgcgatcaacaagctatcgaccgtgcaatgatcgctcttgacggtactcctaacaaaggcaaacttggtgctaatgctattcttggtgtttctatcgctgttgctcgtgcagctgctgactatcttgaagtgccactttacacttaccttggcggattcaacactaaagttcttccaactcctatgatgaacatcatcaacggtggatcacactcagatgccccaattgcattccaagagttcatgatcatgccagttggtgcacctactttcaaagaaggtcttcgttggggtgctgaagttttccacgctcttaagaaaattcttaaagaacgcggacttgttacagctgtaggtgacgaaggtggatttgctcctaaatttgaaggaactgaagacggtgtagaaactatccttaaagctattgaagcagctggttacgaagctggtgaaaacggcattatgatcggttttgactgtgcatcatcagaattctacgacaaagaacgtaaagtttacgactatactaaatttgaaggtgaaggcgctgctgttcgtacatctgcagaacaagttgattaccttgaagagttggttaacaaatacccaattattactatcgaagatggtatggatgaaaacgactgggatggttggaaagttcttactgaacgcctaggcaaacgtgttcaattggttggtgacgacttcttcgttacaaacactgaataccttgctcgtggtatcaaagaaaatgcagctaactcaatccttatcaaagttaaccaaatcggtactttgactgaaacgtttgaagctatcgaaatggctaaagaagctggatatactgccgttgtatcacaccgttcaggtgaaactgaagattcaacaatcgctgacatcgcagttgcaacaaacgctggccaaatcaaaacaggttcattgtcacgtacagaccgtattgctaaatacaaccaattacttcgtatcgaagatcaacttggtgaagttgctcaatacaaaggtatcaaatcattctataacttaaaaaaatag

SEQ ID NO: 38279 - DNA, 6138 bp, Streptococcus pyogenes
atgcgtaaggtcaaaaaagtctttgttagttcatgtatgcttttaacagtgggcctcggagttgccgtacctactggattcagccaatctaatggcgtgatggttgtaaaggctgcggaagtgccggcgacagatttatcacgtcaggcgtctgattcggagagggtagatgaatcgtctttattgcagaaagaaaacttatcagtagattcatttaaattagaaaatttaaatggatgggaagctgaaaatgatacagcaggtaatttggggaaatttaaagatccagatagttcgggctatcaaaatattttgacatcatctggaaagaatatcagtgtagctgttgctcccaaaggttcaggtaaaatgaacattaaagtaactaaaagatcaaattttcagggtggatattatgtaggtggtcttagaactcaaactccggtattgaagttaaatgatgtttatcgatattcttttacaactaaaaaattatcaggaaattcttcagagttcaaaacgagagttaagcccgttgaatctaataataaactagggaaagagcttgttattagggtggataataaaaatgtatctactaagcatgattggcttccagacatctctgatggaactcatactgtggacttcactggtcttgataaaaaattatctgttgctttcagattttctccaagacaaacttcgaatgttgtttacgaattttctaacataaatataaaaaacattagtcctgcatcagtgccggctattccttcgaaagttttagagggaaccagcgtcttgtcgggtactgcaatatcttctggagatacattagaaaaaagaaaatcgtttgatggcgatatcctaagagtttataaagatagcaaaatcattgctagaacagtaataaaaggcaataagtgggatgttaaactttcaaagcctcttattgcaggtgaaaaattagattttgagattttgcatccgagatctcaaaacgttagtaaaaaaatttcaaaacaagtcgaagctaaaccatttgatccagcttcctataaagaaaaagttatagccaaattaaagccggtttatgaagctactagtgaaaaaatcacaaatgatgcttggttggatgaaaatgcgaaggatttgcaaaaacaaaaattagaagaacaatatatttctggaaaagtagcgatatcagaggctggaactaaacaagaagctatagatgcagcatataataaatattcaagtcaaacagatccagactctcttcctagtcagtataaacaaggtaataaagaaaatgaacaagaaaaagggcgtcaagatttaatccagactcgtgatctgacgttgaaagccattcaagaagacaaatggctaacagagcaggagaaaacaattcaaaaagaagaagcattaaaagcttttgaaactggtatagaaagtgttaatcaaacagtatcattagaacagttgaagcaacggttaatagtgtataaagcttctgaaaaagattcagagaaaaaagaatatcctgagtcaattcctaatcagcatattccagggaaagaaaaagaagttaaagctgctaaacaagaagaacttaaaaaattacatgacacaactcttgaaaaaatcaatcaagataaatggttgacgccagaccaacaagctgaacagttaaaacaagcggaagttacttttaaaaaaggccaagaagcaattaaaagtgctcagactttaactcagcttgagacagacttagctgattatgtttctgagaatgaaggtaagggaaattctattcccgataaatacaaatctggcaataaagatgatttggtaaataaggctgaagttaaacttaaggaagctcacgaagctactaaacaagcaattgaaaaagatccatggttgagtccggaacagaaaaaagctcaaaaagaaaaagccaaagcaagactagatgagggcttgaaagctcttaaagctgcagatagtttagagattcttaaagtgacagaagaagctttcgttgataaagaaaaaaatccagattcaattccaaatcaacataaagctggaactgctgatcaagctagaaaacaagctttagatagtttagataaggaggttcaaaaagagttagagtcaattgataacgataatactctaacaactgatgagaaagcagctgctaagaaaaaagtcaatgacgcttatgatgtagctaagcaaacagctatggaagccaattcttatgaagatttgactactattaaagatgagttcttatctaatttacctcataaacaaggaacgccgcttaaagatcaacaatctgatgctattgcagaattagagaagaagcagcaagaaattgaaaaagctattgagggtgataaaacattaccaagagacgaaaaagagaaacaaattgctgactctaaggaacgcttaaaatctgacacgcaaaaagttaaagatgctaaaaatgctgatgctattaaaaaagcatttgaagaagggaaagtgaatattcctcaagcacatatcccaggtgatttgaacaaggataaagaaaaacttcttgcagaattgaagcaaaaagcagatgatactgaaaaagctattgatgttgataaaactctgacagaagatgagaaaaaagagcaaaaagtcaaaacaaaagctgaacttgaaaaagctaaaactgatgttaaaaatactcagacacgtgaagaactagataaaaaagttccagaacttaagaaagctattgaagacactcacgttaaaggtaatcttgaaggtgttaagaataaggctattgaagatcttaaaaaagctcatactgaaacagttgctaaaataaatggtgatgatacccttgacaaagctactaaagaagctcaagtgaaagaagctgacaaagctttggcagcaggtaaagatgcgatcactaaagcagatgatgctgataaagtaagtacagctgttacagagcacacaccaaaaattaaagcagcacataaaactggtgaccttaaaaaagctcaagtagatgctaacacagctcttgacaaagcagctgaaaaagaacgtggagaaatcaataaagatgctacactaacgacagaagataaagcaaaacaactgaaagaagttgagacagctcttactaaagctaaagataacgtgaaagctgctaagacagcagacgctatcaatgacgcacgtgataaaggcgtagcaacaattgatgccgtccataaagcaggtcaagacttaggtgctcgtaagtcaggtcaagtcgctaaacttgaagaagcagctaaagcaacgaaagacaagatttcagctgatccaactttgacaagcaaagaaaaagaagagcaatctaaagctgttgacgctgaacttaagaaagcgatagaagctgttaacgcagctgacacagctgacaaggttgacgatgctcttggtgaaggtgttacagacatcaagaaccaacacaagtcaggtgactctatcgacgctcgtcgtgaggctcatggtaaggaacttgatagagtcgctcaagaaactaaaggtgcgattgaaaaagaccctactttgacgactgaagaaaaagctaaacaagttaaagacgtagatgccgctaaagaaagaggcatggctaagcttaatgaagctaaagatgctgatgctttagacaaagcttacggtgaaggtgttacagacatcaagaaccaacacaagtcaggtgaccctgtcgacgctcgtcgtggattacacaacaagtcaatcgacgaagtggcgcaagcaactaaggacgctatcacagcagatacgactttgactgaagctgaaaaagaaacacaacgtggcaatgttgataaagaagcaactaaagctaaagaagaacttgctaaggctaaagatgctgatgctttagacaaagcgtacggtgacggtgtaaccagcatcaagaaccaacacaagtcaggtaaaggtcttgacgttcgtaaagatgagcacaagaaagctcttgaagctgttgctaaacgtgtcactgctgaaattgaggctgatccaaccttaacaccagaagtgagagaacaacaaaaagcagaggttcaaaaagagcttgaacttgcgactgataagattgctgaagctaaagatgcagatgaagcagacaaagcttacggtgacggtgtcacagcgatcgaaaatgcccacgttattggtaaaggtatcgaagctcgtaaagaccttgctaagaaagaccttgctgaagctgctgctaagacaaaagctctcattattgaagacaaaacgcttactgatgatcaacgtaaagaacagttattaggtgttgatacagagtatgctaaaggtatcgagaatattgatgcagctaaggatgctgcaggtgttgataaagcatatagtgacggtgttcgtgacatcctggcacagtacaaagaaggtcaaaaccttaatgatcgtcgtaatgctgccaaagaatttcttcttaaagaagcagacaaagtgacgaaactaatcaatgatgatccaaccttgactcatgaccaaaaagttgatcaaatcaacaaagttgaacaagctaagttagacgcaatcaagtctgttgatgatgctcaaacagctgatgctatcaatgatgctcttggtaagggtattgaaaacatcaacaaccaataccaacatggcgatggcgttgatgttcgtaaagcgactgccaaaggcgatcttgaaaaagaagctgctaaagtgaaagctcttattgctaaggatccgaccttaactcaagctgataaagacaaacaaacagcagcggttgacgcagctaagaatacagcaattgcagcggttgataaagcgacaacaactgaaggcattaaccaagaacttggtaaaggcatcacagctatcaataaagcttaccgtccaggtgaaggtgttaaagcacgtaaagaagccgctaaagctgatcttgaaaaagaagctgctaaagtgaaagctcttattactaacgacccaaccttaacaaaagctgataaagctaaacaaacagaagctgttgctaaagcccttaaagctgctatcgcagcggttgataaagcgacaacagctgaaggcattaaccaagaacttggtaaaggcatcacagctatcaataaagcttaccgtccaggtgaaggtgttaaagcacgtaaagaagccgctaaggctgatcttgaaagagaagctgctaaggttcgtgaagctatcgctaacgacccaaccttaacaaaagctgataaagctaaacaaacagaagctgttgctaaagctcttaaagctgctatcgcagcggttgataaagcgacaacagctgaaggcattaaccaagaacttggtaaaggcatcacagctatcaacaaagcttaccgtccaggtgaaggtgttgaagcacataaagaagctgctaaagctaatcttgaaaaagtagctaaagaaactaaagctcttatttcaggagaccgttacttgagcgaaactgaaaaagcagtccaaaaacaagctgttgagcaagctcttgcgaaagcacttggtcaagttgaggctgctaagacagttgaagctgttaagttggcagaaaaccttggtactgtagctatccgttcagcatatgttgctggtttagctaaagatactgatcaagcaacagctgctcttaacgaagcgaaacaagctgctattgaagctcttaaacaagctgcggcagaaacacttgctaagattacaactgatgctaaattgactgaagctcaaaaagctgaacaatcagaaaatgtatcattagcgcttaagacggctattgcgactgttcgttcagcacaatctattgcgtctgtgaaagaagcaaaagataaaggtattactgctatccgtgcagcctatgtgcctaataaggcagtcgcaaaatcatcgtcagcgaaccatcttccaaaatcaggtgatgcaaactcaattgttcttgttggcttaggagttatgtctcttcttttaggtatggtgctttatagcaagaaaaaagaaagtaaagactaa

SEQ ID NO: 38280 - DNA, 924 bp, Streptococcus pyogenes
atgagttttgtacaattaacaaatgttgtcaagtcctacaaaaacggcaagaaagctgtcaatgatgtttccttgtctattgaagcaggtaatatttatggtttgttaggaccaaatggtgctggtaagtctaccttgattaatcttatcttaggcttgatccctttgagttccggtaaaattactgttttagggcaatcccaaaagactattcgaaaaataagttcgcagataggttatgttcctcaagacattgctgtttatccagacctaactgcttatgaaaatgtagaactatttgggtcactttatggcttaaagggagctcagcttaaaaaacaagttctaaaaagtttagaatttgtggggctacactcccaagctaagcagtttccaagtcaattctcaggaggaatgaagagacggttaaatatcgcttgtgcgctagttcattcacctaaattaatcatttttgacgaaccgactgtagggattgatcctcaatcacgtaatcatattttagagtcgattcgtttgctaaacaaagaaggtgctacagttatttatacgacccattatatggaagaagtagaggctctttgtgattatatttttattatggatcatggtcaagttattgaagaaggacctaaatttgaactggaaaaacgttacgttgcaaatctagcaaaccagattattgtaactctaacagattcacgtcatttggaactggcagataagcctgattggtctttgatagaagatggagaaaaactcatgttgaagattgataatagtgatatgacatcagttgttcatcagctcacacaggccaatattacttttagcgagattagacataaccatttgaatttagaagaaattttcttacacttaacaggtaagaagttacgagattag

SEQ ID NO: 38281 - DNA, 1959 bp, Streptococcus pyogenes
atgaaaaaacgcataaaagaattaacagatcttcttaaccgttaccgttatgactattatactaaagatgccccatcagtttctgacagtgactatgataagctttatcgtgaactggtgactttagagcagtcatatcccgagtatgtcttgcaagatagcccaacgcagcaggttggagggactattttaaaggggtttgaaaaatatcgacatcagtatccgctttttagtttgcaggatgctttttcacgtgaggagctggatgcttttgataagcgcgtcaaggccgaatttccgaatgccacctatctagcagagttaaaaattgatggtttatctatttccttgagttatgagaatggcttcttacaggttggagcaacacggggtgatggcaatatcggtgaaaatatcacagaaaatatcaaaaaaataaaggatattccttaccaattgagtgagcctttaaccatcaccgttcgaggagaggcttacatgtctcgtcagtcctttaaagcgatcaatgaagcacgccaagaaaatggggagactgaatttgctaatcctagaaatgctgccgctgggacactaaggcagctagatacgtcagtggttgctaagcgtcaactagccacttttttgtatcaagaagctagtccgacagctagaaatcaacaaaatgaggtcttagcagaattagcagatctaggtttttcagtaaatccgtattatcaactcacatcgtctatggatgagatttgggattttatcaaaactattgaggcaaaaagagatcaattagcttatgacatagatggcgttgttattaaagttaatagcctagccatgcaagaagagctagggtttacggttaaagctccacgctgggccattgcttacaaatttccagcagaagaaaaagaggcagaaatcctttcggttgactggacagtgggacgaacaggcgtggtcacacctacagcgaatctaactcctgtgcaactagcggggacaaccgtgagtcgtgcaaccctacataatgtggattatattgccgaaaaagatatccgtattggcgatacagtgattgtatataaggcaggggacattattcctgctgtcttaaatgtcgttatgagtaagcggaaccagcaagaagtcatgcttattcctaaactatgcccatcttgtggtagtgaattagttcattttgaagatgaggttgctttgcgttgtattaatccgttgtgtcctagtttgattcagcgaagtttggagcattttgcaagtcgtgatgccatgaacattactgggctgggaccagctattgtggaaaaactatttttagcggggtttgttcatgatgttgctgatatttaccagttgaccaaagaagatttcatgcaattagatggcatcaaagaaaagtcagctgataaattgctcgctgcgattgaggcttctaaatcaaattcagctgaaaaactgttatttggtctaggaattcgtcatattggctctaaggttagtcgcttaattttagaggtatacggagatatttctgctcttttaaccgctaaagaagaggaaatcgcaaggatagatggtcttggctcaacgattgctcaatcacttactcaatactttgaacaaaaaacggctgcgattttagtagacgagttaaagacagcaggtgtcaacatgcattactcaggtcaaaaagttaatagtgacgcagcgctttttggtctaactgttgttttaactggcaaattaaatcagctgaaccgaaatgaggccaaagataaattagaggcattaggtgccaaagttactggaagtgtatctaagaaaacagatttagttattgcaggtagtgacgctggttctaagctagaaaaagcaaagagcttaggaattcggattgaagatgaagattggctacgccagctttaa

SEQ ID NO: 38282 - DNA, 1023 bp, Streptococcus pyogenes
atgaaaaaacaattgagagcacgtctcatttataatccaacgtcaggacaagaacttatgagaaaaagtgttcctgaagttttagacatattagaagggttcgggtatgaaacatctgcctttcaaacaacagcccaaaagaactctgctctaaatgaagcaagaagagcggcaaaggcaggttttgacttattgattgctgctggaggtgatggcactattaacgaagtggtcaatggaattgctcccttgaaaaagcgccctaaaatggccattattccaacaggtaccactaatgattttgctagagcattaaaagtaccaagaggaaatccgagccaagcagcaaaacttatcggaaaaaatcagactatccagatggatattggtagagctaagaaagatacttatttcatcaatattgctgcagcaggaagtttgacggaattaacttacagtgtaccaagtcagttaaaaacgatgtttggatacttggcttatcttgctaaaggagtagaactgctcccaagagttagcaatgtgcctgttaaaattacgcatgacaaaggcgtctttgaaggtcaagtttctatgatttttgcagctattaccaattctgttgggggatttgaaatgattgctcctgatgcaaaactagatgacggtatgtttacgctcattttaataaagacagcaaatctttttgaaattgtacatcttttgcgtttgattttggatggtggtaagcatattacagatcgccgtgtcgaatacattaagaccagtaaaatagtcattgaaccccaatgtggtaagcgaatgatgattaatttagatggcgagtacggaggagatgctccaattacattagagaacctaaaaaatcatatcactttttttgcagatactgatttgatttctgatgacgctttagtcttagatcaggacgaattggaaattgaggaaatcgtaaagaaatttgctcatgaagtagaagacttaggacaagaattagaagaataa

SEQ ID NO: 38283 - DNA, 717 bp, Streptococcus pyogenes
atggaagaagctaaaatacctatgctgaagcttggtccaataacctttaatttgaccctacttgctgtttgtattgtcacaattgcgattgtctttgcctttgttttttgggcaagtcgccaaatgaaattgaaaccagaagggaagcaaactgctttagaatatttaatcagttttgtggatggtattggagaagagcacttagatcataatctacaaaaatcttattcgctgttactctttaccatttttctctttgtggctgtcgctaataatttagggttatttactaagttagagacagttaatggctataacctatggacctcgccaacagccaatctggcttttgaccttgctctatctctttttattaccttaatggtacacattgaaggggttagacggcgtggcttggttgcccatttgaaacgtttggctacaccgtggccaatgactccgatgaatttattagaagagttcacaaatttcttatcacttgccattaggttattcggtaatatctttgccggggaagttgttacaggtttgattgttcaactggccaattatcgagtttattggtggccgattgctttcctagtcaatatggcgtggacagccttttcagtctttatttcctgcatacaggctttcgttttcacaaaactgacagcgacctatctaggaaagaaagtcaatgaatcagaagaataa

SEQ ID NO: 38284 - DNA, 495 bp, Streptococcus pyogenes
atgtcaatcacatttggtgaactcgttgggaattttattctagtaacaggttctgtaatcgtcttgttactcttgatcaaaaaattcgcttggggtgcgattgaatcgattttacagacacgctcacaacaaatctctcgagatattgatcaggctgagcaatcacgtctaagtgctcaacagttagaggcaaaaagtcaagctaacctagatgctagtcgtttacaagcaagtaaaatcattagtgatgccaaagaaattggtcaattacaaggtgataaattggtggcagaagctactgatgaagcaaaacgcttgaaagaaaaagcgttgacagatattgaacaaagcaaatcagacgctatttcagcagtcaaaacagaaatgtctgatttaacggttcttttagcggaaaaaattatgggagccaatcttgataagacggcgcaaagccagcttattgacagttatcttgatgacttaggagaagcttaa

SEQ ID NO: 38285 - DNA, 537 bp, Streptococcus pyogenes
atgaccaaaaaagaacaggctcttatcgagcaatatgcaaaaagccttgttgaggtggcgagtgaacatcattctcttgatgccttacaagctgatgtgcttgcgattttagagacgtttgtaacaactaatcttgatcaaagtctatcaagtcaagctgttccgcatgctgaaaaaataaaattgctaaccttattaaagggaaataattctgtttatatgaataatttcttgaatctcattttacaaaacgaacgtgaagcttatttgtatcaaatgcttcaggctgttttaaatgaaattgcaatagtttcaaatcagtatgatgtgactgttacctcatcactacctttgactgaggagcaaaaaagccgtgttcgagcagttgttgcaaagaaatttgctgtaacagcgggtcgtttaattgaaaaagtagatccttcgcttattggaggatttattatcagcgtcaataataaagtaattgataccagtattcgtcgtcaattgcaagcatttaaaatgaatttaaaatag

SEQ ID NO: 38286 - DNA, 1509 bp, Streptococcus pyogenes
ttggcaattaatgcacaagaaattagcgctttaattaaaaagcaaattgagaacttccagccaaatttcgatgtcacagaaactgggatcgttacctatattggtgacggtattgcacgtgcccgtggattagataatgccatgagtggtgaacttcttgaatttgaaaatggtgcctacgggatggctcaaaaccttgagtcaaatgatgtgggtattattattcttggtgatttttcagcaatccgtgaaggagatgtggttaagcgcaccggtaaaatcatggaagtaccagttggtgaagctctcattggacgtgtggtaaacccacttggacaaccagttgatggcttgggagatattgaaacaactggctttagaccagtagaaacgccagctcctggtgttatgcagcgtaaatccgtttctgaacccttacaaactggattaaaagcaattgatgctttggttccaattggtcgtgggcaacgtgagttgattatcggagaccgtcaaacaggaaaaacatccgtagctattgatgcgattttgaaccaaaaaggtcaagacatgatttgtatctatgtggctattggtcaaaaagaatcaaccgttcgtacacaagttgaaacccttcgccgttacggtgccttggattatactattgttgtgacagcgtcagcctcacaaccatcaccattgctctttatcgctccttatgcgggtgttgccatggctgaagaatttatgtaccaaggcaagcatgtcttgattgtctatgatgatttatcaaaacaagcggtggcttatcgtgaattgtctctcttgcttcgtcgtccaccaggtcgtgaggcttacccaggggatgttttctacttgcatagccgtcttttggaacgctctgcaaaagtttctgatgacttaggtggaggttctatcacagctctaccatttatcgaaacacaggccggagatatctctgcatatattgcgactaacgttatttcgattacagacggacaaatcttcttgcaagagaacctctttaattcaggaattcgtccagcgattgatgcaggatcatctgtctcacgtgtaggtggttccgctcaaattaaagcgatgaaaaaggttgctggtactcttcgtttggatttggcttcctatcgtgaattagaagcctttacccaatttggttcggaccttgatgctgcaacacaagcaaaacttaatcgtggtcgccgtacggttgaaatcttgaagcaaccattgcataaaccgttacctgttgaaaagcaagtcgttattctttatgcccttactcatggtttcttagatgatgttcctgtagatgatattttggcttttgaagaagctctttacgactactttgacgttcattacaatgatttatttgaaactatccgtaccacaaaagaccttcctgaagaagctgcccttgatgccgctattaaagcgtttaaagaacactcaaactttaagtcatag

SEQ ID NO: 38287 - DNA, 1272 bp, Streptococcus pyogenes
gtggataaaataatcattgaaggtggtcaaacacgcttagaaggagaagttgttattgagggtgctaaaaacgcagttcttcctttactggcagcatctattttaccttcaaaaggaaaaacaattcttagaaacgttcctattctatctgatgtttttaccatgaataacgtggtacgtggtttagatattcgtgttgattttaatgaagcagctaacgaaatcacagttgatgcctcaggacacattttagatgaagccccttacgagtacgtgagccaaatgcgtgcctctattgttgttttaggaccaattttggcacgtaatggccacgcaaaagtatcaatgcctggaggctgtacgattggcagtaggcctattaatttgcacttaaaaggattagaggctatgggggcaacgattactcaaaaaggtggagatattaccgctcaagcagatcgactgcaaggtgccatgatttatatggacttcccatctgtaggagctacccaaaacttgatgatggctgccactttagctgatggtgtgaccactattgaaaatgctgctcgtgagcctgaaattgttgatttagctcaatttttgaataaaatgggagctagaattcgtggtgctggaacagagacgttaacgataacaggtgtcacgcatttacgaggcgtagaacatgatgttgttcaagatcgtatagaagccggtacatttatggttgcagcggcgatgacttcaggcaatgttttgattagagatgctgtttgggaacataatcgtccattgatttcaaaattaatggaaatgggtgtttctgtaacagaagaagaatacggtattcgcgttcaagcaaacacgccaaagctcaaacctgtaacggttaaaaccttgcctcatccaggttttccaacagacatgcaagctcaatttacagctttaatggcagtggtcaatggagagtctactatggttgaaactgtctttgaaaatcgatttcaacatctggaagaaatgcgacgcatgggcttacaatctgaaatccttagggaaactgccatgattcatggtggaagacaactgcaaggtgctcctgtgatgtcaacagatttacgtgccagtgctgcccttatcttgacagggattgttgctcaaggagttacaatagttaataatttggttcatttagatcgtggctactatcaatttcatgaaaaattagcaaagcttggagctactattagtcgtagcagtgaggtctag

SEQ ID NO: 38288 - DNA, 1122 bp, Streptococcus pyogenes
atggtaccgcgtgtcaacgctccgcttatcaagtggaggagtggcatgcttttttcatcgccaaaagaagggaaaactatggatttacaagcacaattagaggaattaaagacaaaaacattggagaccttacagtctttgacgggtaatcataccaaagaactgcaagatttgcgcgtggctgttcttgggaaaaagggatctttgacagaattactaaaggggctaaaagacttgtctaatgacttgcgtcctgtggttggtaaacaggtgaacgaagttcgtgacttattgacaaaagcctttgaagaacaggctaaaattgtagaggctgctaaaattcaggcccaacttgatgctgaaagcattgatgtgactttaccgggtcgtcaaatgactctggggcatcgtcatgtgttaacacaaaccagtgaagaaatcgaagatattttcttaggaatgggttttcagattgttgatggctttgaggtggaaaaagattattacaactttgagcgcatgaatttgccaaaggatcaccctgcccgtgacatgcaagatacgttttatatcacagaagaaatcttgttacgaactcacaccagtcctgtgcaggcccgtactcttgatcaacatgatttttcaaaagggcctttaaaaatggtttctccaggtcgtgttttccgtcgtgatactgatgacgctacccactcacatcaattccatcaaattgaaggtttggttgtgggcaaaaatatttccatgggagacctcaaagggacccttgaaatgatcatcaagaagatgttcggtgacgaacgtagcattcgtttgcgcccgtcatatttcccgttcacagaaccatctgttgaagtggatgtttcttgctttaaatgtggtgggaaaggctgtaatgtctgcaagaaaacaggatggattgaaattcttggtgctggtatggttcacccaagtgtcttggaaatgtcaggtgttgatgcaaaagagtattcaggctttgcctttggtttaggtcaagagcggattgccatgttgcgttatggcattaatgacattcgtggtttctatcaaggcgaccaacgtttctctgaacaatttaactaa

SEQ ID NO: 38289 - DNA, 2406 bp, Streptococcus pyogenes
atgttagtatcttataaatggttaaaagaattagtagatatcgatgtgacaccagcagcacttgctgagaaaatgtcgacaacgggtatcgaggtagaaggaattgaagtccctgcagatggtttatcaaaactggttgtggggcatgtgctttcttgtgaagatgtgccagagacacatttgcatttgtgtcaggtagatacaggtgatgaaacgccacgtcaaattgtgtgtggcgcaccaaatgtgaaagcagggattaaggttatcgtggctgtgccaggtgctcgtattgcggataactataaaatcaaaaaaggcaaaatccgcggcatggaatctcttggcatgatttgttccttgcaagaacttggtttgtcagatagtattattccaaaagaattttcagatggtattcaaatcttgccagaggaggctgtgccaggtgatgctatttttaaatacctggacttggacgatcatatcattgaattgtccattacacctaaccgtgctgatgcgctttctatgcgaggtgtggcacatgaagtcgcagctatttatggcaagtcagtatcattcccccaaaaaaatctacaagaatctgataaggcaacttcagaagccattgaagtggccattgcctctgataacgttctaacttacgctagccgtgtcgttgaaaatgtcaaagttaagccaagtccacaatggttgcaaaaccttttaatgaatgctggtattcgtcctattaataatgtggttgatgtgaccaactatgtgctcttgtattttggtcaacctatgcatgcttttgattatgataaatttgaagaccataagattgtggcgcgtgcggctcgtcaaggagaaagtttggtcacacttgatggtgaaaaacgggatttgaccactgaggatcttgttattaccgtggctgacaaaccagttgctttagcaggtgttatgggtggtcaagccactgaaattgatgccaactctcagacggttgttcttgaagctgctgtttttgatggcaaatcgattcgtaaaaccagtggtcgtttaaaccttcgttcggaatcctcttcacgttttgaaaaaggggttaactatgcaactgttttagaagcacttgactttgcagcggctatgttacaagaattagcagaaggtcaagtcttatcaggccatgttcaagctggacaattgccaacagaacctgttgaagtctcaactagccttgactatgtgaatgttcgtttaggaacagaattaacttttgctgatattcaaaggatttttgaccaacttggatttggtctaacaggagatgaaacaagcttcacggtagctgttcctcggcgtcgttgggatgttagcatcccagctgacttggtggaagaaattgcgcgtatctatggttatgataagttgccaacaaccttaccagaggcagggggaacggctgcagaattaacgccaacacaggctcttcgtcgtaaagtccgtggcttagcggaaggattgggcttgactgaaatcatttcgtatgctttgacaacaccagagaaagctgttgagtttgcagtggcaccaagtcacctgacagaactcatgtggccgatgtctgtggagcgttcagcactacgtcaaaatatggtttcagggatgttagatacggttgcctataatgtggctcgtaaacaaagtaacttggctctttatgaaattggaaaaatctttgaacaagaagctaatccaaaagaagaccttcctaatgaagtgaaccattttgcttttgctatttgtggcttagtggcacaaaaagatttccaaacccaagctcaggcagtggatttttaccatgctaaaggtaacttggatactttatttgcaaaccttaacctcaaggttcaatatgtgccaaccaaagacctagcaaacatgcacccaggacggacagcgcttatcctattagatgagcaagtgattggatttgttggtcaagttcatccaggaacagcaaaggcttatagtattccagaaacctatgtggcagaattggatatggctgctttagaagcagcgttgccaagtgatcaaacttttgcggaaatcacaaaattccctgctatgacacgtgatgttgccttgttacttgaccgtgaggtgagtcatcaggccattgtaacagctattgaatcagcaggtgtaaaacgcttgactagcattaaactctttgacgtctatgaaggagcaaccattcaggctggcaaaaaatcaatggcttatagccttactttccaaaatccaaatgacaatttaacggatgaagaagttgccaaatacatggagaaaatcaccaaagcattgacagaacaagtcggtgctgaagtacgctaa

SEQ ID NO: 38290 - DNA, 387 bp, Streptococcus pyogenes
atgtctgatgctagtttgaaaacttaccaaaaacaatgggcttatcaaaagtattgggtcatggcacactcacagcagcattacaatgctttaagagaattgtttaaaggaaatcagtggtcagaagaaaaggtgttgacttttcattgtttgattgaagaagcgcaagccattcctcccacagtaaaaagcttacgaacggcatatcagcatgtttgggggtattttaaaaaggtagcgagtcaggaagaaaaagaccatttcaaagatttggatgctcagttggaaactaaatctgaggagatgctatgctttttacaagagatgactgctcattatcagccctcttatctgctatcttgccgtttgattaccaaaggtccttaa

SEQ ID NO: 38291 - DNA, 3216 bp, Streptococcus pyogenes
atgaaattaatttacacagagatgagttactcgatgacagagattttggtgaatgaagcacgaaaagctgctgaccaaggttatcgagtgttctatattgctccaaattctctttcatttgaaaaggaaagggaagtcttaaccttattgcctgaacgagggactttttcgataatagtcacccggttcgttcaaatgtcaaggtattttacagttgagagctctccttctaagcaacatctagatgacacgactttggctatgattttttatcgggccttgatgcaattaaaaccagaagatttgccgagttatggtcgtttgcaaaataattcggtttttattgaacaactagttgagttatataaagaattaaaaaacgcacaattaagcgtacatgatttaacagggttagaccatcctcaaaaacaagaagatcttattaaaattattgagcttgcagagacgatcatgattcagcaagattataatcaagatagtcctctacaatcttttgcaagagcaattaagttaggacttttaaataaccaactatcaaaaacagttgttgttattgatggtttttcacgtttttcagctgaagaggattatttattatcacttttaaataacaactgtcaagaggtcatcattggcagttatgtgagtcaaaaagcttatcaaaaatcttttattaagggaaatatctatgaggctagccttcattttttgcaagatttggctcaaaaataccatatcaagccggtatttgcgacctctaatcaagtgtttaaaccagccttttcacggctaacacaattatttgaagcaactcatgatttttcacaagtagactggcaactccaaaagagtgatcttgatcactttagcctttggcaatgtcatcatcaaaaagaggaaattgaacatgtagcaaaatccattcggcaaaagctatatgaaggttaccgttataaggatatcttagtgttgctaggagatatggatgcttatcaattacaaattgggcctatctttgataagtttgaaatcccctactatttaggaaaagcagagcctatggctgcccatccattagtccaatttatagaatcgctcgaacgaagtcagcgctataattggcgtcgtgaagacattttaaacatgttaaaatcaggactttttggttgttttgatgatagtgatattgatcgctttgaggaatatactcagtttgcagatattaaaggatttactaaattttcaaagccttttaccattaactcttctaggcagtatcctcttgactttttaaatgaaatgagacaagacatcgttttacctttgcaagaattgtttaagagtcaaaaacaacttggtgcttcacttgttgacaaattaatactttttttaaaaaagattagattagctgagaatatgcaaggtttagcacagtcccaattagaggtggaaaaaaacgaagaagtttggaaaaggtttacagatattttgacttcttttcatcatatcttcggccaagaaaaattacggctatcagattgccttgctttaattaaaacgggaatgaaatcagctcagtatcgtgttgttccagcgacattagatgttgtcactattaaatcttatgaccttgttcaaccacattcaaaacctttcgtttatgcaattggtctaactcaatcacattttcctaagcaaattcaccattcaggactactttctgatcaagagcgtgctagaattaatgaaataagaaattatcgtcattttgatattgctagtgccgaaaatagtaaaaaaaaccatcaaactgcgttatctctgtttaatgctgctactaaggagttagttcttagtgtttcaacggtaatcaacgagacattcgatgatctatctccttatcttaaagaattaataaactttgggttacctcttttggataaaggcaaaaactatctatcttatgataatagcgatattggtaactataaagctctcttgtcacaaattattgctattaaccgacaagatcttatagaaatgtcagatcaagataagatgttttggactgttgtcttacgttatctcaggaaacagttaagaaagcaacagctagagctacctacttcagattatcgtttatcaacaaagcctttgtctaaagaagttatcgaggtatgttttccaaagggaatccctttaaagctatctgcaactgctttaaccgttttttataataatcagtacaactattttttgaaatatgttttgaatttaaacaaaacagaatccattcatccagattccagaattcatggtcaatacttgcatcgtgtctttgagcggttaatgaaagatcacacgcaagaaccgtttgataataagttaaaacaagcaatctaccataccaatcaagaaagtttttttcagcaggtttaccaagataatgccgaggctgagtacagtttagctatactagaagatattgttagatcaacagcacctatcttgcaacttaaccaaaacatacaggtcattgatcaagaaaagaactttcagctggatatgggaaatgagatattagtccacgggatcattgatcgtattgaccagctgagcgacggtagcttgggcattgttgactataaatcaagcgcgaatcaatttgatattgggaccttttataatgggttgagtccacaactaatgacttacctcgcagccttaaaacagattgcaccgcacgatataaaccaattatttggggctatgtaccttcatttgcaagatcctaaattggatctagtaacatttaaacaaattgataacacattagtggagagtatctataaagcgttgacctataaaggtattttttcagaagtcgaaaaagagcatctatctactggtgcttaccaaaccaaaaatgctctttattccaatgacgaattggaaacacttttaaattataacaagtacctctatcttaaagctgctaaacacattaaaaagggacattttttgattaatccttatacaagcgatggtaagacagttcaaggagatcaattaaaagccattacccgttttgaagcagatcttgacatgggacaggcaaggcgactagtgactctccctgctaaggagaaaaaagagtgctttttaacattaatgagaaaggagagccacttgtga

SEQ ID NO: 38292 - DNA, 3633 bp, Streptococcus pyogenes
gtgatttcttttgccccatttttaagccccgaagctattaaacatttgcaagaaaacgaaaggtgcagagatcagtctcaaaaacgcacagctcaacaaattgaagcaatttatactagtggccaaaatatacttgtatcagcttctgctggttcaggaaaaacctttgtaatggtcgaacgcatacttgataaaattttgagaggtgtttcaattgatcggctttttatctcaacctttactgttaaagcagctacagaactgcgtgagcggattgaaaacaaattatactcacaaattgctcaaactacagattttcaaatgaaagtttatttaacagaacaattgcaatctctttgtcaagctgatattggtactatggatgcttttgcacagaaagtagtaagtcgctatggttatagcattggcatttcatcccaatttcgtatcatgcaggataaagcagaacaagatgttttaaagcaagaggtgtttagcaaactctttaatgagtttatgaatcaaaaagaggcaccggtgtttagggctcttgtgaaaaatttttctggtaactgtaaagacacttcagcttttagagagttagtttatacttgttattcttttagccaatcgacagaaaacccaaaaatatggttgcaagaaaattttctaagcgctgctaaaacttaccaaagacttgaagatatcccggatcatgatattgaactcttacttttggcaatgcaagacactgcaaatcagctaagagatgtgactgatatggaagattatgggcagctgactaaggcaggtagccgatctgctaaatacactaaacacttaacgatcatagaaaagttgtctgattgggtgcgtgattttaaatgtttgtatggaaaagccggattggatcggttgatcagagatgtgacaggccttataccatctgggaatgatgttacagtctcgaaggtaaaataccctgtttttaagaccttgcatcaaaaattaaaacaatttaggcatttagaaacaattttaatgtatcagaaagactgtttttccttattggaacagttacaagattttgtgcttgcgttttcagaagcttatttagctgtcaaaatacaagaaagtgcttttgaattttcagatattgcacactttgcaatcaaaattttagaggaaaatacggatattcgccaatcctatcagcaacactatcatgaggtgatggttgatgaatatcaagataacaatcatatgcaagagcgactcctgaccttactatcgaacggtcataatcgctttatggtaggagatatcaaacaatcgatctatcgatttcggcaagccgatcctcagatttttaatcaaaagtttagagactatcaaaaaaaacctgagcaggggaaagtgattttactcaaagaaaactttcgtagccaatcagaggtgttaaatgtcagcaatgctgtttttagtcacttaatggacgaatcagtaggagacgtcttatacgatgagcaacatcagttaatagcaggtagtcatgctcaaacagtcccctatctagaccgtcgtgctcagttattgctatataatagcgataaagatgatggcaacgccccttcagatagtgagggtatttcatttagtgaggttacaattgttgccaaagaaattattaagcttcacaatgataagggtgtcccttttgaagacattacgttactcgtttcttcaagaacaagaaatgatatcatttctcatacattcaatcaatatggtattcctatagcaacagatggtgggcagcaaaactatcttaaatctgttgaagtgatggttatgttagatacattacgcaccattaataacccaagaaatgattatgcccttgtggctttactgcgctcaccgatgtttgcctttgatgaggatgatttagcaagaatagcacttcaaaaagacaatgagctagataaagattgcctatatgacaagatacaaagggctgtgattggaagaggtgctcatcctgaattgattcacgataccttgcttggcaagttaaatgtttttttaaagacgttgaaaagctggcgtcgatacgctaagctagggtcgttgtatgacttgatttggaaaatttttaatgatcgtttttattttgattttgtagctagtcaagcaaaagcagaacaagcacaagctaatctatacgcattagctctacgtgctaatcagtttgaaaaatcgggctataaagggctataccgttttattaaaatgattgataaggtacttgagacgcaaaatgacttagctgatgtggaagtggctactcctaaacaagctgttaatttaatgaccattcacaagtctaaaggtttacaatttccgtatgtatttatccttaattgtgacaagcgcttctcaatgacagatattcataaatcatttattctgaatcggcagcacggtatcggtatcaagtaccttgcagatatcaaaggtttacttggtgaaacaacactcaattctgttaaagtaagcatggaaaccttaccttatcaattgaacaaacaagagttgcgcttagcaactttatcagaagaaatgcgcttactgtatgttgctatgacacgagctgaaaaaaaagtttattttattggtaaagctagtaagagcaaaagtcaagaaatcacagatcctaaaaagttaggcaaacttttgccgctggctttacgagaacagttattgacattccaagattggctattagcaatagcagatatattttcaactgaagatctttattttgatgttcgctttattgaagatagtgatttgacacaagagtcagtcggacgacttcaaacaccacagttattaaatccagatgatcttaaagataatcgtcaatcagaaacaattgcacgggctttagatatgttagaagcagtgtctcaattgaatgccaattatgaagcagctattcatttgccaacagttcgaacgcctagccaacttaaggcaacttacgagcctttattagaacccattggtgtagatattatagagaaatcttctcgatcgctatctgattttactttgccacatttttcaaaaaaagcaaaagttgaagcaagtcatattggatcagctcttcatcagttgatgcaggtgctccctttgtcaaaaccgataaatcaacaaacgcttttagacgctttaagaggaattgatagtaacgaagaggtaaaaacagctcttgatctcaaaaaaatagagtcgttcttttgtgatacaagcctaggccaattttttcagacttaccaaaaacacttgtatcgagaagcgccatttgctattttaaaacttgaccctatcagtcaagaagagtatgtcctacgtggtattatagatgcctactttttgtttgatgatcatattgtattagtggactataaaacagataaatacaagcagcccattgagttaaaaaagcgttaccaacaacagttggagttatatgcagaagctctcactcaaacgtataaacttcctgtgactaagcgctatcttgttttaatgggaggtggaaagccagaaattgtcgaagtttaa

SEQ ID NO: 38293 - DNA, 177 bp, Streptococcus pyogenes
atgtcaaaaacagtagtacgtaagaatgaatctcttgacgatgctcttcgtcgcttcaaacgttctgttactaaagctggtactcttcaagaatcacgtaaacgtgaattctacgaaaaaccttctgtaaaacgtaaacgtaaatcagaagcagctcgcaaacgtaaaaaattctaa

SEQ ID NO: 38294 - DNA, 1815 bp, Streptococcus pyogenes
atgggatttttatggggaggtgacgatttggcaattgacaaagaaatgatttcccaagtaaaaaatagcgttaatattgtcgatgtcattggagaagtggtcaaactttcccgatcagggcggcattacctcgggctttgcccatttcataaggaaaagacaccctcttttaatgttgttgaagacagacaattttttcactgctttggctgtggaaaatcaggggatgtttttaaatttattgaggaataccgccaagtccccttcttagaaagtgttcagattattgccgataagactggtatgtcgcttaatataccgccaagtcaggcagtacttgctagccaacacaagcaccctaatcacgctttgatgacacttcatgaggatgctgctaaattttaccatgcagttttgatgaccactaccattggtcaagaagctaggaagtacctttaccagagaggcttggatgaccaattaattgagcatttcaatattggtttagccccagatgagtcagattatctttatcaagctctttctaaaaaatacgaggaaggtcaattggttgcttcaggattgtttcacttgtccgatcaatccaataccatttacgacgcctttcgaaatcgtatcatgtttcccttatcagatgaccgagggcatattattgccttttcaggacgtatctggacggcagctgatatggaaaagagacaggcaaagtataaaaattcaagaggaacagttctttttaacaaatcttatgaattgtatcatctggacaaggcaaggcctgttattgccaaaacccatgaagtgtttctaatggaagggtttatggacgtgattgccgcttaccgttccggctatgaaaatgctgttgcttcaatggggacggcattgactcaagaacatgtcaatcaccttaagcaagtcactaaaaaagttgttttgatttatgatggtgacgatgctggacaacatgctattgcaaaatcactagaattgcttaaagattttgttgtcgaaattgtcagaatccccaataaaatggatcctgacgaatttgtacaacggcattccccagaagcatttgcagatttgcttaagcagtcacggatcagtagtgttgaattttttattgattacctaaaacctactaatgtagacaatttgcaatcacaaattgtttatgtggagaaaatggcaccattgattgctcaatcaccatccatcacagctcaacattcgtatattaacaagattgctgatttgttgccaaactttgactattttcaagtagaacaatcagtaaatgcattaaggattcaagataggcaaaaacatcaaggtcaaatagctcaagccgtcagcaatcttgtgaccttaccaatgccaaaaagtttgacagctattgctaagacagaaagtcatctcatgcatcggctcttacatcatgactatttattaaatgaatttcgacatcgtgatgatttttattttgatacctctaccttagaattactttatcaacggctgaagcaacaaggacacattacatcttatgatttgtcagagatgtcagaggaagttaaccgtgcttattacaatgttttagaagaaaaccttcccaaagaagtagctcttggtgagattgatgatattttatccaaacgtgccaaacttttagcagagcgcgatcttcacaaacaagggaaaaaagttagagaatctagtaacaaaggcgatcatcaagcggctctagaagtactagaacattttattgcgcagaaacgaaaaatggaatag

SEQ ID NO: 38295 - DNA, 1110 bp, Streptococcus pyogenes
atgacaaaacaaaaagaaataacaacttttaacgttcaagttgcggagtttattcgccatcacaaaaaagaaggaacagcgattgatgatgacgtgaccgaaaaacttgtcattccatttgctttggatgctgatcagattgatgacttacttgagcggttaacagatggtggtatctcgattacggataaagaaggtaacccatcatcaaaatacattgttgaagaaccaaaaccagaagaattaactgatgaagaattaattggtagtaattcagctaaagtaaacgaccctgtccgcatgtacctcaaagaaattggtgtggtaccgcttttaacaagtgaagaggaaaaagaattggctgttgcggttgccaagggagatttaatggctaaacaacgtttagcggaagcaaaccttcgtcttgttgtctcaattgcaaaacgttatgttggacgtggaatgcaatttcttgatttaattcaagaaggtaacatgggactcatgaaagctgttgataaatttgattattcaaaaggattcaaattctcaacttatgcaacatggtggattcgtcaagctataacacgcgcaattgcagatcaagcacgtacgattcgtatccctgttcatatggttgaaaccattaataaattggttcgtgaacaacgtaaccttcttcaagaacttggtcaagatccaacgccagaacaaatcgcagaacgtatggaaatgactccagacaaggttcgtgaaattctaaaaattgctcaagaacctgtttctttagaaacaccaattggggaagaagatgatagtcacttaggtgattttatcgaagatgaagttattgaaaatccagtagattatacgacgcgtgttgttcttcgtgagcaattggatgaagttttagatacgcttactgaccgtgaagagaacgttcttcgcctacgctttggccttgacgatggtaaaatgcgtacgttagaggacgtaggtaaagtctttaatgttactcgtgagcgcattcgacagattgaagctaaagcccttagaaaacttcgccatcctagtcgtagtaaacaattaagagactttatagaggactaa

SEQ ID NO: 38296 - DNA, 933 bp, Streptococcus pyogenes
atgaacattaatattttactatccacctacaatggagaacgcttcttagcagaacaaattcaaagtatccaaaggcaaacagttaacgactggaccttattgattagagatgatggttcaactgatggcacccaggatattattcgcacatttgtcaaggaagacaaacgaattcagtggatcaatgaggggcagacagaaaatctgggagttattaagaatttttacaccctcttaaagcaccaaaaagcagatgtctattttttcagtgaccaagatgatatatggttagacaataaactggaagtgaccttattggaggctcaaaaacatgaaatgacagctcctttattggtttatacagacctcaaagtggtaacccaacatttagctgtttgccatgacagtatgattaagacccaatctggtcatgcaaacacaagcctacttcaagaattaaccgaaaataccgtaacaggcggcacaatgatgattactcatgctctggctgaggaatggaccacttgtgacggtttattgatgcatgactggtatttagctttactagcttctgctattgggaaattagtttaccttgatattccaacagaattataccgtcagcacgatgctaacgtgttgggagctagaacttggtctaaacgcatgaaaaattggttaaccccccatcatttagtcaacaaatattggtggttgattacttcaagccaaaaacaggctcaattactattagatttaccattaaaaccaaatgaccatgaattggtaacggcctatgtttctttattggatatgccttttaccaaacgcttagctaccttgaaaaggtacggttttagaaaaaatcgcatctttcacacctttatttttcgtagtttagttgttaccttatttggttacaggagaaagtaa

SEQ ID NO: 38297 - DNA, 1206 bp, Streptococcus pyogenes
atgattaatagagaaattgcagtaaaagtacagcatgttagtaaaacgtttaaactgcctacagaagcaactaaaagttttcgcacgactctggttaatcgcctaagagggattaaaggatttactgaacaacatgtgctaaaagatattaactttgatgtttataaaggcgatttttttggaattgttgggcgtaacggctcaggaaaatcaacgctccttaaaattatttcccagatctatgttccagaaaaagggcaggttacagtagatgggaagatggtttcttttatagagcttggagtgggattcaatccagaattaacaggacgagaaaacgtctatatgaacggcgccatgctgggatttaccaaagacgaagttgatgatatgtacaatgatattgttgattttgcagagttgcatcattttatgaatcaaaaattaaaaaattattcttctggcatgcaggtacgtttagcattttcagtggctattaaagcccaaggtgacgttcttattttagatgaggtgcttgctgtaggagatgaagcttttcagcgaaaatgtaatgattattttatggaaagaaaagacagtggtaagacgactattttagtgacacatgatatgggagctgttaagaagtattgtaaccgtgcagttcttattgaagatggtcttgttaaagcatatggagaaccatttgatgttgctaatcagtatagtgtagataatacagagacagctgaggatgcaatgaatgctgaaaaaatatctgtatctgatattgccaaagatttgaaagtgtcattaatctcaaatccaagaataacaccaaatgacacaatcacatttgaagtttcttatgaagttttaaaagatgattttacctacattgccttttctttaacggatattgatagaaacatttgggtttacaacgacaattctttagattatccaacacaaggtataggtagaaaatgcatttcctaccaatgtcaactatctcaacttaatgatataaaactaaaattagaagtaactgtccgagataagaacggtcagatgctactcttttcaacagcagaacaatcaccccagatagtgattcaaagaaacgatattgatcaagatgatctgtcagctctagattcagcaagtggcttgtatcaacgtaatgggaagtgggtttttcattaa

SEQ ID NO: 38298 - DNA, 1008 bp, Streptococcus pyogenes
atgtataaagtttcaattatttgcaccaattataacaaagctccttggatatctgatgcacttgacagttttttaagccaagtgacagattttgaggttgaaattattgttattgatgatgcttctacagatgactcacgagagattttaaagagttatcaaaaaaagtcttcaggaaaaattaaattactctttaacgaaactaatattggaataacaaagacttggataaaagcatgcctttatgcaaaaggcaaatatattgctagatgtgatggtgatgattactggacggatagttttaaactccaaaaacaagttgatgtcttagaagcttccaaacggtcacgatggtgtaatactgattttgactttgtaaatagtcaaggcgacttattatatgctaatgctttttcatctggtcatacacctttgacagatacttacgaaaaagttttagccttaaaagggatgacgatggcatcgacatggttagttgatgctgatttaatgagacaagtaaaccaaaaaatcaatgtagatacaccagacgatacttttgatattcaactagagttatttcaactgactcaactgacctatattaaagactcaacgacgatttatcgcatgacaaccgattctgattcaagacctactgatacaccaaaaatgatttatcgtattcaaaaactacttgatactcagttaaattacttaaaaaagtataatcaggtagatacaaaagaagtgtctgaactattattacaacaagatgctaagcaagaaatacgaattcatgagttgagttgctttattcaagaattacaacaaactatcgtagataaaacaaagcagcaagaaacacgtgaagtggagttgcaaaatgtcatagaagaacaaaaaaatcaactatctgaattaagacaacaataccatgccattattaattcacgtcaatggaaatacacgtctaagctcattgcttttattaggagaaaaaaatga

SEQ ID NO: 38299 - DNA, 1224 bp, Streptococcus pyogenes
atgaagtacgataacttgttagatcgatttataaaatatgtcaaagtgaatacaagaagcgttccagacagtgagactactcctagtacggagagtcaagaagcatttgccttaacgattttaaagcctgaaatggaggcaattggtttgcaagatgttcattataatccagttaatggctatcttattggaactctgcctgccaataatccaaccttgacgcgtaaaattggttttatagcccatatggatacggctgatttcaatgctgaaaatgttaatccgcagattattgacaattatcaaggaggggacattacacttggcagttctaattataagttggatccaaaagcatttccaaatcttaataattatatcggtcaaacattgattaccactgatgggactacacttttaggggcagatgataaatctggtattgctgaaatcatgacagcaatagaattcttgacatcacaaccacaaatagagcactgtgacattaaagtggcttttggccctgatgaagagattggggtcggagctgataagtttgaggtggctgattttgaggtggattttgcttatactatggatggcggtcctttaggcgaattgcaatatgaaactttcagcgctgcagctctagaagtgacttttttaggcagaaatgttcatcctggtacggctaaggatcaaatgattaatgcccttgagttagcaatagattttcatgagaagctacctgctaaagatcggcctgaatacacagatggttatcaaggtttctatcacttaacgggactaactggaacagttgaagaggcacgcgcatcttacattattcgtgattttgaagaagcatcatttgaagctagaaaagtgaaagttgaaaatatagctcaatcgatgaatgctcagctaggaacaaaacgtgtcttggtagagcttaatgaccaatactacaatatgaaaaaagttatcgaaaaagatatgaccgctattgagttagctaaagaagtaatggaagagcttgctatcaagcctgtaatcgaacccatacgtggaggaacagatggctctaaaatttcatttatgggtattcccactcctaatatttttgcagggggtgagaatatgcacgggcgttttgagtttgttagcttacaaacgatggagagagctgtcgatgtcattattggacttgtttgcaaagcctaa

SEQ ID NO: 38300 - DNA, 198 bp, Streptococcus pyogenes
atgaaagtatctatcattccagaaaaatgcatcgcttgtggtctatgccaaacctattcatcactttttgattatcatgacaatggtatcgtcacattttcaagctcatctgaaacaagtcagtcaatttgtccttcagataaggacgctattttagctgtcaaatcttgcccaactaaagctcttaccctcgagtaa

SEQ ID NO: 38301 - DNA, 681 bp, Streptococcus pyogenes
atgaaagcaattaaaattgcgattgatgggccagcttcaagtggaaaaagtacagtagccaagattattgcaaaaaatcttggctatacttatctagatactggtgctatgtatcgctcagcaacttatatcgcactgacacatggctatacgggtaaagaagtagcccttatcttagaggaacttgagaaaaatcctattttctttaaaaaagcaaaagatggctcccaattagtttttcttggggatgaggacgtgaccttagccattaggcaaaatgatgtgactaacaatgtttcttggatctcagctttgccagaaattagagaagagctggttcatcaacaaagacgcattgcacaagctggtggcattatcatggatggtcgtgacattggaacggttgttctcccagatgcggaactaaaaatctttttagtggcttctgtcgaagagcgggcagagcgccgctataaagaaaacctagaaaaaggaattgaatcagattttgagacgctaaaagaagagattgcagctcgtgattacaaggatagtcatcgtaaggtttcacctctaaaagcagctgaagatgcccttatttttgataccacaggtgtttctattgatggcgtggtgcaatttatccaagaaaaagcagaaaaaatagttgacatgtcctag

SEQ ID NO: 38302 - DNA, 531 bp, Streptococcus pyogenes
gtgaagatcatagctaaaaaggatctattcattaatgatgaaattcgcgttcgcgaagttcgtctcgttggtcttgaaggtgaacaattaggtattaaaccattgtctgaagcgcaatcattggctgatgcttcaaatgttgatttggttttaatccagccacaagctgttcctcctgttgccaaacttatggactatggaaagttcaaatttgagtatcaaaagaaacagaaagaacaacgtaaaaaacaaagcgttgtgactgtgaaagaagttcgtctcagtccagttatcgataaaggtgactttgaaacaaaacttcgtaacggtcgtaaattccttgaaaaaggaaataaagttaaggtttctattcgtttcaaaggacgtatgattactcataaagagattggtgccaaggtactagctgactttgctgaagcgactcaagatattgctatcattgagcaacgagcaaaaatggatggacgccaaatgtttatgcaacttgcaccaatttcagacaagaagtaa

SEQ ID NO: 38303 - DNA, 198 bp, Streptococcus pyogenes
atgccaaaacaaaaaacacaccgcgcatcagctaaacgttttaaacgtacaggttcaggcggtttgaaacgcttccgcgcctttacatcacaccgtttccacggaaaaactaaaaaacaacgtcgtcatcttcgtaaagctggtttggttagctcaggagatttcaaacgtatcaaagcaatggttactggtctttaa

SEQ ID NO: 38304 - DNA, 360 bp, Streptococcus pyogenes
atggcacgtgttaaaggtggcgttgtttcacgcaaacgtcgtaaacgtattttaaaattagctaaaggttactatggagcaaaacacatcttgttccgtactgcaaaagagcaagtgatgaactcttactactatgcataccgtgatcgccgtcagaaaaaacgtgatttccgtaaactatggatcactcgtatcaatgcggctgctcgtatgaacggtttgtcatactcacaattgatgcacggtttgaaacttgctgaaatcgaagtaaaccgtaaaatgcttgctgatttagcagtagctgatgcagcagctttcacagctcttgctgatgcagccaaagcaaaacttggcaaataa

SEQ ID NO: 38305 - DNA, 2211 bp, Streptococcus pyogenes
atgacatctttaggaaaaaacgataaggaagttgctactgtgaagaaatttaaaacacttatcacaggttttatcaacacaagattgggttttataattactctactcttttgttactggataaagaccctgtgggcatatcatacagacttttcactagatttgggaaatatataccaagtctttctaactattatcaatccaatcccactagcttttttacttttgggggttgctctttacgttaagaatacccgagccttttatatctgttcttgggtggtttatattatccttaacattctcttgatatcaaattctatatattaccgagaattttcagactttattacagtgagtgccatgctagctagtagtaaagtctccgctggattaggggactctgctttaaaccttttacgcatctgggatattatctatattcttgattttattattctaattagtttatctatcgctaaaaaaatcaaaaatgatcaacgtccttttaacaagcgcgcagcatttgccatcaccgctttatctagtctattgctttctattaatctttttttagcagaaattgatcgtccggaactattaacacgtggcttttcaaatacttatattgtgagagctttaggactaccagcgtttaccctctatagcggcaatcaaacctatcaagctcaaaaagaacgaaatggagctactgcagaagaattaattgatgttaaaacttatgtcaaaggacattatgcagcacctgatcctcagtattttggaattggaaaaggcaaaaatattattgttcttcatttagaaagctttcaacaattcttaatagattataaactaaaagaaggagataaagaatatgaggtaacgccttttatcaactcactttatcactcaaatgctaccttagcattccctaacttttttcatcaggttaaagcaggtaaaacttctgatgctgaaaccatgatggagaattccttatttggtttaaatagtggttcttttatggtgaactacggtggtgaaaatacacaatttgctactccaagtattttagcccaaaaaggtggctataccagcgctgtctttcatggtaacgttggaactttctggaatcgcaataatgcttataaacaatggggctataattatttttttgattctagctacttctctaaacaaaatagtaagaactcttttcaatatgggttaaatgataagtacatgtttaaggattccataaaatatcttgaacagatgcaacaacctttttataccaagtttatcactgtgagtaatcactatccttatactagtctaaaaggcgaaagtagtgaagaaggttttcctttagccaaaacagacgatgaaacgatcaatggttactttgctactgccaattatttagacgctgcccttaaatctttttttgattacttgaaagccactggtttgtacgacaattctatttttgttttatatggtgatcattatggtatttcaaattctcgtaattctagtcttgctccacttcttggtaaagattctgaaacttggtctgaatatgataatgctatgctacaacgagtcccgtatatgatccatattccaggttatacgaatggtagtatcaaagaaacctttggcggtgaaatcgatgctcttcctactttactccacatacttggtattgacactagtcagtttgttcaattaggacaagatttattatcacctcaaaatagccagattgtggcacaacgaacatctgggacttatatgactcctgaatacactaactatagtggacgtctgtacaacacgcaaacaggtttagaaatcactaatcccgatgaaatgactatagccaaaactaaggaaattcgctctgctgttgctcaacaactagcagctagcgacgctattcaaacgggtgatctcctgcgctttgatactcaaaatggtctaaaagctattgatcctaaccagtttatctacactaagcagttaaaacaactgaaagatatttcagcaaaactcggatcagagtcaacaagtttatacagtaaaaatggtcataaatcaactcagaaactttttaaagcaccatcttacttagaactaaatcccgtagaagctgacgcggcaacttctgaactaaaagaggataaccccaaaaataaagaataa

SEQ ID NO: 38306 - DNA, 1164 bp, Streptococcus pyogenes
atgaataaactctatattgattcttttgtcgaaaagaagctgacagcaggggtacaattattagatgaaaaagatttttctaatataaaggaaaaaaatcagttggttcaactggtgaccaagtccaatcgtcccattggaacagcatatatctctaagcaaaataaaggaattggttggtatctaggaccagaaaaaatcgacttgtctatctcttattttgttagtctattttcagttgctaaggccaaaagacaagattttgctcaatcggacgagaccaatgcttatcgcctttttaatcaagaaggagacggttttggtggagtaacaattgatctttataaagattttgcagtcttttcatggtacaatgcctttgtctatgacaaaaaagaaatgattatggaggcttttcaacaggtttttcctgaagtcaaaggagcttatgaaaagtgtcgctttaaaggtccagatactgaaactgctcatctgtatggtgagctggcacaagaaaccttttcgattttagaaaatggcatagcctatcaagtcttcttgaatgagggcttaatgacaggtatttttctagaccagcatgatgttagaagagcactagtagatggtttagctatgggcaagtcccttcttaacctattttcctatacagctgccttttctgtagcagctgctatgggtggtgctatcgagaccacttctgtggacttggctaaacgatcgagagaattatcactagctcattttgagcataaccagttaaacttagcctcacatcattttgtggtgatggatgtttttgaatacttcaaatatgccaaacggaaaaaattaatctttgatgtgattgtgattgacccaccaagctttgctagaaataaaaaacaaactttctctgtgagcagggactaccacaaattaatcacagaggccttggacatattgagtcctaagggaactattatagcttcaacaaatgctgctaatatgactgttagccagttcaaaaagcaaattatcaaaggatttggaagtcgtcgtcctgagtctatgactctccagcagcttccgagtgactttactatcaataaagcagatgaaagaagtaactatttaaaggtatttactataaaggtacgagaatga

SEQ ID NO: 38307 - DNA, 687 bp, Streptococcus pyogenes
atgagaattgtagcaccagtcatgccaagacattttgacgaggctcaagccattgatatttctaaatatgaagatgttaatttaattgaatggcgagcagactttcttcccaaggatgagattgtcgcagtagcaccagctatttttgaaaaatttgccggaaaagaaattatctttacccttcggaccgttcaagaaggggggaatattaccctttcaagtcaggagtatgttgatattatcaaagaaatcaatgctatttataatccagactatattgactttgagtattttacgcacaagtcagtatttcaagaaatgcttgattttccaaatcttattttgtcttatcacaactttgaagagactcctgaaaatttaatggaagctttttcagaaatgaccaagttggcaccgcgtgtggttaaaattgctgtgatgccccagagtgaacaagatgttctagatttgatgaactataccagaggctttaagacgctcaatcctgagcaagaatttgcaactatatctatggggaaattaggaagattgtctcgttttgcgggagatgtcattggctcttcctggacatacgtttcattagatcatgttagcggtccaggtcaagtgactctcaatgatatgaaacgtattattgaggtcttagaaatggatatctctaactag

SEQ ID NO: 38308 - DNA, 1167 bp, Streptococcus pyogenes
ttgcgttatttaacagcaggagaatctcatgggccatccttaacagctattattgaaggtataccagcaggattaactcttcatccagcggatattgatcacgaattacagcgacgtcaaggaggttatggccgtggtgccagaatgtctattgagactgatcgggttcaaatatcctcaggagttcgtcatggtaaaacaacaggggcccccattaccttaacggtaattaataaggaccaccaaaaatggctagatgtcatggctgtaggagacattgaagagactctcaagttaaagcgtcgtgttaagcatcctagaccaggacatgcggatttggtaggaggtattaaatatcattttaacgatttaagagatgctttagagcgttcctcggctagagaaacaacgatgagagtggctgtaggcgctgttgctaaacgtatcttagctgaacttggaattgatatgttacatcatatcttaatatttggtggtataacgatcacaataccttctaagctctcttttagagagctgcaagaaagggctctccattcagaattatctattgttaatccaaagcaagaagaagaaattaaaacgtatattgataagataaaaaaagaaggggataccattggtggtattatcgaaacgatagttcaaggggtgccagcaggtcttggatcttatgtccaatgggataaaaaattagatgccaagctggctcaagcagttctttccattaatgcttttaaaggggtggaatttggagctgggtttgatatgggattccaaaagggctctcaggtaatggatgaaatcacctggacacctacccagggctatggtcgtcaaacaaaccacttaggtggctttgaaggtggcatgaccacaggacaacctcttgttgttaaaggggttatgaagcccattcctactttgtataaaccactcatgtcggtagatattgatagtcatgaaccttataaagcaacggtggaacgctctgatccgacggccttaccagctgcaggggttatcatggaaaatgtggtggcgacggtgcttgccaaagagattttagagactttttcttctactaccatgtctgaattgcaaaaagctttttcggactatcgtgcctacgtcaagcaattttag

SEQ ID NO: 38309 - DNA, 1353 bp, Streptococcus pyogenes
atggttattccttatgattatattgttattggtggagggagtgcaggtattgcttctgcgaacagggcagccatgcatggggccaaagtattgttagctgaaggtaaagagattgggggaacctgtgttaacctaggctgcgttcctaaaaaagtcatgtggtatggcgctcaagtagcagatattttagggacttacgctaaggattatggatttgactttaaagagaaagcatttgattttaaacaattgaaagcaaatcgtcaagcttatattgatcggattcatgcttcttatgagcgaggctttgagcagaatggtgttgaccgtatttatgattatgctgttttcaaagatgctcatacggtagaaattgcagggcagctttataccgcaccgcatattttgattgctacaggaggacatcctgtttttccagatattgagggggcacaatacggtatcagctcggacggcttttttgccttagatgaggtaccaaaacgtacggctgtggttggggcaggctatattgctgtggaacttgctggtgttttgcatgctttgggatcgaagacggatttgtttatccgtcacgatcgacctttaagaagttttgacaaaaccattgttgatgtcttagttgatgaaatggcagttaatgggccgcgtttacacactcatgcagaagtggcaaaggttgtcaaaaatactgatgagtccttgaccctttacctcaaagatggccaagaagttgaggttgaccagctcatttgggctatcggtcgcaagcctaatctagaaggttttagtcttgacaaaactggagtgacgttaaatgataaaggttatattgagacagatgcctatgaaaacacgtctgtcaaaggtatttatgccgtgggagatgttaatgggaaactggctttaactccagttgctgtggcagctggacgtcgcctatcagagcgtcttttcaatggcaaaacagacgagaaattggactaccaaaacgttgctactgtgatttttagtcaccctgttattggctctgttggcttgtcagaagaagcagcagtcaaacagtatgggcaagaagcagttaaaacatatcaatcacgttttacgtctatgtttactgctatcactaaccatcgccaaccttgtctgatgaagttggtaacagtcggagataccgaaaaaatagttggtcttcacggaatcggatacggggttgacgaaatgattcagggctttgcagtagccatcaaaatgggagcaaccaaggcggattttgataacaccgttgctattcacccaactggctcagaagaatttgtcaccatgcgctaa

SEQ ID NO: 38310 - DNA, 315 bp, Streptococcus pyogenes
atgagcacatacgcaatcatcaaaactggtggaaaacaagttaaagttgaagtaggtcaagcaatctacgttgagaaaattgacgctgaagctggcgcagaagtcacttttaacgaagttgttcttgtaggtggtgacaaaactgtagttggtactccagttgttgaaggagctactgtcgttggaactgttgaaaaacaaggaaaacaaaagaaagttgtaactttcaaatacaaacctaaaaaaggtagccaccgtaaacaaggtcatcgtcaaccttacactaaagttgtcatcaacgcaatcaacgcttaa

SEQ ID NO: 38311 - DNA, 327 bp, Streptococcus pyogenes
atgattaaagcaatttttactcgccaaaaaaatggtcaactgagcagtgttacactgacaggtcatgctggtagtggtaaacatggctttgatattgtttgtgcctctgttagtactctagccattaactttgttaattctcttgaggtgttagcagattgccaagcattagtagatcttaatgatgttgaaggtgggtatatggctattacaataccaccacatgacaacaaggaggaagttcaattattatttgaatcttttcttctaggaatgactagtttggcgaaggattcttcgaaatttgtcaacactcaggtcatctaa

SEQ ID NO: 38312 - DNA, 294 bp, Streptococcus pyogenes
atgttaaaaatgaatcttgctaacttgcaacttttcgcccacaaaaaaggtggaggttctacatcaaacggacgtgactcacaagctaaacgccttggtgctaaagctgctgacggtcaaactgtttcaggtggatcaatcctttaccgtcaacgtggaactcatatctacccaggtgtaaacgtaggccgtggtggagatgacacactttttgctaaagttgaaggtgttgtacgtttcgaacgtaaaggacgcgataaaaaacaagtttctgtttacccagtagctaaataa

SEQ ID NO: 38313 - DNA, 1083 bp, Streptococcus pyogenes
atgacaaaacgattacttattttagaagacggcactatttttgaaggagaaccctttggtgctgatattgatgtgactggtgaaattgtctttaatacaggaatgacaggctaccaagaatccatcactgaccaatcctacaatgggcaaattttaacctttacctatcctttgattggaaattatgggattaatcgagatgactatgagtccatttcacccacctgtaaaggggttgttgtgtctgaagtcagtcggttggcaagtaattggcgcaagcaaatgacgctagatgcgttcttgaaaataaaagggattccagggatttcgggaattgatacgagagctttgaccaaaattattcggcaacacggtaccatgaaagctacgatggcagatgatggagatagtatccagcatttaaaagatcaactgcgtgcaacagtcttaccgactaacaccattgaacaagtgtcaactaaaacagcttatcctgcaccagggatcgggaaaaatattgtattggttgattttggtttaaaacattctattttaagagaattttctaaaagacaatgtaatatcaccgttgtccctttcaacatcactgcagaagaagtgctccaactaaatccggatggcttgatgctatctaatggcccaggaaacccagaagatttgccagaggctttagacatgattcgtggggtacaaggtaagattcctatttttggtatttgtatgggacatcaactctttagtctagcaaatggtgctaagacttgtaaaatgacctttggtcatcgtggctttaaccatgccgttagagaaattgcaacgggaagaattgattttaccagtcaaaaccatggttatgccgttgaacgtagtagtctacctgatactttaatggttacgcatgaagacattaacgataagacggtcgaaggagtgaaacatagagattttccagctttttcagtccaatttcaccctgatgcggctccaggacctcatgatgccagctacttatttgacgaatttttggaaatgattgattcttggagatgtacgagtaaatag

SEQ ID NO: 38314 - DNA, 3177 bp, Streptococcus pyogenes
atgccaaaacgaaaagatattcaaaaaatcatggttatcgggtctggcccgattattattggacaagctgctgaatttgattatgcagggactcaggcctgtttggctctaaaagaagaaggctacaaagtcatacttgttaattcaaatcctgcaacgattatgacagataaagaaatcgctgataaggtatatattgagcctttgactcttgaatttgttaatcgtatcattcgaaaagaaaggccagatgccatactgccaaccttaggtggccaaacgggcctcaatatggcaatggcgttatctaaagctggtattcttgatgatttagagattgaattgttaggtactaagttatctgcgattgatcaggcagaagacagagaccttttcaaacaattaatgcaagaactagaccaacccattccagaatctacaattgttaaaacagttgatgaagctgttacatttgctagagatatcggttatccagtcattgtgcgcccagcttttactcttggtggaactggtggaggaatatgtagtagtgaagaagaactttgtgaaattactgaaaacggcctaaagttatcaccagtcacacagtgtttgattgaacgctcaattgctggcttcaaagaaattgaatacgaagtaatgcgagatagtgctgataacgcgctggttgtttgtaatatggaaaactttgatcccgtagggattcacacaggagattctattgtatttgcaccaacacagaccctttctgatattgaaaatcaaatgttacgtgatgctagtttaaaaataattcgagctctgaaaattgaaggtggctgtaacgtccagttagcactagatccttatagtttcaaatattatgttattgaagtaaatcctagagtgtctcgttcctctgcccttgcttcaaaagcaacaggttatcccattgccaaattggctgcaaagattgctgttggcctaacacttgatgaaatgattaaccctatcacaggcactacttacgctatgtttgaacctgcccttgattacgttgttgctaaaattccgcgttttccgtttgataaatttgaacatggtgaacgccaactgggaactcaaatgaaagcaacaggtgaagtcatggctattggccgtaatttggaagagtccttactaaaagcctgtcgttctttagaaattggtgtttgccataatgagatgacaagtttaagtaacattagtgatgaagagttagtgactaaagtgattaaagctcaagatgatcgacttttttacttgtcagaagcaatacgacgaggttatagtatcgaagaacttgagagcttgaccaagattgatttatttttcttggataaattacttcatattgttgaaatagagcaagaattacaaatgcatgttgaccatttggaaagcctcaaaaaagcaaagcgttatggattttcagatcaaaaaattgcagaaatttggcaaaaggatgaaagtgatatcagagcgatgagacattctcatagcctgtatcctgtctataaaatggtagatacttgtgcagctgaatttgatgctaaaaccccttatttttattcaacatatgagttggaaaatgaatctgttcagtcgaataaagaatcaattttagttttaggttcaggccctattcgtattggtcaaggggttgaatttgactacgcaacggttcattctgttaaagccatccaaaaagctggctatgaagccattatcatgaattcaaatccggagactgtatctacagatttttcggtatcagataaattatattttgaaccgttaacctttgaagacgtcatgaatgtgatagatttagagcagcctaagggagtaatagttcagtttggaggacaaactgctattaacttagcacaagcactttctgaggcgggtgttacaatattaggaacacaagtagaggatttggatagggctgaagacagagatttatttgaaaaggcgttgaaagagcttggaatcccacaaccacaaggtcaaacggcaactaatgaagaagaagctttagaggcagctaaaaaaattggttttccagtcttagttagaccttcttacgtacttggtggccgggctatggaaattgttgaaaacaaagaagatcttagagaatatataagaacagcggttaaagcaagtcctgaacatcctatcttagtggactcttatattttcggtaaggagtgtgaagtggatgccatttcagatggaaaatcagtcttaattcctggtattatggagcacatcgaaagagcaggtgttcattcaggagattcaatggcagtttatccgccacagcaattatctaagcaaattcaagaaacaatagctgagtatactaaacgtttagccattgggttaaattgtattggtatgatgaatgttcaatttgttattaaaaatgaacaagtttatgttattgaagtgaatccacgcgctagtcgtaccgtacctttcttatcaaaagtaacaggtattccgatggctcagattgctactaagttgattttaggtcaaacattaaaggatctaggatatgaagatggtctttatccccaaagtccactggtgcatatcaaagcgcctgtgttttcatttacaaagttggcacaggttgatagtcttttaggtcctgaaatgaaatcaactggagaagtaatgggttcggatactagtcttgaaaaagcactttataaagcgtttgaagccaataattctcatttatcagaatttggtcaaattgtctttactatagcagatgatagtaaggcagaagctctaagtctagcaagacgatttaaggcgattggctatcaaattatggctactcaaggtacagcagcttactttgctgagcaaggcttaagcgcgtgtttagttggaaaaattggtgatgctgccaatgacatcccgacactcgtgcgacatggtcacgttcaggcaattgttaatacagttggaattaaacgcacagctgataaagacggacagatgattagaagttcagctattgaacaaggagttcctttatttacagctttagataccgcaaaagctatgttaacggttttagaaagcagatgctttaacatcgaagcgatataa

SEQ ID NO: 38315 - DNA, 273 bp, Streptococcus pyogenes
atggcagtaaaaatccgtttaactcgtatgggttctaagaaaaaacctttctaccgtattaatgttgcagattcacgtgcaccacgtgatggtcgttttatcgaaacagttggaacatacaacccattagtggctgaaaatcaaattactattaaagaggatcgtgttcttgagtggttatctaaaggagcgcagccttctgataccgttcgtaacatcttgtctaaagctggtgttatggctaagttccacgaccaaaaattctctaaataa

SEQ ID NO: 38316 - DNA, 240 bp, Streptococcus pyogenes
atggataccattgaaaatcttattatcgctattgtgaaacctttgatttcacaaccagataatcttaccattaaaattgaagatactcctgactttttagagtatcatcttgacttggatgctcaagacatcggtcgtgttatcggcaaaaaaggtcgaactattactgcgataagatcgattgtctactcggttccaacactaggaaaaaaagttcgcttagttattgatgagaaataa

SEQ ID NO: 38317 - DNA, 519 bp, Streptococcus pyogenes
atggaatattttaatgttggaaaaattgtcaacacgcaaggcctgcaaggagagatgcgcgtgttgtctgtcagtgattttgctgaggaacgctttaaaaaaggctcacaattagctttatttgatgataaagatcggtttgttcaagaagtgacaattgttagtcaccgtaaacaaaagcattttgatattatcaaatttaaagacatgtatcatattaatgctattgaaaagtacaagggatacactttaaaggtctcaaaagacaatcaaggggatttacaagaaggagaattttattaccatcagattattggcatggctgtttatgaaaaggatgtccttattggacatgttaaggaaatcttgcagccaggtgctaatgatgtttggatagtgaaacgccaaggaaaacgagacttgctcttaccatatattcccccagtagttcttaacgtagatgttcctaacaagcgcgtggatgttgaattgatggaaggcttagacgatgaagattga

SEQ ID NO: 38318 - DNA, 732 bp, Streptococcus pyogenes
atgaagattgatattttaaccctttttcctgaaatgtttgcccctctagagcattccattgtaggcaaggcaaaagaaaaaggtctgttagacattcactaccataactttcgagattatgctgaaaaagctcgtcatgtggatgacgaaccctatggtgggggccaaggcatgttattgagagcgcagcccatttttgacaccattgaacagattgaagccaaaaaaccaaggattattcttttagatccagcaggtaaaccctttactcaggcttatgctgaagaattagctcttgaggaagagttaatttttatttgtggtcattatgaaggttatgatgagcggattaagaccttggtgacggatgaaatttcattaggcgactttgtattaacaggaggtgagttggcggccatgactatggtggatgcgaccgtcaggttaattccacaggtacttgggaaagaaagtagccatcaggacgattctttttcatcaggacttttagaataccctcaatacacaagaccttatgattatcgtggtatgacagttccagatgttctaatgagtggtcatcacgaacgtattcgcttgtggcgtctagaagaaagtctcaaaaaaacttatttaaggcggccagatttacttgaacattacaatttttccgaggaagagcgcaagctattggataagattaaagaagcattggatcaaggagaagattag

SEQ ID NO: 38319 - DNA, 993 bp, Streptococcus pyogenes
gtgaaagataaagcatatgatattacgattattggtggtggtccaataggtttatttgcagccttttatgcaggtcttaggggcgtaacagtaaagattattgagagtttgtcagaacttggtggacagcctgccattctttatcctgagaaaatgatttatgatattccagcttatccatctttaacaggtgttgagttgacagaaaatttaataaaacaattgagccgttttgaagatcgtacaaccatttgtttaaaagaagaagtattaacctttgacaaggttaaaggtggtttttcgattaggactaataaggcagagcatttttcaaaagccattatcattgcttgtggaaatggcgcttttgcaccaagaactttagggttagaaagtgaggaaaactttgctgatcataaccttttttataatgttcaccagttggaccagtttgcgggacaaaaagttgtgatttgtggtggtggagattcagcagttgattgggctttggctttagaagatattgctgagagtgtgacggttgtgcaccgtcgtgatgctttcagagcacatgaacacagtgtggaattattgaaagcatcaacggtcaacctcttaacaccttatgtgccaaaagcattgaaaggaattggaaacctggctgaaaaattagttattcaaaaagtgaaagaagatgaagtgttagaacttgaattggacagtcttattgttagttttggtttttcaacttctaataagaatttgaaaaattggaatctcgactataagcgttcaagtattactgtttcaccactttttcaaacaagtcaagaaggtatttttgccattggtgatgcagccgcttataatgggaaagtggatttgattgctactggttttggcgaagcaccaacagcagttaatcaggccattaactatatttatccagatcgagataaccgtgtggtgcattcaacctctttaattgactaa

SEQ ID NO: 38320 - DNA, 912 bp, Streptococcus pyogenes
atgatttataccgtgaccttaaacccttctattgactttattgtcagaattgaccaaataaatcttgggtcagtgaatcgcatggcgagtgatgataagtttgctggaggtaaaggcattaatgtgagtcgcatcttgcaacgtttagacattgctagcacggcgacagggttcttgggtggttttacaggacgttttatcgaagaaagtttgagtgcagaaggcgttaaaactgattttgtaaaaggtgatcaagatactcgaatcaatgttaaaatcaagtcacaagaagagaccgaattaaatggtcaaggacctatcattagtcaggaacaactggaggatttgaaaactaagctttcccagctaacagcagaggatacagttgtctttgcaggttcagcgccagctaatcttggcaatgctgtttataaggaattacttcctttagttaggcaaagcggtgctcaggtggtttgtgattttgaaggacagactttaatagatgcgcttgcatataatcctctgttggttaaacctaataatcatgaactagaagctatttttggtacgattctgaccagtcttgatgatgttgaaacctatgcccgtcgtcttttagagatgggtgctcaaaacgtcatcatttcaatggctggtgatggtgctttgctggttactaaagaagcgacttattttgctaaaccgattaagggagaagttaaaaattctgtcggtgctggtgattcgatggttgctggctttacaggcgaatttatgaagagtcaaaatccaatagaagccttaaaatggggcgtggcttgtggtacagcgacggctttctctgatgacttggcgacaattgcatttattaaggaaacatatcataaagttgaggtagaaaaacgatga

SEQ ID NO: 38321 - DNA, 1947 bp, Streptococcus pyogenes
atgaaaattcaagatttattgagaaaagatattatgattctcgatttacaggctatttctaaagaagttgccattgacgagatgattactaaattagttgaaaaagatattgtacatgattttgatgtctttaaaaagagtatcatgacacgtgaagaacaaacatcaacagggcttggtgatgggattgccatgcctcattctaaaaatattgtagtagataaaccagcggtcttgtttgcgaaatcaaataaaggtgtggattacaaggctttagatggtcaaccaacggatctcttctttatgattgctgcgcctcaaggagcaaatgatactcacttggctgcactagcagaattatcacaataccttttgaaagacggctttgctgataaacttcgtgctgcagcgacaccagaagcagtcattgctgtttttgatgaagcgtcaacagctaaagaagaagtggttgctccaacaagtggtcaagactttatcgttgctgttacagcttgtccgacaggaattgctcacacttatatggcagaagaggctttgaaaaaacaagctgcagaaatgggagtagctattaaagttgaaacaaacggtgcttctggtgtggctaatcgtttaaccgctgaagatattcagagagctaaaggagttattgttgcagctgataaagcggttgaaatggaccgttttgatggtaaacaattcattgctcgccctgttgcagatggtatcaagaaaagtcaggaattgatttctttgattttaaacaatgaaggaaacacttatcatgctaaaaatggaaaatctgaaacagcagtatcaactgagaaaacaagtttaggcggtgctttctataaacacttgatgggcggtgtctcacaaatgttgccatttgttattggtggcgggattatgattgctctagcatttttattggataacatgcttggtgtgccaaatgatcagcttggaagtcttggatcctatcatgaaatagcagctatttttatgaacattggtggagcagccttttccttcatgttaccagtactagcaggttatatcgcttattctattgctgaaaaaccgggcttagtagctggttttgtggcaggtgccattgcctcaaatggtcttgcttttggtaaggtaccatttgcagcaggaggagaagtgagcttgggcttaacgggcgtgccatcaggtttccttggggcgcttgtgggtggtttccttgccggtggtgttattcttgcccttcgtaaattgttggcaggcctaccacgttctctagaaggggttaaatctatcctcctttacccattacttggcgtccttgtcactggtttcttgatgctttttgtcaatattccaatggcagctattaacacagcccttaatgatttcttacaaggtctttcaggaagctctgctgtccttatgggacttcttgttggtggaatgatggctgttgacatgggtggtcctgttaataaggcagcttatgtttttggtacaggaactttagcagctactgtggcaaatggtggttcggtcgttatggccgctgttatggcaggtggtatggtacctcctcttgctgtttttgtagccactctcttgtttaaagataaatttaccaaagaagaacgtgaatcaggcttgacaaatattgttatgggactttcattcatcaccgaaggagcaattccgtttggtgcagctgacccagcacgtgcgattcctagctttatcgcaggttctgccttgacaggagctcttgttggtttggctggtattaaattaatggcgccacatggtggtatcttcgtaatcgctttaacaagcaatccaatcttatatcttgtctttgttgtgattggtgcccttgtatcaggtatcttatttggcgctcttcgcaaaaaagcctaa

SEQ ID NO: 38322 - DNA, 1194 bp, Streptococcus pyogenes
atgccttctgagtttcagaaggctttacccatattgactaaaataaaagaagctggttatgaagcctattttgtgggaggaagcgtcagagatgttttactcgagcgtcccattcatgatgtagatattgcaactagttcctatcctgaagagactaaagcgatttttaacagaactgtcgatgttggcattgaacatggtacagtgctcgtgcttgaaaatggcggtgagtatgaaattacaacctttaggacagaagatatctatgttgattatcgccgtcctagtcaggtttcttttgtgcgctctttagaggaagacttaaaacgaagagactttaccgtcaatgccttggccttggatgaaaatggtcaagttattgataaatttagaggactcattgatttaaagcaaaaacggttacgagcagtgggtaaagcagaggaacgttttgaagaagatgcactacgcattatgagaggctttcgatttgcggcgagtctggattttgacattgaagctataacttttgaagctatgaggagccattcacctctattggaaaagatttctgtggaacgttcttttactgaatttgataaattattgatggcaccgcactggcgaaaagggatttctgccatgattgcttgtcaggcttacgactatttaccaggcttgaagcagcaggaagcaggcttgaatcatctgatagtttctttgaaagataactttacctttagtgattatcaccaagcttgggcttatgtgatgattagtttagccattgaggatcctaaaagcttcctaaaagcatggaagacttcaaatgattttcagcgttatgtcacaaagttgattgctctttatagaattcgtcaggaaagatcttttgaaaaattggatatttaccagtacggcaagaaaatggcgagtctagtggaagacctccgaaaagctcaaagcttatccgttgacatggatcgtattaatactttagatcaggcactggttattcatgacaaacacgatatcgtccttaatggttctcacctgattaaggattttgggatgaaatcaggtcctcagctagggcttatgcttgagaaagttgaattagcgattgtagaggggcgcctagataatgatttcactacaattgaagcatttgttagagaggaattagcaacatga

SEQ ID NO: 38323 - DNA, 1878 bp, Streptococcus pyogenes
atgagccattttttggtggagaaattaacaaaaacggtgggagataagaccgtctttcaagatatttcctttattattcatgactttgaccgtattgggattattggggttaatggaacaggaaaaacaactcttttagatgtgttgtcgggaaggcttggttttgacggagatcattcaccattttctaaagccaatgattacaaaatcgcttacttaacacaagaccctgaatttaacgatgcagcttctgttttagatacggtattatcagctgatgttaaagctattcaactgattcgtcagtacgaactattgatggcgaattatactgaggataaacaagaaagcttagagtccctcatgtctgaaatggatcgattagatgcttggtctattgaaagtgatgtcaaaacagtcctatcaaaattaggcatcacggatttggaacaaaaagtgggagacctatcaggtggtatgagaagacgtgtccagttagctcaagtgttgctaggagctgctgacttactcttgttggatgagccgaccaaccatctcgatattgacaccatcgcttggttaacaacctatctcaagacagctaaaaaaaccgtcctttttattacccatgaccgttatttccttgatcatgtggctacccgtatttttgaattggataaagcgggactgacagaatatcaaggcaattaccaagactatgtgcgcttaaaagcagaacaagacgaacgagatgctgctaatttacacaagaagaagcaactctataaacaagaattagcctggatgaggacgcaaccacaggcgcgtgcaaccaaacagcaggctagaatcaatcgtttcagtgacttgaaaaaagaagttcaccaagacagttctgcggataaattggagatgactttcgaaacgagccgaattgggaagaaggtgattcactttgaagacctttcttttgcttatggcgaccgacagttgattaaggattttaacttgattattcaaaataaagatcgtattggaattgttggagataacggcgtcggaaaatctaccctgttaaatatcattaacggtgatctcaaaccaacttctgggaagcttgatattggagatactattcgtgtaggttatttctctcagcagctcaaagatatggatgagaccaaacgggtcattaattaccttcaagaagtggctgatgaggttaaaacaagtgtgggaacaacgagtatcagtgagcttttagaacaatttctttttccgagatcaagtcatggcacgctgattgctaaattatctggtggggagaaaaaacggctctacttgctaaaactgctcattgaaaagccaaatgttcttctccttgatgagccaacaaatgatttagacattgccaccttgaaggtcttagaaaactttttagctaactttgcaggaccagtcattacggttagtcacgatcgttatttcctagacaaagtagctactaagattttagcctttgaagaaggcgatattcgtgttttttatggcaattacagtgattaccttgatgaaaaagtttttgaaaaagaaacagttgaggcagacttagctaaaacaacagtcactgaagaagtgccacttcctcaaaaagaggaaagaaagcgcatgtcctaccttgaaaaacaagaatgggctcagatagaagataaaatagcaactattgaggctaatattgaagaaattgaaaaccaaatgttaactgtagttagtgattatggccagttagctcaattacaaaaggaactcgatcagcgcaataatgatttattattggcgtatgaacggtttgagtatttgagtggactagacatataa

SEQ ID NO: 38324 - DNA, 2013 bp, Streptococcus pyogenes
atgaaaaaatattttattttaaaaagtagtgtattgagtatcctgactagttttactctattagttacagatgttcaagcagatcaagttgatgtgcaattccttggcgtcaatgattttcacggcgctcttgataataccggaacagcttacacaccaagtggtaaaataccaaatgctgggacggctgctcaattaggtgcttatatggatgacgctgagatagacttcaagcaagcaaatcaagacggaacaagtatacgtgttcaagctggagatatggtcggagccagtcctgctaactctgcacttttacaagatgagcctactgtcaaagtctttaacaaaatgaaatttgaatatggcactcttggtaatcatgaatttgacgaaggactagatgaatttaaccgtatcatgacaggtcaagcgcctgatcctgaatcaacaattaatgatatcaccaaacaatatgagcacgaagcttcgcatcaaaccatcgtcattgctaatgttattgataaaaaaaccaaggatatcccctatggttggaaaccttatgctataaaagacatagccattaatgacaaaatcgttaagattggcttcattggtgttgtgactacagagattccaaatctcgttttaaagcaaaactatgaacactatcaatttttagatgtagctgaaaccattgccaaatatgctaaagaactacaagaacaacatgttcatgctattgtggttttagctcatgttcctgcaacaagtaaagatggtgttgttgatcatgaaatggctacggttatggaaaaagtgaaccaaatctatcccgaacatagcattgatattatttttgcaggacataatcatcaatacactaatggaactatcggtaaaacacgtatcgttcaagccctctctcaaggaaaagcttatgcagatgtccgtggtacgctagatactgataccaatgattttattaaaactccatcagcaaatgttgttgctgtagcaccaggtatcaaaacagaaaattcagatatcaaagctataataaatcatgctaatgatattgttaaaacagttactgaacgaaaaatcggaactgcaactaattcttcaactatttctaaaacagaaaatattgataaagaatctcctgtcggtaacttagcaacaacggctcagcttactattgctaagaaaacttttccaactgttgactttgctatgaccaataatggtggtattcgaagtgacctagttgtcaaaaatgaccggaccatcacctggggagctgcacaggctgtacaaccatttggtaatatccttcaagtcattcaaatgactggtcaacacatttacgatgtcctaaatcagcaatacgatgaaaaccagacctattttcttcaaatgtcaggtttaacatacacttatacagataatgatcctaagaactctgatacccccttcaagatagttaaggtttataaagacaatggtgaagaaattaacttaacaactacttacaccgttgttgtcaacgactttctttatggtggtggtgatggcttttcagcatttaaaaaagctaaattaatcggagctattaacacagatactgaagctttcatcacatatatcacaaatttagaagcatcaggtaaaactgttaatgctactataaaaggggttaaaaattatgtaacttcaaaccttgaaagttcgacaaaagttaatagtgctggtaaacacagtatcattagtaaggtttttagaaatcgtgatggcaatacagtgtctagtgaagtcatttcagaccttttgacttctactgaaaacactaataacagccttggcaaaaaagaaacaacaacaaacaaaaatactatctctagttccactcttccaataacaggggacaattataaaatgtctcctattatgacaatccttgccttgataagcttaggtggactaaacgcttttattaaaaaaaggaaatcctag

SEQ ID NO: 38325 - DNA, 945 bp, Streptococcus pyogenes
gtggatccaaatgttataaccgtaacatcctatgctaacattgctattatcaaatattggggaaaagagaatcaagctaagatgattccttcgacctctagcatttctttgactttggaaaacatgttcaccacaaccagcgtttccttcttaccagatactgcaaccagtgatcagttttacattaacggtatcttgcaaaatgacgaagaacataccaaaatttctgctatcattgaccaatttcgccaacctggtcaggcttttgtaaagatggaaactcaaaataatatgccaacagctgcaggtttatcatcaagttccagtggcttatcagccttggttaaagcctgtgaccaattatttgacacccagctagatcagaaagctttagctcaaaaggctaagttcgcctcaggatcatcttctcgttctttttttggcccagtcgctgcttgggacaaagatagtggtgctatttacaaggttgagactgacttgaaaatggccatgattatgctggtcttaaatgctgcgaaaaagccaatttctagccgagagggcatgaagttatgccgcgatacctcaactacatttgatcaatgggtagaacaatcggcaatcgattaccaacatatgcttacctatctcaaaactaataattttgagaaagttggtcagttaacagaagctaatgccttggccatgcatgccacgacaaagacagccaatcctcctttttcttacctaacaaaagagtcttaccaggctatggaggctgtgaaagaactgcgtcaagaaggttttgcttgttattttaccatggacgcaggtccaaatgtgaaggtcctatgtttagaaaaagacttggctcaactagcagaacgacttggcaagaactaccgtattatcgtttcaaaaacaaaggatttaccagatgtctaa

SEQ ID NO: 38326 - DNA, 1008 bp, Streptococcus pyogenes
atgtctaattattgtgtgcaaacaggtgggaaactatacctcacaggcgaatatgctatcttaacaccaggacaaaaagccttaattcactttattccattgatgatgacagcagaaattagcccagcagcccatattcaattagcttcagatatgttttcccataaagcgggcatgacacccgatgcctcttatgcactgattcaagcaacggttaaaacctttgctgattatctaggacagtcaattgaccaactggagccattttccctaattataacgggaaaaatggagcgcgatggcaaaaaatttggcattggttcaagtggtagcgtcaccctcttaaccttaaaggccttatcggcctattatcagattactttaaccccagagttactctttaaactagcggcttataccttgcttaagcaaggagataatgggtctatgggggatattgcctgtatcgcttatcagactttagtcgcctatacctcctttgaccgagaacaggtcagtaattggctgcagaccatgcccttaaaaaaacttctcgtcaaagattggggttaccatatccaagtcattcaaccagccctgccttgtgactttttggttggctggactaaaatacctgctatttcaaggcagatgattcaacaagtgacagcgagcattaccccagctttcttaagaacaagttaccagctaacgcaatcagctatggtagctttgcaagaaggtcataaggaagaactcaagaaaagtttagcaggagcaagtcatctcctaaaagagcttcatccagctatctaccatcctaagctagtaaccttggtagctgcttgtcagaagcaagatgctgttgctaaatcttcaggttctggtggtggagattgtggcatcgcgcttgcctttaatcaggatgctagagatacccttatttccaaatggcaagaagctgatatcgcattactttatcaagaaaggtggggagagaatgactaa

SEQ ID NO: 38327 - DNA, 990 bp, Streptococcus pyogenes
atgactaaccgtaaagatgatcacatcaaatatgctctcaagtaccaatcgccttataatgcttttgatgacatagaactcatacaccattccttacctagctatgatttgtctgatattgatctcagtactcattttgctgggcaagacttcgactttcccttttacatcaatgccatgacaggaggaagtcaaaaaggcaaagctgtcaatgaaaaattggccaaagtagcagcagcaacagggattgtcatggtgacagggtcttatagcgctgctttaaaaaatcctaacgacgattcctatcgtttacatgaggtggcagataacttgaaactagccacgaatattggtctagataaacctgtggcgctaggacaacaaacggttcaagaaatgcagcccctctttttacaggttcatgtgaatgtgatgcaagagttgctgatgccagagggtgagcgcgtctttcatacctggaaaaaacacctcgctgaatacgctagtcaaataccagttcctgtcattctcaaagaagttggttttggcatggatgtcaatagtatcaagctagcacatgacctaggcattcaaacctttgatatttcaggtagaggaggaacttcatttgcttacattgaaaatcaaagagggggagaccgctcttacttaaacgattggggacaaaccactgttcagtgcttactgaatgcacaaggactgatggaccaagtggaaatcttagcttcgggtggtgtcagacaccccttggacatgattaagtgttttgtcttaggagcacgtgcagtgggactctcacgcaccgttttagaattggtcgaaaaatacccaaccgagcgtgtgattgctatcgttaatggctggaaagaagaattaaaaatcattatgtgtgctcttgactgtaaaactattaaagaattaaagggagtcgactacttactatatggacgcttgcagcaggtcaattag

SEQ ID NO: 38328 - DNA, 1278 bp, Streptococcus pyogenes
atgacaaaaactaatcttaactggagcggtttttcaaagaaaacattcgaagaacgcctccaacttatcgaaaaatttaaactacttaatgctgaaaacttaaatcaactcaaaacagacgttcttttgcctatccaaacagctaatcaaatgactgaaaatgtcttaggacgattggctttgccctttagcatagctcctgattttcttgtcaacggttcaacttatcagatgccttttgtcacggaagaaccttctgttgttgctgcagcatctttcgcagcaaaactaatcaaacgctcaggtggttttaaagctcaaaccctaaaccgacaaatgattggtcaaattgttctttacgatatcgaccaaatagataacgctaaagccgccatccttcataaaacaaaaaagctaattgcattggcaaataaagcttatccttccattgttaaaagaggtggaggcgctagaaccattcatttggaagaaaaaggagaatttttgattttctatctgactgttgatacccaagaagctatgggagcaaatatggtcaatactatgatggaagctcttgttcctgatttaacaagactgtctaaggggcattgtctaatggcgattttatctaattacgcaacagagtcgcttgttactactagttgtgagattcccgtgcgccttttagatcacgataaaacaaaatccctacagttagctcaaaaaatagagctagccagccgactagctcaagtagatccttaccgggctactactcataataaaggtatttttaatggcattgatgcagtggtaatagccacaggaaatgactggcgtgctattgaagcaggggcccatgcttatgcctcaagaaatggtagctatcaaggacttagtcagtggcattttgaccaagataaacaagttctgcttggccaaatgaccctccctatgcctattgctagtaaggggggatctatcgggcttaaccctactgtttctatcgcacatgatcttcttaatcaacctgatgccaaaacattagcccaattgattgcatctgtggggttagctcaaaactttgctgcactaaaagctctgacctcatctggcatccaagctggtcacatgaaactacatgcgaaatcattagctcttttggcgggggcaacccaagacgaaattgctcctttagttaatgctttactagctgataaaccaataaatctagaaaaagcacatttttacttatcccagctaagacagtcttag

SEQ ID NO: 38329 - DNA, 840 bp, Streptococcus pyogenes
atgacaaaagctgaccagatttttaaagctaatattcaaaaaattataaacgaaggatcattgagtgagcaagcacgtcctaaatataaagatggtcgaacagctcattctaagtatattactggggcgtttgctgaatatgatttagctaaaggagagtttcccatcacaactttacgacccattccaattaaatctgctataaaggaattattttggatatatcaagatcagtctaacagtttagatgtgctagaagctaaatataatgttcattattggaatgaatgggaagttgaccagacacgtactattgggcaacgttatggtgctgtagtcaaaaaacatgatatcatctcaaaaatactaaagcaattagcagaaaatccttggaatcgtcgtaatgtcatttctctctgggactatgaagcatttgaggagacaaaagggttgttgccatgtgcctttcaaatcatgtttgatgttagacgtgtaggggaagatctttatttagatgctagtttgacgcaacgttctaatgacatattagttgctcatcacatcaatgccatgcaatacgttgccttgcagatgatgattgctaaacattttggatggaaaataggtaagttcttttattttgttaacaatttacatatttatgacaaccaatttgatcaggctcaagaattgctaaaacgacagccagttgctagtcagcctaagcttgttttaaatgttccagataggactaatttctttgatattaaaccagatgattttgaattacaaaattatgatccagtgaagcctcagttgcactttgaccttgctatttaa

SEQ ID NO: 38330 - DNA, 498 bp, Streptococcus pyogenes
atgacaaaggaaattattgctatttgggcagaggatgaagcagggcttattggtattgcgggtaagttaccatggtatttaccaaaagagttagaacattttaaaaagacaacgctacatcaagcaatcttaatgggccgtgtgacttttgaaggaatgaattgcaaaagacttcctcaacgtcaaacccttgtcatgacaagaaatagagattatcaagtagatgaggtgttgacaatgactagtattgaaaaagtcttggagtggtaccatgcgcaggataaaacactttatatcattggtgggaataaggttttagaagcgtttaatggttatttcgatcgtatcataaaaacagttatccatcatcgttttaaaggagatacctaccgaccaaatctagattttagtcatttcacgcaagaaagccaaacgttctatgctcgagacgctaaaaatccttatgattttaccgttactgctttaaaacacaaatag

SEQ ID NO: 38331 - DNA, 1230 bp, Streptococcus pyogenes
atggcaggaagtagaactaacgatattaaagtatactgttcattttgtggtaaaagccaggatgacgttaaaaaaattatcgcaggaaataatgttttcatctgcaatgaatgcgtagctttatcacaagaaattataaaagaagaattggctgaagaagtccttgccgatttgacagaagttccaaaaccaaaagagctccttgatgttttaaatcaatatgtggttggtcaagatcgtgctaaacgtgctttatcagttgctgtgtacaatcattataagcgtgtctcgtttacagaaagtcgtgatgacgatgatgtggatttacaaaagtccaacattttgatgattggaccaacaggttcaggaaaaaccttcttagcacaaactctggctaaaagcctcaatgtaccatttgctattgcagatgcaacttctttgactgaagcagggtatgttggagaagatgtggaaaatattttactcaaactgattcaggctgctgactataatgtcgaacgagcagagcgtggtattatttatgttgatgaaatagataagattgctaaaaaaggtgagaacgtatctatcacacgtgatgtatctggtgaaggtgtacagcaagcccttcttaaaattattgaaggtacggtagcaagtgttcccccacaaggtgggcggaagcaccctaatcaagaaatgatccaaattgatacaaaaaatatcttgtttattgttggcggggcttttgatggcatcgaggagatcgttaaacaacgtttaggtgaaaaagttattggttttggtcaaaacagccgtaaaattgatgacaatgcttcttatatgcaagagattatttcagaagatattcaaaagtttgggcttattccagaatttattggccgcttaccagttgtggcagcccttgaacaactaaacacatcagatttgattcaaattttgacagaaccaagaaatgccctggtcaagcaatatcaggctcttctttcttacgatggcgtcgaattggcatttgataaggaagccttagaagccattgccaataaagccattgaacgtaagacaggagcacgtggtcttcgttctattatcgaagaaacgatgcttgacatcatgtttgaaattccaagccaagaagatgtcacaaaagtgcgtatcaccaaggctgctgtcgaaggcaagtcaaaacccgttttagagacagcttaa

SEQ ID NO: 38332 - DNA, 2100 bp, Streptococcus pyogenes
atgacacatttttctggtaaagatccttttgtaaatatggatgatattttcaatcaattaatggcaaacatgggtggttatcgtagcgaaaatccccgctatctcgttaacggtcgcgaaataactcccgaagaattccaacactatcgtcaaacaggacaactccctgtagcgacaaccaaagcaacaaattctcaaatgttaacacctaaagctgatagtgtattgactcaactcggaactaacttaacacaagaagctcgtcaagggcatcttgaccccgtcattggtcgtaacaaagaaattcaagataccgctgaaatcttggcacgacgaactaaaaataatcctgtccttgtcggagatgctggtgtcggtaaaactgcagtcattgaaggtttagctcaagccattgttaatggagatgtcccagctgctattaaaaacaaggaaatcgtatcaattgatatttctagtcttgaagctggtacacagtatcgtggttcctttgaagagaccattcaaaacttgattcaagaagtaaaagaagctgggaatatcatcttattttttgatgaaattcatcaaatagttggtgctggtgccacaagcagtgattcaggctcaaagggacttgcagatattcttaaaccagccttgtcacgaggagaattaacactgattggtgctactactcaagacgaataccgcaatactattttaaaaaatgctgctcttgctcgtcgctttaatgaagttaaagtgaatgcaccatcagctgaagatacttttcacattttaatgggtattcgtaatctttatgaacaacaccaccatattacccttcctgataatgttctaaaagctgctgttgattattctattcaatacatcccacagcgtagcctgccagataaagcaattgacttactggatatgacagctgctcatttagctgcgcaacacccggtcactgacttaaaaacactcgaaactgaaatagctaaacaaaaagagagtcaagaaaaagctgtcgccaaagaagactttgaaaaagctttagcagcaaaaacacggattgaaacattacaaaagcaaattgagcaacataaccaaagccaaaatgtcactgctacagtcaatgatatcgcagagtctgtagagcgcttaactggtattcctgtctctaacatggggactaatgatttagaaaggctcaaaggaattagcagccgcttaaaaagccatgtcatcggacaagatgaggctgtcgcagcagtagcacgtgctattcgacgaaatcgggcaggttttgatgatggtaaacgtccaataggttctttcctttttgtgggtccaactggtgttggtaaaacagagttagctaaacaattagcacttgatttatttggttccaaagatgctattattcgacttgatatgtccgaatataacgatcgcactgctgtgtcaaaattgattgggacaacggctggttatgttggctacgatgataataataataccctaactgagcgtgttcgtcgtaacccttatgctattgtcttactagatgaaattgaaaaagctgatcctcaaattattacacttcttctacaagtattagatgatggacgattgacagatggacaaggaaatactattaactttaaaaataccgttattattgctacatcaaatgccggttttggccaacaagatacggaaacttctgagtctaacattatggatcgcattgcaccttatttcagaccagagtttttgaaccgttttaatagtatcattaaatttaatcatctgcaaaaagaaagtttagaagaaattgttgatttaatgctagctgaagtaaatcaaaccaccgcaaaaaaaggtattagtttaacgattactgatgacgctaaagctcatttgatagatttagggtacaatcacgctatgggagctcgtccattacgacgtattatcgaacaggaaattcgtgaccgtataactgattattatcttgaccatccagaagtcaaaaaacttcaggcaatcctaaaagaaggacaactagtgattaggcaaaacgatcagtaa

SEQ ID NO: 38333 - DNA, 630 bp, Streptococcus pyogenes
atgacactagcaagccaaattgcaactcaattacttgatattaaagctgtttatttaaagcctgaagacccttttacgtgggcatctggcattaaatcacctatttacactgataatcgtgtcaccctttcttatcctaagactcgtgatttaattgagaatgggtttgtggaaactatcaaggctcatttcccagaagttgaggtcatcgctggtacagctacagcaggtattcctcacggtgccattatagcagataaaatgactcttccttttgcttatattcgcagtaagccaaaagatcatggagcaggcaaccagattgaggggcgtgtgcttaaaggccaaaaaatggttatcattgaagatttgatttcaacaggtggttcggtactagatgcagccgcagcagccagtcgtgagggagctgacgttctgggagttgttgcgattttcacttatgagttaccaaaagctagtcagaattttaaagaagctggtatcaagttgattacgctttctaattatactgagctaattgcagttgcaaagttgcaaggctatattactaatgatggtttacatttacttaaaaaatttaaagaagaccaggtaaactggcaacaataa

SEQ ID NO: 38334 - DNA, 1269 bp, Streptococcus pyogenes
atgatactcatcaaaaatggacgcgttatggacccgaaatcgcagagagatcaagtggcagatgtcttgattgatggtaaacagattgtaaagatagcttcagctattgaatgccaagaagctcaagtgattgatgctagtggtcttattgttgccccgggtttggtcgatattcatgtgcattttagagaacccggtcaaacgcacaaagaagatattcacacgggagccttggcagcagcagcaggtggtgtgactacggttgtcatgatggctaataccaatcctgtcatttcagatgtcgaaactttacaggaagtgctagctagcgcagctaaagaaaagattcatatttacaccaatgccagtgtcacccaagcctttaatggaaaagacgtgactgattttaaagctttgttggaagcaggagcagtaagcttttcagatgatggtattcccttagaaagttctaaagttttaaaagaagcctttgatttggctaatgccaaccaaactttcatttctttgcatgaggaagatcctcagttaaatggggttcttggttttaatgaaggtattgctgaggagcattttcatttttgtggggcaactggtgtagcagaatatagtatgattgcaagagatgtcatgattgcttatgacaggcaagctcatgttcatatccaacatttatctaaagcagaatcggttcaagtagtggcttttgctcagcagttgggtgctaaggtaactgctgaagtgtccccacaacatttttcaacaactgaagatctcttattgatcgcaggtaccagcgccaagatgaatcctccccttcgtacacaaagagatcgcttagctgtcatagaaggcttgaaatcgggtgttatcacagtcattgccactgatcatgctcctcatcacaaggatgaaaaaactgtggatgatatgactaaagccccatctggtatgacaggacttgaaacttctttgtcattaggtttgacgcatttggttgaaccaggtcatcttacacttatgtcactattagaaaaaatgacgcttaatccagctttgctttatggttttgatgcgggttatttggcagaaaatggtccagcagatttggttatttttgcagacaagcaagaacgtctgatcactgagaattttgcttctaaagctagtaattccccatttattggtaacaaactcaaaggtgtcgtgaaatacactattgcagacggagaggttgtttaccctaattaa

SEQ ID NO: 38335 - DNA, 642 bp, Streptococcus pyogenes
atgaaattactactttttattaccattgcctatttacttggttctattccaactggactatggattggacagtacttttaccacatcaacttacgagagcatggatcaggaaatactggaaccacaaatacttttcggattttaggtgtcaaggcaggaacagctaccttagctattgatatgtttaaagggacactttcaatattgttaccaattatttttggtatgacttcaatttcatccattgctatcggctttttcgcagttttagggcatacttttcctatttttgccaactttaaaggtggtaaggccgtagcaacaagtgctggtgtattgctaggctttgctccgttatatctcttttttttagcatctatctttgttttagttctctatttatttagtatgatatctttagctagtgtggtttcagctatcgttggtgtgttatctgttttaacatttcctgccattcattttcttttaccaaattatgactactttttaacttttattgtgatattacttgcgttcattattattataagacacaaagataacattagtcgtatcaaacatcatactgaaaatctaataccttgggggctaaatttaagcaaacaagtgcctaaaaaataa

SEQ ID NO: 38336 - DNA, 1953 bp, Streptococcus pyogenes
gtgttgactaagaaagaaattacaattaataattataatgacgatgctatccaagtcctagaagggttagatgctgttcgcaagcgtccagggatgtatatcggttcaacagatgctacgggattgcaccacctgatttgggaaattgttgataatgctgtcgatgaggccttgtctggttttggagatgatattaaggttgttatcaataaagatggctcggtcagtgtggcagatagcggacgtggaatgccaacaggccagcatgccatggggattcccaccgttcaagttatttttacgattcttcatgcaggtggtaaatttggtcagggtggctacaaaacgtcaggtggtttgcacggtgttggctcctctgttgtcaatgctttgtctgcctggttagaagtcgaaatcacaagagacgggtcagtgtatcgtcagcgctttgaaaatggtgggaaacctgttacaacccttaaaaaagttggcacagctcctaagtctaaatcaggaacggttgtaacctttatgcctgatgataagattttttcaactattgactttaagttcaataccatttcagaacgattgaaagaatctgcttttcttttgaaaaatgtcaagatgagcttgacagatcttcgtggagatgacccgattattgaagagtttcattatgaaaatggggttcaagatttcgtcgaatacctcaatgaagataaggaaaccttgacacctgttatttacatggaaggtcaagaccaagactttcaagtcgaggttgctttgcagtataacgatggtttctccgacaatatcttatcctttgtaaacaatgtgcgcaccaaagatggtggaagccatgaaacgggactaaagtcagctattaccaaagcgatgaatgactatgctcgtaaaaccaatctcttaaaagaaaaggataaaaatctagagggctcagattatcgagaaggactctcagcagtattatctatcttagttcctgagcagcacttgcaatttgaaggacagaccaaagacaaattgggaagtcccttagctagacctattgtagagagcattgtttctgaaaaattaaccttctttttactcgaaaatggagaagtagcttctcatctagttcgcaaagccattaaagctagagatgctcgcgaagctgctcgaaaagcgcgtgatgactcacgtaatggtaagaaaaacaaaaaagacaaaggcttgttgtcgggaaaactaaccccagctcagtccaaaaatgccaagaaaaatgaattgtatctggtcgaaggagattctgcgggaggttcagccaaacaaggacgagaccgcaaatttcaggctattttaccattacgtggcaaagttttaaataccgaaaaagctaagatggctgacatcttgaaaaatgaagaaattaacactatggtttataccattggagctggagtgggagctgactttaacctcgaggatatcaactatgataagattattatcatgaccgatgctgataccgatggggctcatattcagactcttttgctgactttcttttaccgttatatgcgaccgttggtggaagcaggtcacgtttatattgcgcttcccccgctttacaaaatgtcaaaaggtaaaggcaaaactgaaaaaattgcttatgcttggactgatggtgaattggaagatctgcgcagagaatttggcaagggggctattcttcaacgctataaaggactgggtgaaatgaatgctaaccaattatgggaaaccactatggaccctgaaaccagaacccttattcgtgttactattgacgacttggcaagagcagagcgacgtgtttctgtgttgatgggtgacaaagcagccccacgccgtcagtggatcgaggataacgtcaagtttaccttagaagaaaatacggtgttttag

SEQ ID NO: 38337 - DNA, 2460 bp, Streptococcus pyogenes
atgtcaaacattcaaaacatgtcccttgaggatattatgggagaacgcttcggccgttattccaagtatattattcaggaacgggcacttcctgatattcgagatggattgaaacccgttcagcgtcggattctttattcgatgaataaggatggcaatacttttgaaaaaggttaccgtaaatcagccaaatcagttggtaatattatggggaatttccacccacatggggattcctctatttatgatgccatggtacggatgagtcaagattggaagaaccgtgaaatccttgttgaaatgcacggaaataatggttcaatggatggtgatccgcctgcggctatgcgttatacagaagctcgcttgtctgaaattgcgggttatcttcttcaagacattgagaaaaatacggtctcttttgcttggaactttgatgacacagaaaaagaacccaccgttttaccagcagcttttcctaacttacttgtcaatgggtcttctggtatttccgcaggctatgcgacagatattccaccgcacaatttgtcagaagtgattgatgctgttgtgtatatgattgatcatcccaaagctagtttagagaaattaatggagtttttaccaggaccagatttcccgacaggaggcattatccaaggagctgacgaaatcaaaaaagcctacgaaacaggtaagggacgtgtcgttgttcgctctaggacagaaatcgaggaacttaaaggtggtaaacaacaaattattgtcactgagattccttatgaagttaacaaagcagtcttggtcaaaaagattgacgatgtgcgtgttaacaataaagtcccaggcatcgtagaagtacgcgatgaatctgatcgcacaggtcttcgcatagctattgagttgaaaaaagaggctgatagccaaaccattctaaattatttgttgaaatacacagaccttcaagttaattataattttaacatggttgctattgaccacttcacaccacgtcaagtaggacttcaaaaaatactatcaagctatatcagtcaccgtaaagatattattattgagcggtctaaattcgataaagccaaagctgaaaaacgcctccacattgttgaaggattgattcgtgtcttgtccatcttagatgagattattgctttgattagatcgtctgacaataaggctgatgctaaagaaaatctgaaagtcagctatgatttctctgaggaacaagcagaagcgattgtaaccttgcagctttatcgtttaactaataccgatattgttactctccaaaatgaagaaaatgatttaagagacttaatcacgaccctttccgctattatcggtgacgaagcaaccatgtataacgtcatgaaacgtgaattaagagaggtgaaaaagaaattcgccaatcctcgtttatcagagttacaagcagaaagtcaaatcattgagattgacactgccagcttgattgcagaggaagaaacttttgttagtgtgacacggggcggatacctcaaaagaaccagcccacgatccttcaatgcgtctagtttggaagaagttggcaagagagatgatgacgaactcatcttcgttaaacaggccaaaacaacagaacaccttttgttatttacaactttaggcaatgtcatttaccggccaatccatgaattgaccgatttacgttggaaggatatcggtgaacatttatcacaaaccatttcaaacttcgcgacagaagaagagattctctacgctgatattgtgacttcctttgaccagggcttgtatgtggctgtcacacaaaatggttttatcaaacgctttgatcgtaaagaactaagtccttggcgaacttataaatctaaatcaaccaaatatgtgaagctaaaggatgacaaagaccgcgtggttaccttgtcaccagttattatggaagacctcctattagtgactaaaaatggttatgctttgcgattctccagtcaggaagtgcctattcaagggttgaaatctgctggtgttaaaggcattaacttgaaaaacgatgacagccttgcctcagcctttgctgtgacaagtaactctttctttgtcttaactcagaggggttctctcaaacggatggctgtcgatgatattcctcagacaagtcgtgccaatcgtggactattggtcctacgagagttaaaaaccaaacctcatagagtttttctggccggaggcgttcaatcagatacttcagctgagcagtttgatttgttcactgatatacctgaagaagaaactaatcaacaaatgcttgaagtcattagtaagactggtcaaacctacgagattgctttagaaacgctttcgttatcggaaagaatcagcaacggctcctttatttcagacactatttcggatcaagaagtactggtagctagaacacgttaa

SEQ ID NO: 38338 - DNA, 1023 bp, Streptococcus pyogenes
atgacaatagcaattgattgggacaacctaggatttgaatatcataagttgccatttcgttacatttcttattacaaaaatggtcaatgggataaaggtcaattaacagaagatgccaccttacatatctcagaaagcgctccagcgcttcattatggacaacaagcttttgaaggcttaaaggcttatcgcaccaaagatggctctattcaactatttagaccagaccgtaatgcagtgcgtttacaagccacagcagaccgcttgttgatgccacaagtatcaacagagcaatttattgatgcagctaagcaagtggttaaagccaatgaagactttgtaccaccttacggaacaggtgcaacgctttacctgagaccgttattaattggagttggagatattattggggttaaaccagccgaagaatatattttcaccatttttgccatgccagtaggaaactatttcaaaggtggacttgctccaactaattttattgtttctgaagcgtttgaccgcgccgctccttacggaacaggtgctgctaaggtgggaggaaactatgcaggaagtttgctaccaggtaaggccgctaaatcagcaggcttttctgatgtgatttacttagatccagcaacccatactaaaattgaagaagtcggagctgcaaacttttttggcattactgcaaataatgaatttgttacgccacttagtccatccatcttgccatctattacgaagtattcactcttacaactagctgaagaaagacttggtatgacagtaattgagggtgatgttccaattaatgaattggataaatttgtggaagcaggagcttgtggaacagcagctgttatctctccaattggcggtatccagtacaaggataacttacatgtcttttacagtgaaacagaagttggtcctgtgacacgccgtttatacgatgagttggtcggcattcaatttggggatattgaagcaccagaaggttggattgtaaaagtagattaa

SEQ ID NO: 38339 - DNA, 1206 bp, Streptococcus pyogenes
atgaatgaatttgaagatttgctaaacagtgttagcgaagtgaaccctggtgatgttgtcactgcggaagttttaactgttgataacggtcaagcaaacgttgttatcgaaggaacaggtgttgaaggtgtcttgacacttcgtgaattgactaacgaccgcgatgctgatattaacgactttgttaaagctggcgacacagttgaagtacttgttcttcgtcaagtagtaggtaaagatactgatacagttactttcctagtatctaaaaaacgtttggaagctcgtaaagcctgggacaaacttgttggtcgtgaaggcgaagttgttactgttaaaggtacccgtgctgttaaaggtggcctttcagttgaatttgaaggacttcgtggatttatccctgcttcaatgattgacactcgttttgttcgcaacactgaaaaatttgttggacaagagtttgatgctaaaatcaaagaagttgatgcagcagaaaaccgtttcatcctatcacgtcgtgaagttatcgaagaggccgctaaagaagctcgtgctgaagtgttctctaagatttcagaaggtgcagtcgttacaggtactgtagcgcgtttaacaagttttggtgctttcattgaccttggtggtgttgacggacttgttcacgtgactgaattgtctcacgaacgtaacgtgtcacctaaatcagttgtttcagttggtgaagaagttgaagttaaagttctttcaattgacgaagaagctggtcgtgtgtcactttcacttaaagcaacaacacctggaccatgggacggcgttgaacaaaaacttgctcaaggtgatgttgttgaaggtaaagtaaaacgcttgactgacttcggtgcttttgttgaagtattaccaggtattgatggacttgttcatatttcacaaatttcacacaaacgtgttgaaaatccaaaagatgtactttctgtaggacaagaagtaacagttaaagttcttgaagtgaatgcagctgatgagcgcgtatcattatcaatcaaagctcttgaagaacgcccagcgcaagctgaaggagacaacaaagaagaaaaacgtcaatcacgcccacgtcgtccaaaacgtgaatcaagacgtgactacgaactcccagaaacacaaactggattctcaatggctgatcttttcggtgatattgaattgtaa

SEQ ID NO: 38340 - DNA, 987 bp, Streptococcus pyogenes
atgtcagaaaaaatcagagttttactctattataaatatgtttcaattgaaaatgcgcaagagtacgctgcgaaacatctagaattttgtaaatctattgggcttaaaggtcgtattttgattgcggatgaggggattaatggaactgtttctggagattatgaaacaactcagaagtatatggattgggtccacagcgatgagcgttttgctgatctttggttcaagattgacgaggaaaatcaacaagctttccgtaaaatgtttgttcgttataagaaagagatcgtgcaccttgggttagaagacaataactttgatagtgatattaatcctttggaaacaacaggtgagtatttaaatcctaaacaatttaaagaagccttgcttgatgaagatactgttgttttagatacgcgtaatgattatgagtatgacttaggtcacttccgtggagcaattcgtcctgatattcgcaatttccgtgagttaccacaatgggtacgtgacaacaaagataagtttatggaaaaacgtgttgttgtgtactgtacgggtggtgttcgctgtgagaaattctcgggttggatggttcgagaaggctttaaagatgttggacaattacacggtggtattgcaacatatggaaaagatccggaagttcaaggtgaactttgggatggtgcgatgtatgtttttgatgatcgtatctcggtgccaattaatcatgttaatccaactgtcattagtaaagattattttgatggaacaccttgtgaacgttatgtcaattgtgcaaatccgttttgtaacaaacaaatttttgcttcagaagaaaacgaaacaaagtatgttcgaggatgctcacctgaatgtcgtgcacatgaacgtaatcgctatgtgcaagaaaatggtttatcacgtcaagaatgggcagaacgtttagaagctattggagaatccttgccagaatttgtaggtgcctaa

SEQ ID NO: 38341 - DNA, 909 bp, Streptococcus pyogenes
atgaaacaccttaaaaccccaccattggtcatgtcaggattggcattaggaacgttgtcatttggcaatttgttggctacttatgtttcgatttttaattatttgggaattctggcagctctttttatctatggtatcttgcttgttggcatggttaggaaccttaacgataccaaaatgcagttacgacaacctctaattgcctctgtttttccaactttttttatgacagggatgttgttgtcttcactctttctcaaagtgacaggagggtgttggttaggctttctcacttggtggctattctttttgggaaatcttgtcctgattgcttattaccagtatcgttttgtcttttctttttcatgggataacgtttttccttcctggtccgtgctttttgttggaattgcaatggcggcattaacagcacctgctagtaggcagtttttattaggacaggtgattttttgggtttgtcttctcttaactgctgtgattttaccttttatggccaaaaagacttatgggattggtctaggtcaagcagtaatgcccaatatttcaacgttttgtgcccctctgtccttactttcagcgtcttatttagcaacctttcctagaccacaagtaggaatggttatctttcttctcgtcagctcacaactgttatatgcttttgtggttgtacagcttcctcgcttactcaatcgtccctttaacccaggtttttcagcttttacctttccgtttgtgattagtgccacttccttaaaaatgaccttatcttttttaggttggcaaggtttaggttggcaggttcttttgctaggagaggtattgttggcgacagctttagtcacttatgtttatggggcttacctgagatttctatttcaaaataagtaa

SEQ ID NO: 38342 - DNA, 2211 bp, Streptococcus pyogenes
atgattaaatccaaatatagctggaaaataaaagacaagaagccagatgatggcttctttaagctagcaaagacaaaaggtctaacccagaccgccgctcagttgatttatgatcgagggataaggactgaagaagccttagatgagtttttaacagcggacttgtctcaactgcatgatccttacttgctacatgacatggcaaaagctgtgccaagaattcgtcaagctattgaagagggcgaacgaattctcatttacggcgactatgatgctgatggcatgacgtcggcttctattgtcaaagaaaccctagacatgatgggagcagagcctttggtttatcttcccaaccgctttacagatggctatggccccaaccagagcgtctataaatattttattgagcaggaagctgtgtccctaattatcacggttgataatggcgtggccggacatgaagcgattagatatgctcaagaacaggaagttgatgttattgtaactgaccatcatagcctgcctgaagaattgccagaagcctttgccatcattcatcctgagcatcctgatgctgattatccctttaaacacttagctggctgtggcgttgcctttaaattggcaacagctttgctagaaagtttaccaacagactgtctagacttggtagctattggaaccattgccgatatggtaagcttgacaggtgaaaaccgtgttttagtcaaaaatggtctggccatgctcaaacacaccgaaagagtgggcttgcaggagttgatgtccttgtctcctattgatttggaacattttaatgaagacgccattggctttcagattgctccgcaattaaatgctttagggcgcttagatgaccctaatccagccattgagctactgacgggctttgatgaccaagaagctcaagcgattgccttgatgattaagaaaaaaaatgaagagcgtaaggccttagtccaagacatttttgatcaagcgatggctatggttgatcctcaaaaacctgttcaagtcttggcacaagctggctggcatcctggtgttcttgggattgtcgctggtcgtatcatggaaactattggacaaacggtcgtcgttttgaccattgataatggctttgcaaaaggctcggccagaagtttagaagctattaatatttttgaagccttaaatggcaagcgtgagttatttacagcctttgggggacatgctggtgcagcaggaatgaccctgcccgttgacaacttggaagctctttcagactttctttgtcagtttgtgatagaacgtggcttagatcagactgccaaaaatacgttaactattgatgaaagactgtctttggacgaccttagccttgatattttaaagagtttagataaattagccccttatgggatggatcatcaaaagccggtcttttatgtcaaggacataagggttagtcaagcgcgtaccatagggcaagaccagagccatcttaaatttaaagtcagtcagggcaaagcttcctttgacgtactggcttttggtcaaggaagtcaactgcaagagttccgacaagctactggtttagaattagcagttaccttatctgtcaaccattggaatgggaacacgagtctccaattcatgttagtagatgctcgtgttgacggagtgcaacttcttgacttaaggacaaaaacagccaaagttcctgaaggtattccgactattgaagaagacccaaatgccagagtcattctgattaatgacatccctgaagatttcaaaacctggcgcaaccagtttgttcacaaggattttgacgccatctattttaaaaatcagatgaaacatccttattatttaacaggatttggcagcagagagcagtttgccaagctctacaaaaccatctatcagtttcctgaatttgatttacgacataaattgacagagttgagtcactatttaaacatagaaaaacttttactgattaagttgattcaaatttttgaagagttgtcttttgtgacgattgacgatgggctgatgacggttaacccccaagcgcaaaaacgagagatttcagagagccacatttaccaagacttaaaagaattggtgaaatttcaagaaatcatggctttggctagcccgaaagagatgtatgattatttggtgaaatcaaacgatcaataa

SEQ ID NO: 38343 - DNA, 792 bp, Streptococcus pyogenes
atggcaaatcaattatcaacacaacaagttaaacgtgatatcacaactgatccaactttgctgacaggagctgatattaaaaaatattttgatcctcagaacttgcttagcgaaaaacaagtagggcaagctctggctttgtgtaaggggcgcaaccttaatccatttgcaaacgaagtttatattgtggcctataaaaataatagcggcacagatttcagtttgattgtatctaaagaggcatttatgaaacgtgctgaacgttgtgaaggatatgatggattcgaggctggcattactgttatgagaaatggtgagatggttgaaattgagggctctctaaaactacctgatgatgttttgataggtggatgggccattgtttaccgcaaagaccgctcacatcgatacaaagttactgttgactttaacgaatatgtcaaacttgacaaatatggtaatccacgaagtacttggaaatcaatgccaggaacaatgattagaaaaacagcacttgttcagacacttagagaggcttttcctgatgaactcggtaatatgtacaccgatattgacggtggcgatacttttgatgctattaaagatgtgactcctcaggaaacacaggaagaagtcagagcacggaagatggcacagattgagcagtacaagcaagaacagactcagaaacaaactcaaaaagcagacactagctatcccgttgatgaagtgtctgaacatactgatgatccagtacaaggagaactacttgatggagaactggagtattag

SEQ ID NO: 38344 - DNA, 567 bp, Streptococcus pyogenes
atggaaacacaattagaagcaaaacaagggattcattcaatcttgttatttcgtttgttgaaagaagcatctagtgaggcagcaactaaacttgcttttcaaacagagcatgaagtaggtaaaagccgtgacgtagatggacaaaaaactaaagatggtattatccagtccgtgggggctttggagtacgactttaaagcaacatctattttagctaaaggtgacgtactagcagctaaactagaaaaagccatggagaatggtgagcttgtagaaatttgggatattgatttagaagaaacaagcaaaaacggcgacagcgacaataagcttgcaaacgtttggggtattgataaaaatggaacaaacagaggaaacggtaaatacctagcgacttattaccaagggtacatctcaagcttcagtgctaagaaaaatgctgaggaaaatattgaaattgaaatggaatttgccatcaacggtgttggccaaaaaggattcgctacattaacagatgcccaaaaagcagctgtacagtacgcatttaaagatacaacgaaaggttaa

SEQ ID NO: 38345 - DNA, 297 bp, Streptococcus pyogenes
atgatagattttgtacaaattggtgctttttgtggcgctgctttgtctatcttgggtgtttggggatttatcgtcaatccctttaaaaaagccatggaagctaatgagtttgccatggctcaactcaaggactcaattaaggagttagcttatgagcttaaaaatcttgatcgtgaacgtgagattaccaaaaaaattatcgacagacacgaggagcgtttaggtcgcgtagaagacgaagttattatcaacaaggagcgtattattacgctatttaaaaaaggagaagaaaaatga

SEQ ID NO: 38346 - DNA, 1653 bp, Streptococcus pyogenes
atgtcttttgacggctttttcttacaccatttaaccaacgaattaaaagagaacttgctttacggtcgtatccaaaaggtcaatcaaccctttgaacgggaacttgtcttaaccattcgtaaccatcgcaagaattataaattgctattgtctgcccatcctgtttttggaagggtacaaatcacccaagcagactttcaaaatcctcaggtacctaatacctttaccatgattatgcgtaaatacctccagggtgcagtcattgagcagttagaacagattgataatgaccgcattatcgaaatcaaggtatctaataaaaatgaaatcggagatgctattcaggcaaccctaatcattgaaatcatggggaagcacagtaatatcatcttggtggaccgtgcagaaaataaaatcatcgaatccattaaacatgttggtttttcacaaaactcttaccgcaccattttacctggctctacctacattgagcctcctaaaacagctgctgttaatccttttacaattacagatgtgcctctatttgaaatcctccaaacacaagaactaacagttaaaagcttgcaacagcattttcaaggtttggggcgagacaccgcaaaagagttggccgagcttctgaccacagacaaattaaaacggttccgtgagttttttgctagacctactcaggcaaatctgaccacagcttcttttgcgcctgttcttttctcagatagtcatgcgacgtttgagactttgtctgacatgcttgaccacttttatcaagacaaggctgagcgtgaccgtatcaatcagcaagccagtgatttgatccaccgtgtgcaaactgaactggacaaaaatcgcaacaagctaagtaagcaagaagctgagctgctagccactgaaaatgctgagttgttccgtcaaaaaggagaattattgaccacctacctcagtctggtcccaaacaaccaagactctgtgattttagacaattattatacaggggaaaaaattgagattgccttagacaaggctctgacaccaaatcaaaatgctcaacgttattttaaaaaataccaaaagctaaaagaagctgtcaaacacttatctggattgattgccgataccaagcaaagtattacttactttgagagcgtagactacaatttatctcaagcaagtatcgacgacatcgaagatattcgcgaagaattatatcaggctggctttttgaaaagtcgccaaagagacaaacgccataaacgtaaaaagcctgagcagtacctggcttcagatggaacaaccattctcatggtgggacgcaataacttgcaaaatgaagaactcacctttaaaatggctaaaaaaggagaactctggttccatgctaaggatatccctggaagtcatgtcatcatcaaagacaatcttgacccaagtgacgaggttaaaactgatgctgccgaactagctgcttattattcgaaagctaggttatcaaatctcgttcaggtcgatatgattgaagctaaaaaattacacaaacctagtggcgccaagccaggatttgtgacttatactggtcaaaaaactttacgggttactcctgaccaagccaaaattctctctatgaaattatcctga

SEQ ID NO: 38347 - DNA, 870 bp, Streptococcus pyogenes
atgattatttcatcagtttcacaaggccttatatggggagttttaggattaggaatctacctgacctttaggattttaaacttccctgacatgactacagaaggttcttttcctttaggaggagctgttgcggtcaccgctattagcttagggtggaatccatttctatcaaccttacttggtatgttatcaggtgctttagcaggttttttaacagggctgttatatacgaaaggaaaaatgccaacacttttagcgggaattttggtgatgacgtcatgtaactccattatgctaatggtaatgggaagagcaaacttgggtttacatgatcataaacgtattcaggattgtttacctttttcaattgatttaaatagccttttaacaggtctgataactgttgtgattgttattagcgttttgatctatttcctttacactaatctaggtcaagcttatatcgctacgggagacaataaagatatggctaagagttttggtattaacacggattggatggaagttatgggacttgtggtttctaatagtttaatagctttatcaggtgctctagtgagccaacaagatggctatgcagatgtctcaaaagggattggagttattgttattggtttggcgagcataattgttggtgaagtactatactcaactggactgactcttttagaacgtttgattgctattgtaataggctcgattctttatcaatttttaatttcagtagttattacgctaggttttaatacaagttatttgaaattaattagtgctcttgttttagcactgtgcctcatgataccagtggtaaaagagcgcttctttaagggagtgaggttaacacgatga

SEQ ID NO: 38348 - DNA, 1662 bp, Streptococcus pyogenes
atgactgatattaaaatgattgccttgggaggggtccgtgaatacggaaaaaacttctatttggtagaaattaacgattctatgtttattttagacgcagggctcaagtaccctgaaaatgagcaacttggggtagatttagtcatccccaatttagattatgtaattgaaaacaaaggtaaagtacaagggattttcttgagtcatggccatgctgacgccattggagcccttccttatttgttagctgaagtatcagctcctgtatttggatctgaattgactattgaattagccaagctatttgtgaaaagtaataacagcactaagaaatttaataattttcatgtggtagacagtgatactgaaattgaatttaaagatggcctagtttcgttctttagaacaacgcattcaatcccagaaagtatgggtattgttattggaacagataaaggaaacattatttataccggtgacttcaaatttgatcaagcagcaagagaaggttatcagacggatttgctacgtttagctgagattgggaaagaaggggttctagctcttttatcagattcagtcaatgcgacaagcaacgatcagattgccagcgaatctgaagttggtgaagaaatggacagtgttatctctgatgctgatggccgtgtcattgtagctgcagtagcctcaaatcttgttcggattcagcaagtatttgattccgccactgcccatgggcgtcgtgttgttttaaccggaacagatgcagaaaatattgtcagaacagctttacgtctagaaaaattaatgattacggatgagcgtcttttaattaaacctaaggatatgtctaaattcgaagaccatgaattaatcatccttgaagctggtcgtatgggtgagccaattaatagcttacaaaaaatggcagcgggacgtcaccgttatgttcaaatcaaagaaggagaccttgtttatattgtaacaacaccaagtacggctaaagaagctatggtggcgcgtgttgaaaacttgatttacaaggccggtggttctgttaaattaatcactcaaaacttacgtgtttcaggccatgctaatgggcgtgatttgcaactattgatgaatttgttaaaaccccagtatctttttccagtacaaggagaatatcgtgatttagctgcccatgcaaagctagctgaagaagttggtatttttccagagaatattcatattctgaagcgtggcgatatcatggtgcttaatgacgaaggttttctccatgaaggaggtgtacctgccagtgatgtcatgattgacggtaatgctatcggtgatgtgggtaatatcgttttacgagaccgtaaagtcttgtcagaagatggtattttcattgttgctattactgtttctaaaaaagaaaaacgcattatttctaaggctaaagttaatacgcgtggatttgtgtatgtcaagaaaagtcatgatattttaagagaaagtgcagaattagttaatacaactgttggcaattacttaaaaaaagatacctttgactggggcgaattaaaagggaatgtcagagatgatttgtctaaattcttatttgaacaaaccaaaaggcgcccagcgattctgccggttgtgatggaagttcgttag

SEQ ID NO: 38349 - DNA, 1908 bp, Streptococcus pyogenes
atgattattttacaaggaaacaagttagaacgctctttctcaggagatgttctttttcaaaacatatcactacaagttgatgaacgtgaccgcattgccttggttggtcctaatggagctggcaagtcgactttactaaaattattggttggggaagaaaccccaacgagcggagaagttaatactaaaaaagacctaaccttgtcttatctggctcaaaatagccgttttgaatcagatcaaacaatatatgaggaaatgctcaaggttttcgaagcattacgccaagatgaaaagcgcctgcgtcagatggaaatggatatggcaaccgtttcaggtcaagttttaacccgactgatgacagattatgatctgcttacagagcattttcgtcagcaaggcggctttacgtatgaatctgacatcaaagccattttaaatgggtttaagtttgatgagagcatgtggcagatgactatcgctgagctgtcagggggtcaaaatactcgtctggccttggctaaaatgcttttagaaaagccagaactattggtccttgatgagccaacaaaccacttagatattgaaaccattgcctggttagagaactacttggccaactatcaaggagctctaatcattgtgagtcacgaccgttattttctggacaaagtggcgaccgtgactttagatttgacgcctaacggcttagatcggtatagtggtaactattctcgttttatggccttaaaagctgaaaaactagtagccgaagaaaaacagttcgataaacaacaaaaagaaattgccaagctagaagattttgttcaaaaaaacattgtcagggcctctaccacaaaaagggctcaggctaggcgtaagcaattggaaaaaatagagcgtttggacaaacccacaggtgggcgtaaatctgctcatatgacatttcatgcagaaaaaccatcaggaaatgttgtgctaagagttgaggaagcagccatcggttatggagaccaagtcttgtccgaacctattaatgtagatatcaataagttggatgctattgccgttgtagggccaaatggtattggtaaatcaaccttgatcaagtcgattattggacaattgcctttgctcaaaggacaactcaagtatggtgccaatgtcgaaacaggttattatgaccaaacccaatcacatttgacgtctagcaacacagttttggaagaattatggcaggatttttcaactacgccagaagtcgatatcagaaaccgattaggggcttttctcttttctggagatgatgtcaaaaaatcggtggctatgctgtcaggtggagaaaaagcccgtctgcttcttgcgaagttatctatggaaaacaataattttcttgttctggacgagccgactaaccacctagacattgacagtaaagaagtgctagagaatgccctcattgactttgacggtaccttgctttttgtcagccacgaccgctatttcattaatcgtttggcaactaaggttttggaaattaccgaaaatggctcaaccctttacttaggtgactatgattattaccttgagaaaaaggcagagctagaagaattagcccgcctagcagcaggagagacagttgaggaaacaaaagaagcctctgccactgattatcagctacaaaaagctaatcaaaaagagcgtcgtcgcttgacccgccgatatgaggagattgaagcaagacttgaaaccattgaagagcgtattggtgctattcaagaagacatgcatgcctccaatgatacggcgcagttaatcgcttggcaaaaggaatgggaccaattggatcaagaacaagaagctcttatggaagaatgggaaaccatcgctgaacaaatagaatcataa

SEQ ID NO: 38350 - DNA, 969 bp, Streptococcus pyogenes
atggtaacagtttctaaagaacaacatttagatatgttccttaaaatggaacgtattcgtgaatttgattcacgtattaataaactcgtccgtcgtggatttgtacaagggatgactcacttctcagttggtgaagaagcagccaatgttggagcggtggctcacttgtcttacgatgacattattttttcaaatcaccgtggacatggacaatcaatcgctaaagacatggaccttaataaaatgatggctgagcttgctggtaaagcaactggtgtgtctaaagggcgtggtggctcaatgcacttggctgattttgaaaaaggaaactatggtactaatggtatcgttggtggtggttacgctcttgcagttggtgctgccctcactcaacaatacaaaggaactaacaatatagctgttgctttctcaggtgatggcgctactaacgaaggatcattccacgagtctgttaatatggctgcaacatggaaacttcctgttattttcttcatcatcaacaaccgttatggaatttcaatgagcatcaataatgcaacaaatacaccacacttatacacacgtgcagaagcttacggagttcctggtttctactgtgaagatggcaatgacgtgatggctgtctatgaaacaatgggcaaagccgttgaacatgttcgtggtggaaatggtccagctattgttgaggtagaatcataccgttggtttggtcactcgactgcagatgctggtaaataccgtactaaagaagaagtggatgagtggaaagaaaaagatccaatgatcaaatatcgtacttatctgacaagcgaaggcattgccactgatgacgaattggatgctattcaagcacaagtcaaaaaagaagttgacgatgcttatgaatttgcacaaaacagtccagatccagaactttcagtagccttcgaagacgtttgggttgactaa

SEQ ID NO: 38351 - DNA, 999 bp, Streptococcus pyogenes
atgtcagaaacaaaattaatggctttgcgtgaagcagtcaaccttgctatgactgaggaaatgcgcaaggacgaaaacattttccttatgggagaagacgtaggggtttacggaggagactttgggacttctgttggaatgattgaagaatttggccctaaacgtgttaaagataccccaatttcagaagctgctatctctggtgcggctattggtgcagctattacaggactacgtccaattgtcgacgttaccttcatggatttccttaccatcatgatggacgctatcgtgaataatggtgctaaaaataattacatgttcggtggaggccttattacccctgtaaccttccgtgtggcatcaggttctggtattggttccgctgcgcaacactcacaatctcttgaggcatggttgactcacattccaggaatcaaagttgttgctcctggtaatgccaacgatgctaaaggcttattaaaatcagctatccgtgataataacattgttcttttcatggaaccaaaagcgctttatggtaaaaaagaagaagttaaccaagatcctgacttctatatcccacttggcaaaggtgacatcaaacgtgaaggaactgatttgacaattgtgtcatacggtcgtatgttggagcgtgttcttcaagcggctgaagaagtagcagcggatggtattaacgttgaagttgttgacccacgtaccctcatcccacttgataaagagttgattattgaatctgttaagaaaacaggtaaattgatgcttgtcaacgatgcctacaagaccggtggattcattggggaaattgcaaccatgattaccgaaagtgaagcctttgattaccttgatcatccaatcgttcgtcttgcaagtgaagatgttccagtaccttatgctcgtgtacttgaacaagcaatcttaccagatgttgagaaaatcaaagctgctattgtgaaaatggcaaacaaaggcaactag

SEQ ID NO: 38352 - DNA, 1410 bp, Streptococcus pyogenes
atggcatttgaaattattatgccaaagctgggcgttgacatgcaagaaggcgagatcatcgagtggaaaaaacaagaaggtgataccgtcaatgaaggtgatatccttcttgaaatcatgtcagacaaaaccaatatggaacttgaggcagaagactcaggtgttcttcttaaaattacacgtcaagcaggtgatactgtacctgtaactgaagttatcggttacattggtgcagagggtgaatcagtagatactattgcttcaagtgaaaaaacaacagaaattccagttcctgcttcagcagacgctggaccagcagttgctccaaaagaaaatgtggcaagtccagctcctcaagtggcagcgacagctattccgcaaggaaatggcggaaaagttcgtgctactccagctgcacgtaaggcagcagcagaaatgggcattgaccttggccaagttccaggaacaggaccaaaaggacgtgtccataaagaagacgttgaaaactttaaaggtgctcaaccgaaagcttcaccacttgctcgtaaaattgcagcagacaaaggtattgatttggcaaccgtatcaggtactggctttaacggtaaggtcatgaaagaagacatcatggctattcttgaagcggctaaaccagctgaagcaaaagccccagcagctaaagaagaaaaagttgttgatcttccagaaggtgtggaacacaagccaatgtcagctatgcgtaaggcaatctctaaaggtatgacaaactcttaccttactgcccctacctttacgcttaactacgatattgacatgacagagatgattgcccttcgtaagaagttaattgacccaatcatggctaaaacaggccttaaagtcagctttacagacttgattggtatggcagtggttaaaaccttgatgaaacctgagcatgagtacatgaatgcttccctcatcaatgatgctaatgatattgaattgcaccgctttgtgaaccttggtattgccgtaggtcttgatgatggtcttatcgttcctgttatccatggggctaacaagatgtgcttgtcagatttcgtgcttgcttcaaaagatgtgattaaaaaagcgcaaactggtaagttgaaagcagctgaaatgtctggatcaaccttctctatcacaaacttgggaatgtttggtacgaagacatttaacccaattattaaccaaccaaactcagcaattcttggtgttggagcaactatcccaactccaacggttgtggatggtgagattgtttcccgtccaattatggcaatgtgcctaaccatcgaccaccgtttagttgatggtatgaacggtgcaaaattcatggttgatctcaagaaattgatggaaaatccatttgaattgttaatctga

SEQ ID NO: 38353 - DNA, 1764 bp, Streptococcus pyogenes
atggctgttgaaattattatgccaaaactcggtgttgacatgcaagaaggtgaaatcatcgagtggaaaaaacaagaaggtgatactgtcaatgaaggcgatattcttcttgaaatcatgtcagataaaaccaatatggaacttgaggcagaagactcaggtgttcttcttaaaattacacgtcaagcaggtgaaacagtacctgtaacagaagttatcggatatatcggtgctgaaggtgaatctgttgaggtttctagcccagctgcttcagatgtgaatgttgctcgtacaacagaagatttagaagctgctggacttgaagtgccaaaagcaccagctcaagctgcttcagctgcaccaaaagctgcacttgctgatgatgagtatgacatcatcgttgttggtggtggccctgcaggttattatgcagctattcgtggtgctcaacttggtggtaaaattgccatcgttgagaaatctgaatttggtggaacttgcttgaacgtagggtgtatcccaaccaaaacttaccttaaaaatgctgaaatccttgatggtattaagattgcagcaggacgtgggattaaccttgcctcaactaactatactattgacatggacaaaacagttgactttaaaaacaccgttgttaaaaccttaacaggcggcgttcaaggtcttctaaaagctaataaagtcactatctttaatgggcttggtcaagtcaaccctgacaagactgtaaccattgggtcacaaaccattaagggtcgcaacgttatccttgctacaggttctaaagtatcacgtatcaatatcccaggtattgactctaaacttgtcttaacgtcagatgatatccttgacctccgtgaaatgccaaaatcactagcagttatgggcggtggtgttgttggtatcgagcttggacttgtttgggcatcttacggtgtggatgttaccgttattgaaatggctgaccgtattatcccagctatggataaagaagtctctcttgaacttcaaaaaatcctttctaagaaaggcatgaagatcaaaacatctgttggtgtctctgaaattgttgaagcaaataaccaattgactttgaaacttaacaatggtgaagaagttgttgctgaaaaagctcttctttctatcggacgtgtatcacaaatgaacggtctggaaaatcttaaccttgaaatggatcgtaaccgtatcaaagttaatgactaccaagagacatcaattccaggtatctatgcgccaggtgacgttaacggaacgaaaatgcttgctcacgctgcttaccgtatgggtgaagtggctgcagaaaatgcgatgcatggcaacacaactcgtaaagctaaccttaaatacactccagcagctgtttacacacaccctgaagtggcaatggttggtttaactgaagaacaagcgcgtgaacaatatggtgatgtgcttattggtaaaaacagctttactggtaatggacgcgcgattgcttcaaatgaagcacatggttttgttaaagttattgctgatgccaaataccacgaaatcttaggtgttcatattattggtccagctgcagctgagatgattaacgaagcagctactattatggaatctgaattaaccgttgatgaattgttattatcaattcatggacacccaaccttctctgaagtgatgtacgaagcctttgcagatgtgcttggcgaagctatccataacccaccaaaacgtaagtaa

SEQ ID NO: 38354 - DNA, 792 bp, Streptococcus pyogenes
atgacatacacttcactaaaatctcccgaaaatcaagattacatctacgacctcactatcgcccatctctatggtaatcttatgaatacttatggtgataacggcaatattttaatgctcaagtatgtcgctgaaaaacttggagctagggttactgttgatattgtgtctatcaatgatacctttgaacaagacgattacgatattgttttctttggtggtggtcaagattatgaacaaagcattgttgccaaggatttgcctagcaaaaaagctgccttagcggattacattgctaataataaagtggtgcttgccatctgtggtggcttccaattactagggcaatactatgtccaagctaatggggttaaaattgatggacttggaattatgggacactacacccttaatcagcaccaaaatcgctttattggagatattaaaattcataatgacgaatttaacgaaacctattatggctttgaaaatcatcaaggacgtaccttcttatctggtgacgaaaagccacttggacgagtggtttatggcaacggtaataataaagaagaccaaactgaaggtgttcactataaaaacgtctatggtagttatttccacggtcctatcttatcacgcaatgttaatcttgcttaccgcttagtaacaacagctcttaaaaaaaagtatggatcagctatttcactacctagctatgatgatatactgaaacaagaaatcactgaagaatatgccgaccttaaaagcaaagcttcctttaataaagtttaa

SEQ ID NO: 38355 - DNA, 1338 bp, Streptococcus pyogenes
atgaagacattactcggcattattgctggcaaagctgctcaatccattttaacaaaactagggcgaggatctacttatcctggtcgattggctctagcttgtgataaagatattttaaaggatttgtctaaagactatgatattgtggtcgtcactggtactaatggtaaaacgttaacaactgctcttactgtcggtattttgaaagaggcatttggcgagataatcacaaatccaagtggtgccaatatgattactggaattacttctacttttttagctgctaaaaaagggaaatctgaaaggcaaattgctgttttagaaattgacgaggctagtcttcctagaattaccacttacttaaaacctagtctttttgtttatactaatatttttagggatcagatggaccgctacggagagatttacactacttatcagatgattgtagatggtgctcgaaatgctccaaaagcaactattctagccaatggagatagtcctattttctcttctaaggacatagttaatccagttcagtattatggttttgatactgctaagcatgctccgcagctagctcattacaacacagaagggattttatgtccaaaatgcgaacatattcttcagtatcgtctcaatacttatgcgaatctaggagactttgtttgcttaaactgtcagttccaaagaccaacgttagattatcaattaactgagctcaccgctattactcaccaaagttctgaatttgttattgatggacaaaactacaagataaatgttggtggtctttataatatttacaatgcgctcgctgccgtctctgttgctgaatttttcggtgtttctcccgagaaaatcaaggcgggctttaacaaaagtaaggcggtttttggaagacaagaaacttttactgttggtgataaatcatgcacccttatccttatcaagaatcctgttggagccagtcaggcactggaaatgattcaattggcagattatccatttagcttatcagttttattaaatgccaattacgctgatggcattgataccagctggatttgggatgctaattttgaactcattacccaaatgcccattacagaaattaatgctggcggcgtccgccactctgaaattgctagaagacttagagtcacaggatttgacgatactaagataaaacaagctgaaaagctcgagcaaatcatagaaaccattgaaaaacaagaagctaagcatgcctatattttagcaacctatacggcaatgttagaattccgtagcttacttgctgaccgccatgtcgttgaaaaggagatgatctaa

SEQ ID NO: 38356 - DNA, 957 bp, Streptococcus pyogenes
atgaaacgatttttaaatagtcgtccttggttaggaatggtatcagtcttttttgcgattctcctttttttaactgcagcatcgagcaatcataataactctagctcgcaaatttatagtccgattgaaacctatacgcatagccttaaagatgtaccaattgatatgaagtatgatagtgacaaatattttatcagtgggtattcttatggtgcggaagtttatctaacctccactaatcgtatcaaattagattctgaagtgaacaatgatacacgtaattttaagattgtggcggatctaacacatagtcatccaggtacagtaagtgtcaacctaagagtagaaaaccttccttctggggtgacagctaccgtatctccagataaaatatcagtcacaattggcaaaaaagaatctaaggtatttcctgttagaggaagcgttgatgctaaacaaattgcaaatggttatgaaattagcaaaattgaaacgggggttaataaggttgaagtgaccagtgatgaatctaccattgctttaattgatcacgttgtggcaaagttacctgatgatcaagtgttagataggaattatagtagtcgagtgaccttacaagctgtctcagctgatggaactattttagcaagtgcaattgatcctgcaaaaacaaatttatcagttgctgtaaaaaaaataacgaaatcagtcccgattagagttgaggcagtggggatgatggatgatagcttatcagatattcaatacaaattgtcaaaacaaacagctgttatctcaggtagtcgagaggtcttagaagatattgatgaaattattgcagaagttaacatttctgatgtcactaaaaatactagtaagaccgtgagtttgtcttctagtcaggtgtcaattgagccgtcagtagtgaccgttcagttgacaaccaccaaaaaataa

SEQ ID NO: 38357 - DNA, 1356 bp, Streptococcus pyogenes
atgggaaaatattttggaacagatggtgttcgtggcgaagcaaatgttgagctgacacctgagttagcttttaaactgggccgattcggtggttatgttttaagtcaacatgagaccgaaagacctaaagtttttgtggcgcgtgacacccgtatttcaggagaaatgttggagtcagccttgattgctggtctactatctgttggtattgaagtttataaacttggcgttttagcgacacctggtgtctcttatttagttagaacagaaaaagcaagtgcaggtgtgatgatttctgcaagtcataaccctgcgcttgacaatggcatcaaattctttgggaatgatgggtttaagttagctgatgaccaagaattggaaattgaagctctcttagatgctccggaggacacgcttcctcgcccgagtgcagaaggacttggaaccttggtagattatccagaaggacttcgtaaatatgaaaagttcttggtaacaactggtactgacttaagcggtatgacagttgccttagacactgctaatggagctgcttcagtgtcagcacgtgatgtctttttagatttaaatgcagaaattgctgtcattggtgaaaaaccaaatggtcttaatattaatgacggtgttggttcaacgcgtccagaacaacttcaagagttagttaaggaaacaggagcagatcttggtttagcctttgatggcgatagcgaccgtctgattgctgtggacgaaactggcgagattgttgacggtgatcgtattatgtttatcattggtaaatatttgtcagaaaaagggcttcttgctcacaataccattgtcacaacggtgatgtctaacctcggttttcataaagctttagataaacaaggtattaataaagcaattacagcagttggagaccgctatgtggttgaagaaatgcgtagctcaggatacaatctcggtggtgaacaatcaggccatgtcattatcatggactacaataccactggagatggtcagttgacagctatccaattagccaaggtgatgaaggaaactggaaaatcactttcggaattagctgctgaagtaaccatttaccctcaaaaactggtgaatattcgtgtggaaaacagcatgaaagaacgtgctatggaagttccagctattgcgaacatcattgcaaaaatggaggatgaaatggctggtaatggtcgtattctcgtgagaccaagtggtacagaacctcttcttcgtgtcatggcagaggcgccaacagatgccgaagttgattattatgtcgatactattgctgatgtcgtccgtacagaaatcggatgcgataactaa

SEQ ID NO: 38358 - DNA, 567 bp, Streptococcus pyogenes
atgaccacagaatttgacaaaatgactagaggcgaatggtatgatgctaattttgattcggaactgattcaaaaacgcatgatggcacaagacctctgtttcgatttaaaccaattaaagcctagtcgagaagaagaacgctctgccgttttaaaccaactttttggacaatcttttgagggcttggtcctgctcagccctttcatctgtgactatggtaagaacattacttttgggaagaattgctttattaacagcaattgttatttcatggatggggcgaagattgccttgggcgataatgtctttgtaggtccttcgacaggtttttacacggcaaatcaccctctagattataaacgccgcaatgaggggcttgaaaaagctttaccaattaccataggagataatgtctggtttggtgccaatgtcaatgttatgcccggcgttactattggcagtggttgtgtgattgcgtcaggatcagttgttacccatgatattccagtcaattcccttgcggcaggtgttccttgccaagttgtacggaaaattgagcaggagtag

SEQ ID NO: 38359 - DNA, 1398 bp, Streptococcus pyogenes
atggcttatcaaactatttacccttatacaaatgaagtccttcatacatttgataatatgaccgatcaaggtttggcagatgtccttgaaagagctcaccttctctataaaaaatggcgcaaggaagatcatttagaagaacgtaaagcccagcttcatcaagtggctaatattcttcgtcgtgaccgcgataaatacgctgaaatcatgaccaaagacatgggaaaactgttcacagaagcccaaggtgaagtaaatctttgtgccgatattgctgattactacgctgataaggcagatgaatttttgatgtctacgccactagaaacggattcaggtcaagcttactatttgaaacaatcaactggtgttatcctagctgttgagccttggaattttccttactatcaaatcatgcgggtctttgcgccaaactttattgttggaaacccaatggttttaaaacacgcgtccatttgcccacgctctgcccaatctttcgaagaattagttcttgaagctggtgctgaagcaggtagtattaccaatttgtttatttcttatgaccaagtatcacaagtgattgctgataaacgtgtggttggtgtctgcttgacaggttccgaacgtggaggagctagcattgcagaagaagctggtaaaaacttgaaaaaaacaacccttgaattgggtggagatgatgcctttattatccttgatgacgcggattgggatcaattagagaaggtgctttacttctctcgtctctacaatgcaggtcaagtatgtacctcatcgaaacgttttatcgtgcttgacaaagactatgaccgtttcaaagagttattaacaaaagtcttcaaaacagctaaatggggtgacccaatggatcccgaaacgacgttggcgccattatcatcagctcaagctaaagcagatgttcttgaccaaattaagttggccttggatcatggtgcggagttggtttatggtggtgaagcgattgatcatccaggtcattttgtcatgccaaccattattgctggcctcacaaaagacaaccctatttactatcaagaaatctttggcccagtcggtgaaatctacaaagtgtcttctgaagaagaagcgattgaagtggcgaatgattctaactatggccttggaggtactatctttagtagcaatcaagaacatgcgaaagccgtagctgctaaaattgaaactggtatgtcttttatcaactcaggctggacaagtcttccggaactcccatttggtgggattaaacattcaggctatggtcgtgaattgagtgagcttggctttacatcttttgtgaatgaacaccttatctatattccgaataaaacgaataatggcaatactaaagtttga

SEQ ID NO: 38360 - DNA, 1410 bp, Streptococcus pyogenes
atgacaaccattgattttaaagcagaagttgacaaacgtaaaaaagctatgctagcagatttagttgacctattacgcattaattcagaacgcgatgaccaattagctgatgataaacacccatttggcccaggtccagttaaggccttggagcatttcctcgcaatggctgagcgtgatggctacaaaacgcgtaatattgataactatgcaggtgactttgaatttggtcaaggtgatgaagtactaggaatctttggtcaccttgatgttgtgccagctggtagcggttgggatacagacccttatgagccagtgattaaagacgatcgcatctatgcgcgtgggtcttcggatgataaaggaccaaccatggcgtgttactacgctctgaaaatcattaaagaactgggtcttcctgtgtctaaaaaagttcgtttcattgttggtaccgatgaagaatctggctggggggatatggattattactttgctcataatggcttgaaaaatccagattttggtttctcaccagatgctgaatttccaattatcaatggtgagaaaggaaatatcactgaatacctccatttcgctggtgacaacaagggcgcttttgtgcttcatcgcttccaaggtgggttgcgtgaaaacatggtaccagaatctgccacagctgtcattacggcaccgcatgaccttgatgtgctagaagcagctttggagcaatttttatcagaacatggtgttaaaggttctatgaaggctactgatggtaaaattgaagtaactattattggtaagtctgctcacgggtcgactccagaagcgggtgttaatggtgctaccttgttggctaaattcctgaatcaatttacctttgaaggggctgctaaggattatttacatgtggcaggtgaggtgcttcatgaagactttgcggcagaaaaactaggccttgcttatactgatgaccgtatgggagccctgagcatgaacgcaggtgtcttcacctttgatagtcaatcagctgacaataccatcgccttgaatttccgctatcccaaaggaactgatgcggcaaccttaaaagcaggattggaaaaattaccaggattaactaaggtaagcctttctgagcatgaacatacacctcattatgtgccaatggatgatgaattagtagctaccttacttgctgtttacgaaaaacaaacaggtcttaaaggctacgaacaagttatcggcggaggaacctttgggcgcttgctagaacgtggtgtggcctttggagcgatgttcccaggtgatgaaaacactatgcaccaagctaatgagtatatgcctttagaaaatatttatcgctcagcagctatttatgctgaagcaatctacgaattaattaaataa

SEQ ID NO: 38361 - DNA, 1377 bp, Streptococcus pyogenes
atgagtataactaaagaatttgatacaattaccgccatttcaacccctcttggtgaaggagctattggcattgttcgtttatcagggacagatgcgcttgccattgcacaatctgtttttaagggaaagaacttagagcaagtcgcctcacacaccattaactatggccatatcattaatcctaagacaggaactattatcgatgaagttatggtgtcagtcatgctagcccccaaaacctttacccgtgaaaatgtggttgaaatcaatacgcacggtggtattgctgtgacaaatgaaatcttgcaactattgattcgccaaggcgctagaatggcagagcctggcgaattcaccaaacgtgccttcttaaatgggcgagttgatttgactcaagctgaggctgtcatggacattattcgtgccaaaacagacaaggctatgacgattgcagtcaagcaactggatggctccctttcccagcttatcaatgacacccgtcaggaaattctcaacaccttagctcaagtcgaagtcaatattgactaccctgaatacgacgatgtggaagaaatgaccactgctctgctacgtgagaaaacacaagaattccaaagccttttggaaagtctccttcgaacagctaaacgcggtaaaattctgcgtgagggcttatcaacagctattattggtcgtccaaacgtcggtaagtcaagcttacttaataatttgttgcgagaagacaaggctattgtgactgatattgcaggaaccacccgagatgtcattgaagaatacgttaatatcaagggagttcctctaaaacttgtcgatacggccggtattcgtgagacagatgatctggtcgaacaaatcggagttgaacggtctaaaaaagctcttcaagaagctgaccttgttcttcttgtgctgaatgcttctgaaaaactgactgaccaagaccgggctttgttaaatctcagtcaggacagtaaccgtattatattgttgaataaaacggatttggaacagaagattgaattagagcaattaccagatgactacattcccatttccgttttaaccaaccagaacattaatctaatcgaagatcgtatcaaccagcttttctttgacaacgctggtttggtagagcaagatgccacttacctgtcaaatgcccgccacatttctttgattgaaaaggcagtccagagtttagaagctgtcaatgacggtttggcgcttggcatgccagttgatttactacaggttgatttaaccagaacttgggaaattctcggagaaatcacaggggatgctgctcctgatgaactcattacccaactctttagtcaattctgtcttggtaaataa

SEQ ID NO: 38362 - DNA, 501 bp, Streptococcus pyogenes
atgagtgaagcaattattgctaaaaaagctgaacaagtcgaacttattgctgagaaaatgaaagcagcagcaagtatcgttattgttgattcacgtggtcttacagttgatcaagatactgttcttcgtcgttcacttcgtgaaagtggcgttgagttcaaagttatcaaaaactcaattttgactcgtgcagctgaaaaagcaggtcttgatgagttgaaagatgtattcgtaggaccatctgcagtagcattttctaacgaagatgttatcgcaccagctaaagttatcaacgactttactaaaactgctgacgcacttgaaatcaaaggtggtgcaatcgaaggcgctgtttcttcaaaagaagaaatccaagcacttgcaacattgccaaaccgcgaaggaatgctttctatgcttctttctgtacttcaagctccagtccgtaacgttgcatacgctgtcaaagctgttgcagaaaacaaagaaggcgctgcttaa

SEQ ID NO: 38363 - DNA, 366 bp, Streptococcus pyogenes
atggcattgaacattgaaaacattattgctgaaattaaagaagcttcaatccttgagcttaacgatcttgtaaaagctatcgaagaagaatttggtgtaactgcagctgctcctgtagctgctgcagctgctggtggtgctgaagaagctgctaaagattcattcgacgttgaattgacatctgctggcgacaaaaaagttggcgttatcaaagctgttcgtgaaatcacaggtcttggtcttaaagaagctaaaggtcttgttgatggagcacctgctaacgttaaagaaggcgttgctgctgcagaagctgaagaaatcaaagctaaacttgaagaagctggagcaacaatcactcttaaataa

SEQ ID NO: 38364 - DNA, 723 bp, Streptococcus pyogenes
atgaaatcatatttatgttctaattttttaaaaatcaaaaatacttcatatttactaatacatattttagctgcactattatttcccttacttctatttttctattggagtcaacgtggaggtttacaaagcaggactgtattattctcctactttcaaatagtaggtgtacttcttccttttgttgcaagtattgtgtgcattcaactaaaaaatttggaagaatcatctggaaaatataaatatttattgggttactcacagtcgaattataagccatttattgtagaattagtatttctatggttatgctattgtatagtattaattatttcaattactatatttattcttttattgaaaactattggtataaatgtatctctcagactacttattttgaatagtttaatttatatcatttttgcctatgtaacctatctgatcaatcatattattagctatatatttagtacaggtgtggcattaggtatttcaatggtaggtgttattgctgcagcattttgtgaaacgagccttggtgataaggtatggtttcttattccatgggcatggcttttaagaatatcagatactctatataaccaacagaaaatggcaattgttccacttattgttatattttttgtttcatgcacagtagctttacttcatatacgaatatttaaaaggtggaatcaagactgtttgacaagtagttaa

SEQ ID NO: 38365 - DNA, 801 bp, Streptococcus pyogenes
atgaaaattggaaagtttgtgattgagggcaatgcggctatcatggggattttaaatgtgactccagattctttttcagatggggggtcttacactactgtgcaaaaagcattagatcacgttgagcaaatgattgctgatggggctaaaatcatcgacgttggtggagaatcaacacgtccaggttgccaatttgtaagcgctaccgatgaaattgaccgggtggttcctgtgatcaaggccatcaaagaaaactatgatattctaatcagcattgatacctataaaaccgaaacagctagagcagctttagaggcgggtgccgatattctcaatgatgtttgggcaggtttgtacgacggtcaaatgtttgccttagcagccgagtacgatgcgcctatcatcttgatgcataaccaagacgaagaagtttatcaagaggtaacacaagacgtttgtgattttctaggcaatagagcacaagcagctcttgatgctggcgtgccaaaaaacaatatttgggttgatccaggatttggatttgccaaatctgttcaacagaatacggagttattaaaaggattggaccgcgtctgtcagttgggctatcctgtcttgtttggtatttcgagaaagcgtgtcgtagatgccttgttaggcggcaacaccaaagctaaagagcgagacggagcgacagcagccttgtctgcttatgcccttggaaaaggctgtcagattgtacgcgtacacgatgtcaaggctaatcaagacattgtggctgtgttgagccagttgatgtga

SEQ ID NO: 38366 - DNA, 501 bp, Streptococcus pyogenes
atgaccattgtttatttaagtttaggcaccaatatgggggaccgagcagcttacttgcaaaaagctcttgaggctttagctgacttacctcaaacacggttgcttgctcaatcatccatttatgaaacgactgcttggggcaagacaggccaggctgattttctcaatatggcctgtcaattagatacacaattaaccgcggctgatttcttaaaagaaacacaagctattgagcaatctcttggtcgtgtgaggcatgaaaaatggggatcaagaactattgacattgatatcttgctatttggagaagaggtttatgacacaaaggaattgaaagtgccacacccttatatgactgagcgtgcttttgttttaatccccttattggaattgcagccagatttaaaattgcctcctaatcataagtttttaagggattatcttgcagctttagatcaatcagatatcacactcttttcagctcaacagacagagttctag

SEQ ID NO: 38367 - DNA, 888 bp, Streptococcus pyogenes
atgataactgaacttcatgggattgatattcgagagaatgaacccctaaaacattacacttacactaaggtaggtggcccagcagatttcttggcttttcctagaaatcactacgagctatcacgcatcgttgcttatgccaacaaagaaaatatgccttggcttgttttgggaaatgccagcaatctcattgtgcgagatggtggtattcgtggctttgtcatcatgtttgataagctaaatgcagtgcacttaaatggttataccttagaagccgaagctggtgccaatctgattgaaacaacgaagattgccaaattccatagtttaacagggtttgaatttgcatgtggcattcctggaagcattgggggtgctgtttttatgaatgcgggtgcttatggtggggaaatatcacatattttcttatccgctaaggtgcttaccccaagtggagagatcaaaaccatttcagctagggatatggcttttggttaccgtcactctgccattcaagaaacaggtgacattgtcatttctgctaagtttgctcttaaaccgggtaattatgatacgatcagccaagaaatgaatcggttaaatcaccttcgccaactaaaacaacctttagaatttccatcttgtggatctgtgtttaagcgcccgccaggacactttgcaggtcaattaatcatggaagcaaatcttaaagggcatcggattggtggtgtggaagtttccgaaaaacacactggttttatgattaatgtggcagatggcacagctaaagattatgaagatttgattgcttatgtcattgagacagttgaaaaccattctggtgtcaggcttgaaccagaagttcggattattggggaaaacctgtaa

SEQ ID NO: 38368 - DNA, 1074 bp, Streptococcus pyogenes
atgcgtaaactttattcctttctagcaggagttttgggtgttattgttattttaacaagtctttctttcatcttgcagaaaaaatcgggttctggtagtcaatcggataaattagttatttataactggggagattacattgatccagctttgctcaaaaaattcaccaaagaaacgggcattgaagtgcagtatgaaactttcgattccaatgaagccatgtacactaaaatcaagcagggcggaaccacttacgacattgctgttcctagtgattacaccattgataaaatgatcaaagaaaacctactcaataagcttgataagtcaaaattagttggcatggataatatcgggaaagaatttttagggaaaagctttgacccacaaaacgactattctttgccttatttctggggaaccgttgggattgtttataatgatcaattagttgataaggcgcctatgcactgggaagatctgtggcgtccagaatataaaaatagtattatgctgattgatggagcgcgtgaaatgctaggggttggtttaacaacttttggttatagtgtgaattctaaaaatctagagcagttgcaggcagccgagagaaaactgcagcagttgacgccgaatgttaaagccattgtagcagatgagatgaaaggctacatgattcaaggtgacgctgctattggaattaccttttctggtgaagccagtgagatgttagatagtaacgaacaccttcactacatcgtgccttcagaagggtctaacctttggtttgataatttggtactaccaaaaaccatgaaacacgaaaaagaagcttatgcttttttgaactttatcaatcgtcctgaaaatgctgcgcaaaatgctgcatatattggttatgcgacaccaaataaaaaagccaaggccttacttccagatgagataaaaaatgatcctgctttttatccaacagatgacattatcaaaaaattggaagtttatgacaatttagggtcaagatggttggggatttataatgatttatacctccaatttaaaatgtatcgcaaataa

SEQ ID NO: 38369 - DNA, 1542 bp, Streptococcus pyogenes
atgaaaaaaccactacgtttatgggccagtttatcgttgattttggtatctatgattgttgtcacaacctctctattttacgggattatgctacatgatacgcaccaatccatcaaaaatcaggaaacccatttgctaacgtcaactggaaaaatgttagcaagtcatcaagcgattaaagaattactcctaaacaaccaaccaaatgctaaaacaacagcctataccaactccattgcctccatctataaccttgattatgtggtcgtgatgaacatgaaagggattcgactcacccatcctaacccgaaaaatatcggaaaaccttttcaaggaggtgatgaggaggctgttctagcaggaaaaaaggttatctctaccgccaagggcactttaggaaagtcacttcgctatctagtacctgtgtttgacggtgacaaacagattggtgctattgcggttggcattaaactaactaccctaaatgatgtggctttaacgtcaaaacgcaattataccctgtctttactcctttgtcttcttattagtttactggtcaccagttttatttcttttcgactcaagcgtcaactgcaccagttagaaccaagtgaaatttatcagctctttgaagagcgtaatgccatgttggatcaaatcgaagccgccgtatttgtggtagataaagctggtatcttacagctctgcaatcaggctggacaaaaattaattgctcggaaatgccagttgggaaaacctactggcaacagtttcaattacctctttcctgattttccaaaacttagtttgcaagaggggcatgaacaactctttcggtatggtgaggaagactacttgttagccatttcacccatctgtgtcaaaaacgatcaccgaggccatattattttcatgcgagaagcagttaaggctattgataccttggatcagctagcctataccactgcctatgcttctgctctacaagcccaaactcataaattcatgaatcaattgcatgttatttatggcttagtggatattgcttattatgaccaattgaaaatttatttagacagtattttggaacccgaaaatgaaattctcactagcttatctgtccttgttaaggagcctcttctagctagttttctcattggagagcaagagaaataccaagaattaaatgtccatctcaagattgatgttttaagcgagattcctcattctgccaccaagaatcaacttaataatggtttgatgatttaccgctttatccatactaatcttctaaccacactgagacccaaatcactcgttttgagtattcaacatgaccagaatcatttaatcagccattacaccttgacagacaattggattgatttggagcgggtacagcctatttttgacttaccttattttcaacagctcttgaccgatacaaattcccaattccatcaacatcaaaccgtaaccgagttacagttctcagtgacaacaccttatgtaggagggcaacatgaacgttttaatcattga

SEQ ID NO: 38370 - DNA, 1533 bp, Streptococcus pyogenes
atggaaaaccataaaaatgaattcaccttttccaacaaatcaattattgcctatgtttggcgtggtgttgtggttggtattattgctggtgttattgttagtttattccggttgttaattgaagtgacagctgactgggtgattgaatggtaccgatacgctcatatcaattcgctgttgctacttcctatactaagtgtcagtttgttagctgttctttttgtaggttttttagtaaagtctgattctgatataaaaggatcagggatcccccatgtcgaaggagaactaaaggggctaatgtccccagattggtggagtgtcctttggaaaaaatttttaggaggaatcatggctatttctatgggatttatgctcggtcgtgagggtccttcgattcagttaggtgctatgtcagccaaaggattagctaagtttttaaaatcgagtcgtttggaaaagcgagtgctaattgccagcggagcagcagcagggctatcagcagcttttaatgctccaatagcaggcctcttgtttgttgttgaagaaatttaccatcatttttcgcgtttaatttggattacagcgctagtggctagcttagtggctaattttatttctctgaatatttttggattgaaaccagtcttagcaatgtcagaggcgatgccttttttaggactcaatcaatattggttgttgcttttacttggattatttctaggctgcttaggctatttatatgagatagttatccttaattttaataaactttatgttattttagggagttggttacatctgccagattatttttacggtattattatggtttttctaattttaccgattggctattatttaccacagttacttggaggaggacatggtttaatactttctttatccaatcaacaattgcctttgatgactatcttcttttattttattattcgatttattgttagtatgtttagttatggaagtggcttacctggaggtatttttttacctattttaactttaggtgctttggcaggcctattatttgggcaaatagcttctcaattaggtttattgaaccaatcttttctttctctttttttgatattagggatggcagggtattttgcggcaatttcaaaagcaccactgacaggcatgattttggtaactgaaatggtaggtgatttgaaacccttaatggccatagctgtagttacttttgtctcctatttagtgatggatttgttaaatggacagccaatttacgaagctatgctagataagatggcaatgaagcatccaactaatcttgttgaaccaacattaattgaattgactgttggtgataagattgcagggaaatatgttaaagagttaaagcttccagaaaatgtcttaattacaacccaaattcaccatcaaaaatctcaagttgtgtcaggtaacacgcgccttttatcaggagcaactatctttttggtcgttaatgaagctgatacaggttttgtccgtgaggtattgatgtag

SEQ ID NO: 38371 - DNA, 681 bp, Streptococcus pyogenes
atgtattctataaaatgtgatgataataaagccatgccaagagaacgtttgatgcgactaggagcagagtctctaagtaatcaagaattattagcaattttattacgaacaggtaataaagaaaagcatgtcttagagctgtcatcctatcttttatcgcatttagacagtctggcagattttaaaaagatgtctttgcaagaattacaacatttggcaggtataggaaaagttaaagcgattgaaattaaagctatgattgagttggtttcccgaattttagcgacagataagacattaactgatagcgtattaaccagtgttcaggtcgctgaaaaaatgatggcagctttaggagataaaaaacaagagcatttagtcgtattgtatttagataatcaaaatcgtattattgaagaaaaaactatttttattgggactgtccgacgttcacttgcagaaccaagagaaattttatactatgcctgtaaaaatatggcgactagtctcattgttattcataatcatccttcaggaaatattgaacctagttctaacgattattgctttactgaaaaaataaaacgatcatgtgaagatttaggcattatctgtctagatcacattatcgttagctataaagattattatagttttcgagaaaaatcaacccttttttaa

SEQ ID NO: 38372 - DNA, 672 bp, Streptococcus pyogenes
atgaccttagattgggaagaatttttagatccttatatccaaacagttggtgaattaaaaataaaactacggggtattcgcaagcaatatcgtaagcaaaatcgttattctccgattgaatttgttacgggacgtgttaagtcaattgaaagtattaaagaaaaaatgattttacgtggtgttattgaagaaaatatagcacaagatattcaagatattgctggactacgtattatggttcagtttgttgatgatgtggaagaagtcttagctctattgcgtcaacgacaagacatgacaattgtttatgaacgagattatattcgcaatatgaagtccagtggctacaggtcttatcatgtggtggttgagtaccctgttgacaccattgaaggtcaaaaaaaggtcttagcggagattcagattcgtactttggcaatgaacttttgggcgaccattgagcattctttaaattataaatatggtggagacttcccagaagaaattaaaaagcgtcttgaagtgactgctaaaattgctttagaattagacgaagaaatgcgtaagattcgagaagatattcgggaggctcaattattgtttgaccccgtgacacgaaatttaagtgatggtgtaggaaatagtgatgacacagatgaattatacaggtaa

SEQ ID NO: 38373 - DNA, 837 bp, Streptococcus pyogenes
atgacacagatgaattatacaggtaaggtaaaacgagttgctattattgcaaatggtaagtaccaaagtaaacgcgtcgcctccaaacttttctccgtatttaaagatgatcctgatttctatctttcaaagaaaaatccggatattgtgatttctattggcggagatgggatgctcttatctgcctttcacatgtatgaaaaagaattagataaggtacgttttgtaggaatccacaccggtcatcttggcttttataccgattatagggattttgaagttgataaattaattgataatttaagaaaagacaagggagaacaaatctcttatccgattttaaaagttgctattactttagatgatggtcgtgtggttaaagcgcgtgctttgaatgaagcgacggttaagcgtattgaaaaaacgatggtagcagatgttattattaaccatgtcaaatttgaaagcttccgaggtgatgggatttcagtatcgaccccgacagggagcacagcctacaataaatctttaggtggtgctgtcttgcatccgacgattgaagcgctgcaattgacggaaatttccagtcttaataaccgtgtctttagaaccttgggctcatcaatcattattcccaaaaaagataagattgagttagtgccaaaacgattaggaatttataccatttccattgataataaaacctatcagttaaaaaatgtgacgaaggtggagtattttatcgacgatgagaaaattcattttgtttcctctccgagtcatacgagcttttgggaaagggtcaaggatgcctttattggagagattgactcatga

SEQ ID NO: 38374 - DNA, 906 bp, Streptococcus pyogenes
atgagatttgaatttgtagcagacaaacgaataaaagtaaaaacccttttaaaaagttatgatgtctctaaaggactattggctaaaatcaaatataagggcggtaatatattagtgaatggtattgaacaaaatgccatttatttattgcaagtgggagatgttgtcaccattgacattccaaacgaagagccctttgaaaagcttgaagccatcccttttgatttggatattgttcacgaggatgatcattttttggtgattaataaacccattggctttgccagtattccaagtgccatccactccaataccattgctaactttatcaaggcatattatgtggacaatcattacctagaccaacaagtgcatatcgtgactcgtttagacagagatacgagtggcttgatgttatttgctaagcatggttatgctcatgcaaggttggacaagcaactccaaactcgctcaatagagaaacgttattttgctctggtttctggaaatgggatgttgccagatgaaggagatattattgctccaattgggcgttcaaaagatagtattattaccagggcagttgaccctatgggcaaatatgccaagactagctataaggttgtggcgcgctattcagaaaatgtgcatttagtggatatcaaattgcatacaggacgtacccatcaaatcagagttcattttgcccatattggttttccacttttaggggatgacctttacggaggtcgtttggacttaggaataacaaggcaagctttacattgtcattatttgaatttcaaagatccatttacagaaagtgattgtagctatgcaatacacttgacagatgactttgatagcgttatcataggtttacagaaaaaagatagaggttattaa

SEQ ID NO: 38375 - DNA, 996 bp, Streptococcus pyogenes
atgagtattcgtagtttattcggtggtttaagagaaaaaattcttggtaaaaacatgaagattgttttcccagaaggtaatgatgagcgcgtcgtccgtgcagctgctcgtttgaaatttgaaggactcttagaaccgattatccttggacagtcagaagaggtacgcaaccttttgacaaaattaggtttcgctgatcaagactatactatcattaatccaaatgaatatgcggattttgacaaaatgaaagaagcttttgttgaggtccgtaaaggaaaagcaacgcttgaagatgcagataaaatgcttcgtgatgttaattactttggtgttatgttggttaaaatgggattagcagatggaatggtatcaggggctattcattcaacagctgacactgttcgtccagctcttcaaatcatcaaaactaaaccaggtatctcaagaacttcaggtgtcttcttgatgaaccgcgaaaatacgagcgagcgttacgtgtttgctgattgtgctatcaatattgacccaacagcacaagaattggcagaaatcgctgttaacacagctgaaacagctaaaatctttgatattgatcctaaaattgctatgttaagcttctcaacaaaaggttctggtaaagcgcctcaagttgataaggtaagagaagcaacagaaattgctacagggttgaaccctgatttggcacttgatggcgagttgcaatttgatgcagcctttgttcctgaaacagcggctatcaaagcaccagattcagcggttgctggtcaagctaatactttcgttttccctgacttgcagtctggaaatattggttacaaaattgcacaacgtttaggaatgtttgatgctattggaccaatcttacaaggattgaacaaacctgttaatgatttatctcgtggctcaagcgctgaagatatttacaaactagccattattacagcagcacaagctattgaaagccaagggtaa

SEQ ID NO: 38376 - DNA, 690 bp, Streptococcus pyogenes
atgaaaaatgccatttccattttagcgctcttaacacctgaaaaccaacttgaagagacgtttattagagagctttcccaccacttctcacacctttttgaggtgactattctcactagcaaagccaacattcagtcaaatcaattgtcgactttccaaggaattttcagtttccatgagcatgacattgacttgcctacactctatttcaaaacttctcaacatggtcagggctttttagtgacagaaagtgtctttgatcaagcaacagcagtcttatcgttaagccaatacctcactggattttaccaaaaatttgatggacattttttacagtaccttcctttgcaagcaaggttatctgatgcaaatggaaacatcatagtcgataatcatgcttttaatggaagttttttgccaactactgataaagaaatagaagattggattcttgctgaattgcgtttatcagataacccttgtaaaaccttcctacttccttcgggttcattggatcatatttacatgcagcattatcaagctcttaaaaatcctcaaggtcagctggtgggagttttggataccgttcaagacattaaaccgttattaaaccagtatttagaagaaactggacaagccattgttggctggtccgatgtcacatcaggcccttccattttagatcactaa

SEQ ID NO: 38377 - DNA, 1533 bp, Streptococcus pyogenes
atgagcatgcctagtttgtttgtaactttccaaaaccgttttaatgaatggctggcggctctgggggaacacctgcaaatttcccttttatctcttatgatcgccttgctaataggtgtgcctttagcagcccttctcagtcgcagcaaacgttggtcagacattatgttacaggtaacaggtgtttttcaaaccattccctcactggctttgcttggtcttttcatccctttaatgggaattggaacgttgcctgcagtgacagctttagttatctatgcgatttttccgattttacaaaacaccatcacaggattaaatggtattgacccaagtctcgtggaagcaggaatagcttttgggatgaccaaatgggagcgattgaaaacatttgagattccaattgccatgcctgttattatgtcaggtgtgcggacgtcagcagtcatgattatcggcacagctactttagcttccttgataggagccggtggacttggctctttcatcttattagggattgatcgtaataatgctaacctgattctgataggggctatttcttcagctctgctagctattattttcaatagtttgttacagtaccttgagaaagcttccttgcgacggattatgattagttttggaattaccttacttgcactgctagcatcgtatactcctatggcgcttagtcagttttcaaaaggaaaagatacagtggttattgccggtaaattgggagcagagcccgatattctgattaatctctataaggaattaattgaagaccaatcagatataagtgttgagttgaaatctaattttgggaaaactagcttcttatatgaagcccttaaatctggagatattgatatgtatcctgaatttacaggaaccataacatcaagtcttttacgcgacaaaccacctttgtctaatgaccctaagcaggtctatgaggatgctaaaaaaggcattgctaagcaagataaactgacccttctcaagccatttgcttaccaaaatacgtatgctgttgctatgccagaaaaattggctaaggaatatcagattgaaaccatttctgatttaaaagcgcatgctgatactttaaaggccggttttactttggaatttaaggacagagcagatggctataagggaatgcaatctcaatatggattacagctatctgtggcgacgatggagccagctcttcgttatcaagcaattcaatcaggagatatccaagtaacagatgcttactctacggatgctgaaattacgaaataccatttgaaagttttaaaggatgataaacagttgtttccaccttatcagggagctcctttgatgaaaacttccttattaacaaaacatccagaattaaaaggcattcttaatcaattagcgggaaaaattactgaaaaagagatgcaggacatgaactacgaggtatctgttaaaggagcagatgctaataaggtcgctcgagattatctgttgaaaacaggcttaatccagaaataa

SEQ ID NO: 38378 - DNA, 984 bp, Streptococcus pyogenes
atgtttaatgacatccctgtatttgattatgaagatattcaactgattcctaacaagtgcattattactagtcgttcacaagcagatacaagtgtgacactcggaaaataccagttcaagctaccagttatcccagcaaatatgcaaaccattattgatgaaacaattgctgagcagttggcaaaagagggttatttttatattatgcatcgttttgatgaagatagccgcaaaccttttatcaaacgcatgcatgaacaaggcttgattgcatcaatctctgttggggttaaagcttgtgaatatgaatttgtgacctctttgaaagaggatgctcctgagtttatcaccattgatattgctcatggtcatgctaacagtgttattgatatgattaagcatatcaagactgaattaccagaaacatttgtcattgctggaaatgttggtacgccagaagctgtacgagaactcgaaaatgcaggtgctgatgctactaaagtaggcatcggtccaggcaaagtatgtatcactaaagttaaaaccggtttcggtacaggtggttggcagctagcagcactgcgctggtgcgcaaaggcagctcgtaaacctatcattgctgatggtgggattcgcacacatggtgatattgctaaatccatccgctttggagctagtatggtcatgattggatcgctttttgcaggacattttgaaagtcctggaaaaacggtagaagtggatggtgaaacgtttaaagaatattatggctcggcgtcagaatatcaaaaaggcgagcataaaaatgtagaaggcaaaaaaatcttattgcctacaaaaggtcacttatcagataccctgaccgaaatgcaacaggatttgcaatcgtccatttcttacgcgggtggtaaagatttagacagtttgcgtcatgttgattatgttatcgtcaaaaattctatttggaatggtgattccatttaa

SEQ ID NO: 38379 - DNA, 570 bp, Streptococcus pyogenes
ttggctcaactctattataaatatgggacaatgaattctggtaaaaccattgaaattttaaaagttgctcataactatgaagaacaaggcaaacctgttgtcattatgacaagtgctcttgatacacgtgatggttttggcatcgtctcaagccgtattggtatgcgacgagaagctatccccatttcaaatgacatggatattttcacatttattgcccaattggaggaaaaaccttattgtgtcctgattgacgaaagccaatttttaagcaagcaaaatgtttatgatttggcgcgtgtggtggatgagctaaatgttcctgtcatggcttttggtttgaaaaatgatttccaaaacaatctttttgaaggttcaaaacatttgctattattggccgataagattgatgaaatcaaaacaatttgccaatactgtagtaagaaagcaaccatggttttaaggacagaaaacggaaaacctgtctatgaaggtgatcagatacaaattggtggtaatgaaacatatatcccagtttgtcgaaaacattattttaatccagatatttaa

SEQ ID NO: 38380 - DNA, 1080 bp, Streptococcus pyogenes
atgaatatttatgatcaattgcaggcagttgaagatcgttatgaagagttaggtgagttacttagtgatccagatgttgtttcagatacaaagcgatttatggaattatcacgtgaagaaactaatactcgagaaactgtcacagcttatagagaatataagcaagtcattcaaaccatttcagatgctgaagaaatgatcaaagatgccagtggtgatcctgaattagaagaaatggctaaagaagaacttaaagaatcaaaagcagctaaagaagagtatgaagaaaaattaaaaatccttctattacctaaagatcctaacgatgataaaaacattattttagaaattcgtggtgctgctggtggcgatgaagcagcgctttttgctggtgatcttttaacaatgtatcaaaaatatgctgaaactcaaggatggcgttttgaagttatggaatcatccgttaatggtgttggtggtattaaagaagtggttgccatggtttctggtcagtcagtttattctaagcttaaatatgaatcaggagctcatcgtgttcaacgtgtcccagtgacagagagtcagggtcgtgttcatacttcaactgcaactgttttggtaatgccagaagttgaagaagtagaatacgacattgatcctaaagaccttcgcgtcgatatttaccacgcgtctggtgctggtggtcagaatgtcaataaagttgctactgcagttcgtatggtacacattcctacaggaatcaaagttgaaatgcaagaagagcgtactcagcaaaaaaaccgtgataaagcgatgaaaatcattcgtgctcgtgttgctgaccattttgcgcaaattgctcaagatgaacaagatgctgaacgtaaatcaacagttggtactggtgatcgttcagaacgtattcgtacttataatttcccgcaaaatcgtgtaacagatcatcgtattggtttgacacttcaaaaattagatactattttatctggaaaaatggatgaagttattgatgcactcgttatgtatgatcagacaaagaaattagaatctctcaataactaa

SEQ ID NO: 38381 - DNA, 840 bp, Streptococcus pyogenes
atgaactatgctacattaatcagaacttatgaagataaactagaacaaatagatgaggatcgcgaaaatctcgcctatgtttttagagaaatcaaagaatggtcaagtctagatatgttgattcaccaaaatcaagctgtgactcctgaagatgctgttcttttggaacatattttctgttctctaagtcagcatttatctcctcaatatattacaggtaatgcttattttcgtgatttgaagcttgcagtcgacaagcgtgtattaattccaaggccagaaacagaagaattagttgacatgattttagctgaaaatcttgatgcaccgttgaatgttttagatattggtacaggtagtggagcgattgctatttctctcaaaaaagaaaggcctaactggcaagtaacggcatctgatatttctagagctgctcttgacttggcaaaagccaatgctgatgcttaccagcttgatataacgtttattgaatcagatgtttttagtctcatttcagaaacatttgatattattgtgtcaaatcctccctacatatcctacgaggataaggaagaagtcagtctaaatgttttgcaatcagagcctcatttggcactttttgctaaagaaaatggctatgctatttaccgtaagattattgaacaagctgacaattacttaactaaggaggggaagctttactttgaaattggttataagcaagctgaaggtataaaagatatgttacaagcctattttcctcaaagacatatacgagccgtaacggatatatttggcaaagaaaggatggtggttgttgattatggagtatctagctag

SEQ ID NO: 38382 - DNA, 1257 bp, Streptococcus pyogenes
atgatttttgataaaggtaatgttgaagactttgataaagagctttgggatgccattcatgctgaagaagaaagacaagaacatcatatcgaattgattgcatctgaaaacatggtttcaaaagctgtcatggcagctcaaggttctgttttaaccaataagtatgcagaaggctatccaggtaatcgctattatggtggaacagaatgtgtggatattgtcgaaacgcttgctattgaacgtgctaagaaacttttcggtgccgcatttgccaatgttcaagcccattccggaagtcaagccaatgcagcagcttatatggccttgattgaggctggtgacaccgtattaggaatggatttggctgcaggtggtcatctcacgcatggctctccagtaaatttttctggaaaaacctaccattttgtgggttactcagtagatactgatactgaaatgttaaattatgaggcgattttagaacaagcaaaggcggtccaaccaaagcttatcgttgcaggggcttcggcctactctagaagcattgattttgaaaagtttcgtgccattgctgatcacgtaggtgcttacttaatggtggacatggctcacatcgctggccttgtagcagcaggtgtgcacccgagtcctgtcccttatgcgcatattgtgacatcaacaacccataaaaccttacgtggtcctcgtggaggcttgatattaaccaatgacgaagctcttgctaaaaagattaattcggccgttttccctggtttacaaggaggacctctggaacacgtgattgctgccaaagcggttgccttcaaagaagccttggatccagcctttaaagactatgcacaagctattattgataatactgcggctatggcagcagtttttgcacaagatgatcgtttccgtctgatctcaggtggtacagataatcatgtctttttagtagatgtcactaaggttattgctaatggtaaactagcgcaaaatcttctggatgaggttaatattacccttaataaaaatgccattccttttgaaaccttgtcgccatttaaaacctcaggtattcgcattggttgtgctgccataaccagccgtggtatgggtgttaaagagagtcagaccattgcccgtcttatcatcaaagccttggttaatcatgatcaagaaactattcttgaagaagtccgtcaggaagtgcgtcagttaaccgatgccttcccactctataaaaagtaa

SEQ ID NO: 38383 - DNA, 2487 bp, Streptococcus pyogenes
atgcaagatcgaaatttaattgacgtcaatctgacaagtgaaatgaaaacgagtttcattgactatgccatgagtgtcattgtggcaagagctttgccagatgtgcgtgatggtctgaaacctgtgcatcgtcgtattctctatgggatgaatgaactcggtgtgacacctgataaaccgcataaaaaatctgctcgtattacgggtgatgtcatgggtaaatatcacccgcatggggattcttctatttatgaagctatggttcgtatggctcagtggtggagttatcgccatatgcttgttgatgggcatggcaattttggttctatggatggtgatggtgctgccgctcaacgttatactgaagcgcgcatgagtaaaattgcgcttgaattattaagggatatcaataaaaataccgttaattttcaagataactacgatggaagcgaaagagaaccagtagtattaccagctcgctttcctaatttattagtcaatggagcgacagggattgccgttgggatggcaactaacattccgcctcataatttggcagagtctattgatgctgtcaagatggtaatggaacatccagactgtacaacaagagagttgatggaagtgatccctggacctgactttccgactggtgcccttgttatggggcgctcaggtattcatagggcttatgatactggtaaaggttctatcgttttacgctctcgaacagaaattgaaacaactcaaacaggtcgggaacgtattgtggttactgaatttccctatggcgtcaataaaacgaaagtgcatgaacacattgttcgtttagcacaagaaaaaagactagaaggtattacagcagttcgtgacgaatctagccgtgaaggagtgcgttttgttatcgagattcgtcgagaggcatccgcgacagttatcttaaataacctctttaaattaacaagtcttcagacgaatttcagttttaatatgttggctattgaaaatggtgtgcctaaaatattgtcactcagacaaatcattgataattacattagtcatcaaaaagaagttattatacgtcgcacccgatttgataaagataaagctgaagccagagctcatattttagaaggcttactgattgcccttgatcatttagacgaagtgattgctattattcgtaacagcgagacagatgtcattgctcagacagaattgatgtcacgtttcgacttgtctgaacgccaaagccaagctattttggatatgcgtttgcgtcgtttgactggtttggaacgtgataagattcaatcagaatatgatgatttgttggccttgattgctgacttatctgatattttagccaaaccagaacgtattatcactatcatcaaagaagaaatggatgagatcaagcgtaaatacgctaacccacgccgtacagaattaatggtcggtgaagtcctttctctagaagatgaagatctaattgaagaagaagatgttttgattaccttgtcaaataaaggttatatcaagcgtcttgctcaagatgaatttcgtgcccagaagcgtggtggacgtggcgtccaaggaactggagtcaacaatgacgactttgtacgtgaattgatatcaacaagtacccatgatactttgctcttctttacgaattttgggcgtgtctatcggttgaaagcttacgaaattccagaatatggtcgtacagcaaaaggtcttccaattgttaatctattgaaattagaagatggtgaaaccattcaaactattatcaacgcacgtaaggaagaaacagcaggtaaatccttcttctttacaacgaaacaaggcattgtcaaacgtacagaagtttcagaatttaataatatccgtcaaaacggtctccgtgctcttaagttgaaagagggagatcagctgattaacgtccttttgacaagcggtcaggatgacattatcattggaactcattccggatattctgttcgttttaatgaagcaagcatccgcaacatgggccgatcagctacgggtgttcgcggggttaagcttcgtgaagatgatcgcgttgttggcgcgtcacgtattcaagataaccaagaagttcttgtaattaccgaaaatggctttggtaagagaacaagtgctacagactatcctacaaaaggtagggggggaaaaggaataaaaacagctaatattacccctaaaaatggtcaattggctggattggttaccgtagatggtacagaagatatcatggtgattacaaataaaggtgtcattattcgcacaaatgttgcaaatatttcgcaaacaggtcgtgctactttgggtgttaaaattatgaaactagatgctgatgctaagattgtaacatttaccttggttcagcctgaagacagtagtatcgctgaaatcaatactgatcgtgaaaatagtatttcaaaaaataaagataattaa

SEQ ID NO: 38384 - DNA, 750 bp, Streptococcus pyogenes
atggtaaaaaaacaaaagcgtcgaaaaataaaatccatgtcttgggcaagaaaactactaatagctgtacttttaattctaggtttagcattgctttttaacaaacctatccgaaatacattaattgctcgaaactctaataaatatcaagtaacgaaagtttcgaaaaaacaaatcaaaaagaataaagaggctaagtcaacatttgatttccaagccgtagagccagttagtacagagagtgtcttgcaagcacaaatggcggctcagcaacttcctgttatagggggcattgccataccagagcttggcattaatttaccaatttttaaaggtttaggaaatactgagcttatttatggcgcaggaacgatgaaagaagaacaagttatgggaggagaaaataattattctcttgccagtcatcatatttttggaattacaggttcatctcaaatgctcttttcgccgcttgaaagagcacaaaatgggatgtccatctatttaacagataaagaaaaaatttacgaatacatcataaaagatgttttcacggtagctcctgaacgcgttgatgttatcgatgatacagctggtctcaaagaagtgactttagtgacttgtacagatatcgaagcaacagaacgtattattgtcaaaggagaactaaaaacagaatacgattttgataaagcgcccgccgatgtattgaaagcttttaatcattcttataaccaagtatctacctag

SEQ ID NO: 38385 - DNA, 369 bp, Streptococcus pyogenes
atgactaaaaaaaatcatggcgttttttgggggttgttgcttggatcagcagcagctagcattgcttacttaagtttatcgtcttccaaaaaagatcaactcttgaaagatagtgctaaaaaaatagatgatctcaacgcttacttgcaagataaaagtaagcaagttctggatgcagtatcggaaaaagtccaagaatccaaagatgctgttgaagtttacggtggtatcgccgcagaaacagttgaagaatctttgggacaggctaaagaaaaggtagaaggaattggcgaagctactagccaaactatccaatctaaaatggaaaaactcactagcgataagacagatgctgatgatgaaaaatag

SEQ ID NO: 38386 - DNA, 651 bp, Streptococcus pyogenes
atgaaccaaacctttaaacaaagtttacccttatcttttagtgaggaagtagcaaacagcgtgacacacgctatcggagcatttgctatgctcattctacttcctatttcagccagctatgcttatcaaacttatgaccttaaagccgctattggtatctccatctttgtcatcagtctctttttgatgtttttgtcctctacgatttaccactccatggcttatggttcggttcacaaatacattctacgcattattgatcacagtatgatttatattgctatcgcaggaagttatacacctgttgccttatcccttgtttctggttggctaggctatatcattattgttttgcagtggggcattacgctttttgggattttatacaaaatttttgccaaacgtatcaatgaaaaattcagtttgatgctttatatcgttatgggctggctcgttgtgtttatcttgccagtcatcattcaaaaaactagtcttgcttttggtcttctcatgttatttggtggcttgtcttataccattggagcggtattttatgccaaaaaaagaccctacttccacatgatttggcatctctttattttattggcctctgccctccaatttatcgctatcactttctttatgctttaa

SEQ ID NO: 38387 - DNA, 849 bp, Streptococcus pyogenes
atggcaatgattcaatggtttcctgggcacatgtccaaagccagaagacaggttcaggaaaatgtaaagcatgttgactttgtaactattttagtggatgcacgcttaccactttctagtcaaaatcccatgcttacaaaaattgttggtgataaacctaaattaatgattttaaataaagctgacttggccgatgccactcgtacgaaagagtggaaggcttattatgaaagtcaaggtattaaaacattagccatcaattccaaagaacaatcaacggttaaaaaagtaacagaagcagccaaggaactcatggctgataaaattcaacgcttgcgagagcgcggcattcaaaaagaaaccttgcgaaccatgattattggcattccaaatgctggtaaatctaccttgatgaatcgcttggctggtaagaaaattgctgtagttggcaataaacctggtgtgactaaaggacaacaatggttgaagtccaataaggaattggaaattctagacactcctggtattttatggccaaaatttgaggacgaattggtgggcttaaaattagctttaacaggtgctatcaaggaccaattactaccaatggatgaagtgactatctttggcttgaattactttagggaatactaccctaatcgtttaaccaaacgttttaagaatattcctcttgaggaagaagctcctgaaatcattatgaccttgacacgccaacttggatttaaagacgattatgaccgtttttacactttattcgttaaggaagttcgtgatggtaaattaggtcaatacaccttagatcaggtgggagatatggatgccgactag

SEQ ID NO: 38388 - DNA, 792 bp, Streptococcus pyogenes
atgccgactagtattaaagctattaaagaaagcttagaggccgttactagcctcttggaccccctctttcaagaattggcaaccgacactaggtcaggcgtccaaaaagctctaaaaagccgacaaaaggttattcaggccgagttagcagaagaagaacgattagaagccatgctttcttatgaaaaagctctttataaaaaaggttataaagccattgcaggtattgatgaggtgggacgtggtcccttagcaggtcccgttgtggcagcttgtgtgattttacctaagtattgtaaaattaaaggccttaatgattctaaaaaaatccctaaagctaagcatgagaccatttatcaggcagtgaaagaaaaggctttggctatcggtatcggtattattgacaatcagcttattgatgaggtcaatatttatgaagcaaccaaactggccatgctagaagccattaaacagttggagggccaactcacacaaccagattatctcttgattgatgccatgacattggatattgctatttcgcagcagtctattcttaaaggcgatgccaattccttgtctattgcagcagcatcaattgtagctaaggtcaccagagatcagatgatggctaactatgatcgcatttttcctggttatgactttgctaaaaatgcaggctatggcaccaaagaacatttacagggattaaaagcttacggcataacgcctatccatcgtaaaagttttgaacctgttaaatccatgtgctgcgattcaactaatccttaa

SEQ ID NO: 38389 - DNA, 2130 bp, Streptococcus pyogenes
ttgggaacaaaaactacaactaagccaaaaacgggtactaaaaagtccaccactaaaaagaaatcaacagcgaaaaaaaatctcgttattgttgaatcacctgccaaagctaagactattgaaaaatatcttggacgcagttataaagttgttgcttcggtaggacatattcgtgacttaaaaaaatcgtctatgtctattgattttgataataattatgagccacaatacattaatatccgtggtaagggaccccttatcaattctttaaaaaaagaagccaaagctgctaaaaaagtttatttagctagtgacccggatcgtgagggagaggctatttcttggcatttgtcacatatcttaggacttgatcctcaagataataaccgagtggtttttaatgaaattacgaaagatgcagttaaacatgcctttgtggagcctcgtcagattgatatggacttggtagattctcaacaagcacgtcgtgttttggaccgtattgtgggatattccatttcaccaattctttggaaaaaggtcaaaaaaggactttcagcaggacgtgtccagtcggttgctttaaaactcatcattgaccgtgaaaatgacatcaaagcatttgttccaaaggaatactggtctattgatggtctttttaaaaaaggaactaaaaagtttcaagcgactttttacggtattaatggcaaaaaaacaaagcttgacaataacaacgatgtcaaagaggtattagcaaagctaacaaatgaagattttcttgtcagcaaggttgacaagaaagagcgacgtcgtaatgctcccttaccttacacaacatcatctcttcaacaagatgctgctaataaaatcaatttcagaacgcgtaaaaccatgatggtagcccaacaactgtatgaggggattcatttaggagaaaatggaactcaaggtttaattacctatatgcgtacggattctactcgtatcagtccagtagcacaaaacgatgctgctcaatttattatcaatcgctttggagctaattattcaaaacatggtaatcgtgtcaaaaataccagtggtgtccaagatgctcacgaggcgattcgtccatctagtgttaatcatacgccagactctattgccaaataccttaacaaggatcagttaaaactttatacgcttatttggaatcgttttgtggctagccaaatgacagcagctgtttttgataccgtaaaggtgaacttggagcaaaatggcgtgatttttgttgccaatggtagccaaatgaagtttgatggttacatggctgtttacaatgattccgataaaaacaaaatgttacctgagatggcagaaggagaaacggttaaaaaaatatcgacctctccagaacagcactttacgcagccaccagctcgttattctgaagcaactctaattaaaacgctagaagaaaatggtgttggacgtccatcaacttacgctccaaccttagaagtcattcaacgcagatactatgttaaattgtctgctaagcgctttgagccaactgagcttggggaaattgtcaacaagcttattgtcgaatttttcccagatattgtcgatgttgcctttactgccgagatggaaggtaagctagatcaagttgaaatcggagaagaacaatggcaacatgttatcgatcaattctatcaaccctttgtcaaagaattgaataaggctgagtctgaaattgaaaagattcaaatcaaagatgaaccagctggcttcgactgtgatgtttgtggtcacccaatggtcattaagttaggacgttttgggaaattttacgcgtgtagcaacttcccagagtgccgtaatacaaaagccatcactaaagaaattggtgttacttgtccggtttgtcataaaggacaagttatcgagcgtaaaaccaaaaaaaataggatattttatggttgtgatcagtatccagattgtgagtttatctcgtgggatttacctattggacgtgcttgccctaagtcaggtgactatcttattgagaaaaaagttcgtggtggcaaacaagtaatgtgtagcaatgagacctgtgattacaaggaagaaaaaattaaataa

SEQ ID NO: 38390 - DNA, 1347 bp, Streptococcus pyogenes
ttgtctcaatcaactgcaacttatattaatgttattggagctgggctagctggttctgaagctgcctatcagattgctaagcgcggtatccccgttaaattgtatgaaatgcgtggtgtcaaagcaacaccgcaacataaaaccactaattttgccgaattggtctgttccaactcatttcgtggtgatagcttaaccaatgcagtcggtcttctcaaagaagaaatgcggcgattagactccattattatgcgtaatggtgaagctaaccgcgtacctgctgggggagcaatggctgttgaccgtgaggggtatgcagagagtgtcactgcagagttggaaaatcatcctctcattgaggtcattcgtggtgaaattacagaaatccctgacgatgctatcacggttatcgcgacgggaccgctgacttcggatgccctggcagaaaaaattcacgcgctaaatggtggcgacggattctatttttacgatgcagcagcgcctatcattgataaatctaccattgatatgagcaaggtttaccttaaatctcgctacgataaaggcgaagctgcttacctcaactgccctatgaccaaagaagaattcatggctttccatgaagctctgacaaccgcagaagaagccccgctgaatgcctttgaaaaagaaaagtattttgaaggctgtatgccgattgaagttatggctaaacgtggcattaaaaccatgctttatggacctatgaaacccgttggattggaatatccagatgactatacaggtcctcgcgatggagaatttaaaacgccatatgccgtcgtgcaattgcgtcaagataatgcagctggaagcctttataatatcgttggtttccaaacccatctcaaatggggtgagcaaaaacgcgttttccaaatgattccagggcttgaaaatgctgagtttgtccgctacggcgtcatgcatcgcaattcctatatggattcaccaaatcttttaaccgaaaccttccaatctcggagcaatccaaaccttttctttgcaggtcagatgactggagttgaaggttatgtcgaatcagctgcttcaggtttagtagcaggaatcaatgctgctcgtttgttcaaaagagaagaagcacttatttttcctcagacaacagctattgggagtttgcctcattatgtgactcatgccgacagtaagcatttccaaccaatgaacgtcaactttggcatcatcaaagagttagaaggcccacgcattcgtgacaaaaaagaacgttatgaagctattgctagtcgtgctttggcagatttagacacctgcttagcgtcgctttaa

SEQ ID NO: 38391 - DNA, 1407 bp, Streptococcus pyogenes
ttgattcagtttggaggttttagcatgcagcagcaagtcgcaataacagaaacagttttacgggacggtcatcaaagtttgatggcaacgcgtttatctattgaagatatgcttcctgtccttaccatcttagacaagattggttattattccctagagtgttggggaggagcaacctttgatgcctgtattcgttttttgaacgaagacccttgggaaaggctgcgcacgttaaaaaaaggcttacctaatacccgtttacaaatgttattaagaggccaaaaccttttaggctaccgtcattatgcagatgacatcgttgacaaattcattagtttatcagctcaaaatgggattgatgttttccgcatttttgatgccctaaatgacccacgaaatatccagcaagccttaagagctgtgaaaaagacgggtaaagaggctcaactgtgtattgcctatacaactagcccagtgcacacgcttaactattacctttctttagtgaaagaattggttgagatgggagctgattctatctgcatcaaagatatggctggtattctaactcccaaagcggctaaagagttggtatctggtatcaaagccatgactaacttacctcttattgtgcatacccatgcaactagtggcatttctcagatgacctatctagcagcagtagaagctggtgctgatagaattgatacggctttgtcaccttttagcgaaggaacttcacaacctgctacagaatccatgtatttagccttaaaagaagcaagttatgatatcacattagatgaaacgctactggaacaggctgctaatcaccttcgacaagcccgtcaaaagtacttagcagatggcattctggatcccagtcttctctttccagacccaaggacactacaataccaagttcctggaggcatgttgtctaatatgctatctcagctgaaacaagccaatgccgaatcaaaattagaagaagttttagcagaagttcctcgggtaagaaaagacttgggttatcctcccttagtaacaccgcttagccaaatggtcgggactcaagctgctatgaatgtgattttaggaaaaccttaccagatggtgtctaaggaaattaaacaatacttggcaggcgactatggcaaaacaccagcaccagtcaacgaagacttaaaacgaagtcaaattggctcagctcctgtcaccacaaatcgtcctgcagatcaactaagtcctgaattcgaggtgttaaaagcagaagtagcagatttagcccaaacggacgaagatgtgctgacttatgccctcttcccaagcgtagcaaaaccgtttttaacaaccaaataccaaactgatgacgtcattaaagtgactgcctttatcaaagcataa

SEQ ID NO: 38392 - DNA, 888 bp, Streptococcus pyogenes
atggaacgtttaagaagaacaatgatgtttgtgcctggtgccaatgcagccatgcttcgagatgctcctttatttggcgctgattcaatcatgtttgacttggaagattctgtttcactcaaagaaaaagacacctctagagctctcgttcattttgcgcttaaaacttttgattattcaagcgttgaaacggttgttcgtgtgaatggtcttgattcttgtggggctttagacatcgaagctgttgttttggcaggtgtcaacgtgattcgtcttccaaaaacagagactgctcaagatattattgatgtggaggctgttattgaacgtgtcgaacgcgagaacagcattgaagttggtcgcacacgtatgatggcagccattgaatcagccgaaggtgtcctaaatgctcgtgagattgccaaagcttctaagcgcttgattggtattgctcttggagcagaagactatgtcacgaatatgaaaacgcgtcgttacccagatggtcaagaattattctttgctcgtagcatgattttacacgctgctcgtgctgctggaattgctgccattgatactgtttattctgatgtcaataataccgaagggttccaaaacgaagttcgcatgatcaaacagttaggatttgatggtaaatcggtcatcaaccctcgccaaattcctctggtcaatgagatttataccccaacaaaaaaagaaattgaccatgccaaacaagtcatctgggcaattcgtgaagctgaaagcaaaggctctggcgttatttccttaaatggaaaaatggttgataaaccaatcgttgaacgtgcagaacgtgtgattgccctagcaacagcagcaggtgttttatctgaggaggatatttaa

SEQ ID NO: 38393 - DNA, 1533 bp, Streptococcus pyogenes
atggtaacaaataaactcggtagagatattcctcaaccatacgccgaccaatacggtgtctttgaaggagaactcgcaaatatcaaacagtatgacgaatcaagtcgccgtattaaaccagttaagcctggagattctaaattactaggatctgttcgtgaagcgattgaaaaaacaggtttaacagatggcatgaccatttctttccaccaccatttccgtgaaggggatttcattatgaatatggtcttggaggaaattgccaaaatgggcattaaaaacctgtctattgccccaagttccatcgctaatgtacatgagcctttgattgatcacatcaaaaatggtgtggtcactaacatcacttcatctggtcttcgtgacaaagtaggggcagccatctcagaaggactaatggaaaatcctgtggttattcgctcccatggtggtcgcgctcgtgccattgctagtggggatatccatattgatgttgcctttctgggcgccccaagttcagatgcttacggaaatgttaatgggacaaaagggaaagcaacctgtggttctttgggctatgccatgattgatgccaaatatgcggatcaggtggttatcttgacagataatttggttccttatcctaataccccaatcagcattcctcaaacagatgttgactatgtggtaacagtggatgctatcggagatcctcaaggaatcgccaaaggggcaactcgttttacgaaaaatcctaaagaactcttaattgcagaatacgccgctaaagtaatcaccaactctccttattttaaagaaggattctctttccaaactggaacaggtggcgcttctttggcagtaacccgtttcatgcgtgaagctatgattaaagaaaatatcaaagctagctttgctcttggtggtattaccaatgctatggtggagttgctcgaagaagaactggttgaaaaaattcttgatgtccaagactttgatcacccatcagctgtttctcttggtaagcatgctgaacattatgaaattgatgccaacatgtatgcctcacctttgagcaagggtgctgttatcaatcaattagacacttgtattttatcagcccttgaagttgatactaacttcaatgttaatgtgatgacaggatctgacggcgtgattcgtggcgcttctggaggacactgcgacactgcctttgcggctaagatgagtttggttatttcaccacttatccgcggacgcatcccaacttttgtagatgaggttaatacggtcattacaccaggaacaagtgtcgatgtgatcgtcacagaagtgggaattgccattaacccaaatcgtcaagacttagtagaccatttcaaatccctcaatgtgccacaatttagtattgaggagctaaaagagaaggcttacgccatcgttggcacacctgagcgtattcaatatggtgataaggttgttgctcttattgaataccgtgacggtagcctcatggatgtggtttacaatgtgtaa

SEQ ID NO: 38394 - DNA, 1071 bp, Streptococcus pyogenes
atgagacgcgaattattactagaaaaaattgaaacctacaaggctatcatgccctggtatgttttagattattaccaatccaaattagctgttccatacagctttaccaccttatatgagtatttaaaagaatacaaacgcttttttgattggctgatggatgctgatttaacgcaggcgccaaagattgctgatattgacttgagcacgcttgagcaccttaccaagaaggatttagaggcctttgtgctttatttgcgggaacgaccttctctcaacacctattccaccaaagaggggctttctcaaaccactattaatcggaccttgtctgccttatcaagcctttacaagtacttgactgaagaggttgaaaatgaccaaggggagccttatttttatcggaatgttatgaaaaaagtgtcaacaaaaaagaaaaaagaaaccctggcttccagagcggaaaatattaagcagaaactgtttttaggtgatgaaactctagctttcttggattatgtggataaggaatatgagcaaaaattgtctaatcgtgccaaatcttctttccgtaaaaataaggagagggatttggctattattgctctactacttgcttctggtgttcgtttgtctgaagcagtgaatcttgatttaaaagatgtcaatctaaatatgatgattatcgaagttattcgcaaaggcggaaaacgtgattcagtcaatgtagcaggttttgcgaaaggttatttggagtcttatttagctgttcgtcagagacgttacaaggctgaaaaacaggatcttgctttctttttaacagaataccgtggcgttccaaatcgaatggatgcttctagtatagaaaagatggttggcaagtactctgaggattttaaaattcgtgtgactcctcacaaattgcgtcatacgctagcgacaagactatatgatgctactaaatctcaggtgttagttagtcatcaattaggccattcctctactcaagtcacggatctttatacccatattgtcaatgatgagcaaaaaaatgctttagataacctttaa

SEQ ID NO: 38395 - DNA, 1560 bp, Streptococcus pyogenes
atggcttttgaaagcttaacccaacgtttgcaagatgtgtttaaacacattcgcggtaaaaagaaattatcagaatcagatgttcaagaagtgacaaaagagattcgtctagctcttttagaagccgatgtcgctttaccagttgttaaaacctttattaagcgcgtacgtgagcgcgctattggccatgagattattgatactcttgatccaacacaacaaattcttaagattgttaatgaagaattaacgagtattttaggctcagaaactgcagagattgataaatctccaaaaattccaactattatcatgatggtcggtttgcaaggggctggtaaaacaacttttgcaggaaaactcgctaataaattaattaaagaagaaaacgcgcgaccactgatgattgctgccgatatttaccgtccagcggccattgatcagttaaaaacactggggcaacaaatcaatgtacctgtttttgatatggggacagaccactcagcagtcgatattgtcagaaaaggtttggaacaagctcgtgaaaaccacaatgactatgtcttgattgatactgcgggtcgcttgcaaattgatgaaaaactgatgggagagctgcgcgatgtcaaggctttagcacaaccaaatgaaattcttttggttgtagatagcatgattggtcaagaagctgccaatgtagcctacgagtttaatcatcagttgagcatcacaggggttgtgttaacaaagattgatggtgatacacgtggaggtgcggcgctatctgtccgtgaaatcactgggaaaccaattaaatttacaggtattggtgaaaaaatcacagatattgaaacatttcacccagaccgcatgtccagtcggattttgggaatgggggatttgcttaccctcattgaaaaagctagccaggaatatgatgagaaaaaatccttagagttagctgaaaaaatgcgtgaaaacacctttgatttcaatgattttattgaacagttagatcaagtgcaaaatatggggcctatggaagacctcttgaaaatgattccaggaatggctggtaacccagctttggccaatatcaaagttgacgaaaaccaaattgctcgcaaacgtgctattgtctcttcaatgacacccgctgaacgtgaaaatcctgacttactaaacccgagtcgtcgccgtcgtattgcagctggttccgggaacagctttgtagataataaatttatcaaagactttaaccaagccaaaagcatgatgcaaggggttatgtcgggcgatatgtctaaaatgatgaaagatatgggtattaatcccaataatcttcctaaaaacatgcctgctggtatgccagatatgtcttccttagaaggaatgatgggacaaggtggtatgcctgatttatctggccttggtggtgatatggatatgagtcaactatttggtaaagggtttaaaggaaaaattggccaatttgccatgaaacaggccatgaaacggcaggctaacaaactaaaaaaagcaaagaaaaaacgaaaataa

SEQ ID NO: 38396 - DNA, 342 bp, Streptococcus pyogenes
atgaacattatggaaattgaaaaaacaaacaggatgaatgccctttttgaattttatgcagctttgctaacagataaacaaatgaattatattgaactgtattatgccgatgattatagcttagctgagattgctgatgaatttggtgtcagtcgtcaggctgtctatgataatattaagcgtacggaaaaaattttagagacttatgagatgaaacttcatatgtattcggattatgttgttcgaagtgaaatctttgacgacatgattgctcactaccctcatgatgagtatttgcaagaaaaaatttccattctaaccagtattgacaatagagagtaa

SEQ ID NO: 38397 - DNA, 726 bp, Streptococcus pyogenes
atgaataaccgacttgaggagtgtggcatgttaccagcttatataaaaattcatgatgcaattaaaaaagacattgatctgggcatctggccaattggtagtcgcttaccaagtgaacgacatttagcggaacatttcaccgttagtcgaatgactctacggcaggctattacattactagtagaagaagggattcttgaaaggcggataggaagtggtacttatgttgccagtcatcgtgttcaagaaaaaatgcgaggaacaacaagtttcacagaaattatacgctcccaaggacgacaaccctcctctaaattattatcctatcaaaagcaattagctagtgataccgaagttaaagaattgaacttagacaaaacagacttggtcattcgaatggaacgtatccgctatgcagacagtgtccctttggtgtacgaaattgcttcaatcccagaaaaatttataaaaacggttaaacgagctgatattacagaacacttttttcactcattgatagcaaatggttacgagattggtaaaagtaaacagacaatctacgctaagctagcaagtgagcgtgtagcctcctacttggaagttgctaaaggacatgccattttggctctaactcaggtgtcttactttacagacggcaaaccttttgagtatgtccgcagtcagtatatcggtgaccgttttgaattttacttagaaaataattag

SEQ ID NO: 38398 - DNA, 1563 bp, Streptococcus pyogenes
atgactgaaatttcaattttgaatgatgttcaaaaaattatcgttcttgattatggtagccagtacaatcagcttattgctagacgtattcgagagtttggtgttttctccgaactaaaaagccataaaatcaccgctcaagaacttcgtgagatcaatcccataggtatcgttttatcaggagggcctaactctgtttacgctgataacgcctttggcattgaccctgaaatctttgaactagggattccgattcttggtatctgttacggtatgcaattaatcacccataaattaggtggtaaagttgttcctgctggacaagctggtaatcgtgaatacggtcagtcaacccttcatcttcgtgaaacgtcaaaattattttcaggcacacctcaagaacaactcgttttgatgagccatggtgatgctgttactgaaattccagaaggtttccaccttgttggagactcaaatgactgtccctatgcagctattgaaaatactgagaaaaacctttacggtattcagttccacccagaagtgagacactctgtttatggaaatgacattcttaaaaactttgctatatcaatttgtggcgcgcgtggtgattggtcaatggataattttattgacatggaaattgctaaaattcgtgaaactgtaggcgatcgtaaagttcttctaggtctttctggtggagttgattcttcagttgttggtgttctacttcaaaaagctatcggtgaccaattaacttgtattttcgttgatcacggtcttcttcgtaaagacgagggcgatcaagttatgggaatgcttgggggcaaatttggcctaaatattatccgtgtggatgcttcaaaacgtttcttagaccttcttgcagacgttgaagatcctgagaaaaaacgtaaaattattggtaatgaatttgtctatgtttttgatgatgaagccagcaaattaaaaggtgttgacttccttgcccaaggaacactttatactgatatcattgagtcaggaacagaaactgctcaaaccatcaaatcacatcacaatgtgggtggtctccccgaagacatgcagtttgaattgattgagcccttaaacactcttttcaaagatgaagttcgagcgcttggaatcgctcttggaatgcctgaagaaattgtttggcgccaaccatttccaggtcctggacttgctatccgtgtcatgggagcaattactgaagaaaaacttgaaaccgttcgcgaatcagacgctatccttcgtgaagaaattgctaaggctggacttgatcgtgacgtgtggcaatactttacagttaacacaggtgtccgttctgtaggcgtcatgggagatggtcgtacttatgattataccatcgccattcgtgctattacgtctattgatggtatgacagctgactttgctcaacttccttgggatgtcttgaaaaaaatctcaacacgtatcgtaaatgaagttgaccacgttaaccgtatcgtctacgacatcacaagtaaaccacccgcaacagttgaatgggaataa

SEQ ID NO: 38399 - DNA, 1224 bp, Streptococcus pyogenes
atgacgaatttaacgttttatgcaaaaatcggtatttcagaagaagagcatgactcttttgttaaagaacatcagcaaattagcgttttacaaggtagtgattgggcaaaaatcaaaaatcaatggcagaatgagcgaattggtatctataaagaggaaaagcaggttgcctctttatcacttttgattaagctattgccacttggaagaagcattatttatattccaagagggccagtcatggattatcttgaccgtgatttggtggcatttaccatgaaaacactaaaggattatggtaaaactaaaaaggccctctttatcaaatatgatccagctatcctgttaaaacaatacgcactgggacaggaagaagaagaaaaacctttagctttagcagctattaagaatctccaagaagctggtgttcattggactggtttaacaatggagattgcagatagtatccaacctcgtttccaagctaatatttacactcaagaaaaccttgagatgcaatttcctaagcataccagacgtttaataaaagatgctaagcagcgtggtgtaaaaacatatcgtgtcagtcaatcagaacttcacaaattttccaagattgtctccttaacagaaaaacgtaaaaatatttctttgcgtaacgaagcttactttcaaaagttgatgactacttatggggataaggcctacttacatctagcaaaagtgaatattcctcaaaaactagatcaataccgccagcaattaattcttattaaccaagatattactcgcacccaagctcatcaaaagaagcgtttaaaaaaattagaagatcaaaaagcttctttagaacgttatataactgaatttgaaggctttacagaccaatatcctgaggaagttgttgtagcaggtatattatctatttcttatggaaatgttatggaaatgctttatgctgggatgaatgatgattttaagaagttttatcctcagtatctgctgtatcctaatgtttttcaggatgcttatcaagatggtattatttgggctaacatgggaggagtagaaggctcgcttgatgatggacttaccaaatttaaggccaactttgctccgacaatagaagaatttataggagaatttaatctccctgtcagcccactttatcatattgctaataccatgtacaaaatacgaaaacagttaaagaataaacattaa

SEQ ID NO: 38400 - DNA, 813 bp, Streptococcus pyogenes
atgcctagttcatttgatttattaggggaaatgattggtctgttgcaaacagagcagcttactagttcttgggcctgtcccttgcctaatgctttaacaaagcgacaagacttgtggcgggcgctcattaaccagcgccctgctttgcccttatcaaaagattacttgaatctggaagatgcttatctagatgattggcgtgcttcttttgttcctgtatcagtcaaggattgccaaaaaactaattataccagtctttttctttaccatggggatattaggtatcttgctgtggatgctattgtcaacgctgctaatagtgagttattgggatgttttagtcctaaccatggctgtattgataatgcgattcatacgtttgccggaagtcgtttacgcttagcttgtcaggcaatcatgactgaacaaggccgtaaggaagccattggacaagcaaagcttaccagtgcttatcatctaccagcctcttatattattcataccgtagggccaagaattaccaaaggacaccacgtttctccgattcgagctgatttgttagcacgttgttatcgttctagtcttgatttggcggttaaagcaggattgactagcctagctttttgctctatttcaacaggagaatttggctttcctaaaaaagaagccgctcagattgctattaagacagttttaaaatggcaagcagaacatccagaatctaagaccttaactaccatttttaatacctttacatcagaagacaaggccttatacgacacttatttgcaaaaggagaataactgtgagtaa

SEQ ID NO: 38401 - DNA, 333 bp, Streptococcus pyogenes
atgaaaaaaattgcaaattacttattaattgagaaaacagatgaccgctataccattagcatgacaccagaattacaagacgatattggtactattggttacgctgaatttacggataacgaccaccttgccgttgatgacattatcttaaatctagaggcttctaagactgtcatgtctgtcttgtcaccattggctggggcagttgttgagcgcaatgaggcagccacactaacaccaacccttttgaattcagaaaaagctgaggaaaattggattgttgtgctaacagatgttgatcaagcagcttttgatgccctagaagatgcctag

SEQ ID NO: 38402 - DNA, 999 bp, Streptococcus pyogenes
atgaaagtcagtattcttgattatggggtgattgataaagaaaaaacaccccaagaagctttattagaaacgcgctgcttagcacaagtagccgacaaacttggttttcatcgtttttgggtagcagagcatcataatatttatgcctttgcaataagcagtccagagctgttgatgatgcatttagcagatcataccaaacagattcggataggttcaggaggtattatgcctctacattatagtagctttaagattgcagaatggataatgactttagaggccttgcaccctaatcggattgatttaggtattggcaactctttaggaactacgttagttcaaagagctctatcaagtatccattgcaaagacagctatagtcaggttgtcacagaattataccagtatcttaatcctgatcatttgtcaccactaccgatttttgttaaccctaggggtaatacttaccctcagatttggacgctaagcaatagtttggagacagcagaactggctggtcaattaggtttaggctatacctttggtattttcccctatataccaaaagatcctataacagaagctaaaagagtatcggcacattatagaaaggcttttaggccttcaaagctattaaaaatccccaagttaatattagcagtttttattgtcctttctgataccgacgagaaagcagaagctttggctaaaccgttggacatttggatgcttggtcagcaagattttaatgaatttaagacctaccctgatgttgaggaggctagaaactatcacttaacagagaaacaaagagaagccattgcagcaaatcgtagtcgcatggttattggatcacctcacacagtcaagaaacaattggataggctgatagaagcttgtcaagctgacgaattattagccatccccttagttcctgaatttgccaatagacaacgaaccttagagctgctagcagacttatacgtgaccatttaa

SEQ ID NO: 38403 - DNA, 1200 bp, Streptococcus pyogenes
atgaaagaaagatttagtcctttatttgagcctttgactttgccaaatgggagtcaattggataatcgctttgttttgtctcctatggtgaccaactcatctacaaaagacggttatgtcacccaagatgatgtatcctatgctttgagacgagcagcttctgcccctctacaaattacaggagcggcctatgtggatccttatggtcaattgtttgaatatggttttagtgttacaaaagatgccgatatttctggcttgaaagagctagctcaagcgatgaaggcaaagggagctaaagctgtcttacaactgacccacgctggccggtttgctagccatgccttgactaaatatggctttgtctatgggcctagttacatgcagttgagatctccccaacctcatgaagtcaaacctttaacaggtcagcaaatagaggaattgattgcagcttacgctcaggccactcggcgggcaattcaagcaggctttgatggcgtggaagtatcttcggcgcagcgcttattgattcaaacgttcttttcgactttttcgaacaagaggacagatagttatggttgtcaaacactttttaatcgctctaagttaactctagctgttttgcaagctgttcaacaggtgattaaacaagaagctcctgatgggtttatttttggatttcgtgctacaccagaagaaactaggggaaatgatattggttatagtattgacgagtttttgcagttgatggattgggtacttaatgttgcaaaacttgattatttagcgatagcaagttggggccgtcatgtatttcgaaatactgttcgttctcctggcccttattatggaaggcgagttaatcaggtagttagagattatttaagaaataagctacctgttatggctacagggggaatgaacacacctgacaaagctattgaagcactagctcatgctgattttattggagtatctacaccttttgtcgtggatccagaatttgctcataaaatcaaagaagggtgtgaagagagtattcatttaaggattcgacctgctgatttgaaaagtttagcgattcctcaggcttctttcaaagatattgtacctttgatggactacggggaatcattgcctaaagaatcaagaactttatttcgtagtcttactcacaattataaggagattaaatga

SEQ ID NO: 38404 - DNA, 852 bp, Streptococcus pyogenes
gtgaaaggaagaattgtgataactattagagatttagcgtcactgccgatttttgtttacggtgatggaaataaaaaagttccaggagctttgagtccttttgtgtggacagaggtgtttttaaaaactatcaatcaagaacctaatcaactgatcttacatatttggccgatgacaagaacagttatattaggaatgttagatagacagcttccctactttgagctggctaaaacagagattggcaataatggttatgttcctgttactcgtaatattggcggtttggctgttgtcgctgatgatgggattttgaatttttcgcttgttattccagaccatttttcggaatctatcagtattagtaatgcttatttaataatggttgatgtcattagagagagtttttcggattattatcagcgtattgaatatcacgaaattaaaaattcttattgccctggtaattttgatcttagtattgcaggccgcaagtttgcaggtatcgcccagcgtcgtatcaaaaagggaattgttgtgtctatttacttgagcgtttgtggggatcaagcagcgcgtggtcaactcatcaaggatttttatgaggccggaacacaaggagaagttaccaaggttaattaccctcaaattgatccagaatgcatggcaactctttcagaactccttgagacgccttttacagtggcagaagtccttgaacgtcttcgattgaccttgcgacagcttggcttttccctcacggaaaaaagtccagatcaagccttactgactaattttgatgctgtctatgaacggatgcagctagaagtcgtcagaaaggaaggcaaatga

SEQ ID NO: 38405 - DNA, 1719 bp, Streptococcus pyogenes
atgacttacacagaaaattttcaaaaatggttagattttgagcagcttcctgactatcttcgtcaagaattactatcaatggatgaaaaaacaaaagaagatgctttttacacaaacttagaatttggtactgctggtatgcgtggttatattggtgctggtacaaatcgtattaatatttatgttgtccgtcaagcaaccgaaggattagcaaaattaatcgaaactaagggagaggaagctaaaaaacgtggtgtagctatcgcttatgattcgcgccacttctctccagaatttgcttttgagtctgcacaggtcttggcacagcatggaattaaatcttacgtatttgaagctcttcgtccaacaccagaactctcttttgctgttcgccatttaaatgcctatgctggtattatggttactgcaagccacaatccagcacctttcaatggttataaagtctatggacaagacggaggtcaactaccaccagctgatgctgatgcactaacagactttatccgcgctattgaaaatccatttgcagttgaacttgctgatttagatgaaaacaaatcatcaggtcttattcaagttatcggtgaagatgttgatatggaataccttagagaggttaaagatgttaatatcaatcaagatttaatcaataactttggaaaagacatgaaaattgtctatactcctctccacggaactggtgagatgttgacacgccgtgcccttgctcaagccggttttgaatctgttgttgtagtcgaatcacaagctaaggcagatccagacttttctactgttaaatcgcctaaccctgaaagccaagctgcctttgctcttgctgaagaactcggacgagaagttgaggcagatgtcttagtagctactgatcctgatgcagaccgcctaggcgttgaaattcgccaaccagatggttcttataaaaacctttctggaaatcaaattggagcgattattgcgaaatacatcctggaagctcataaaacagcaggaacacttccagaaaatgctgctctcgctaaatcaatcgtatcaacagaattagtaacaaaaattgccgaaagttatggcgctacaatgtttaacgttttaactggattcaaattcatcgctgagaaaattcaagagtttgaagaaaaacataaccacacctatatgtttggttttgaagaaagcttcggatatcttattaaaccatttgtccgtgataaagacgctattcaagcagttcttttggttgctgagatcgcagcttattaccgttcgcgtggtttaacacttgcagatggtattgatgaaatttacaaagaatatggctattttgctgaaaaaacgatttcagtaacactttcaggtgtggatggagctgctgaaattaagaagattatggacaaattccgtgaaaatggtccaaaacaatttaacaatactgatattgtattattagaagatttccaaaaacaaaccgctactaaaaatgatggaacaatatctaacttaacaactcctccaagtaatgttttgaagtacacgttagctgatgattcatggattgcagttcgcccttcaggaactgaaccaaaaatcaagttctatattgccacaataggtgatactcttgacatcgctcaagaaaaaattgctaacattgaaacagaaatcaatacctttgttggctaa

SEQ ID NO: 38406 - DNA, 1065 bp, Streptococcus pyogenes
atgtctaaaaatgcgcaaaaaattgctgtaccattgatttctgtcttgctaggatttttacttggcgctattattatggttatctttggttatgatcctatctgggggtatgaaggtttattccaaattgcctttggtagtgttaaaaatattggagaaatattccgttcaatggggccattgattttaatagcgcttggctttactgttgctagccgtgcaggcttctttaacgttggtttgtctggacaggctttagctggatggatttcagcaggttggtttgcactcttaaatccagatatgcctcgtccattattgattcttatgacagctcttatcggaatgattgctggtggtattgctggagctattccagggatacttcgtgcttatcttggtacaagtgaagttatcgttacgattatgatgaactacatcattttatatgtcggaaatgctattgttcaacgtggttatcctgagagtgtcaaacaaagtattgattcaactattcaagttagtgataatgctagttatcaaacgcattggttatcagccctaactaataactctcgtattaatattggtattttctttgccattattgccattgccctaatctggttcttgcttaacaaaactactttaggttttgagattcgttcagttggtctcaacccacatgcttcagaatacgcagggatgtcatcaaaacgtactatcattttatcaatgattatctctggagctcttgcaggtcttggaggagtagttgaaggtctaggaacctttgaaaatgtttttgtacaaggatcttctttagcagttggttttgacggtatggcagttagcttattagcagcaaattcaccgcttggaatatttttctcatcattcctatttggtgtcttaaatattggtgctccaggaatgaatattgcaggcattccaccagaacttgttaaagtagtaactgcatcaatcattttctttgttggttcacattacctcattgaacgttacattattcgccctaaaaaattagtgaaaggtggtaaataa

SEQ ID NO: 38407 - DNA, 594 bp, Streptococcus pyogenes
atgacaaagatgtattatgatgaaaatccagatagcctacacgatattcatgaagtaaaagtagagctgcttaatcatccctttacttttttgacggattcaggtgtcttttcaaagaaaatggttgatttcggtagccaagtattattaaagacactaaatttcaaggagaacgaacgtgtactggacttaggttgcggctatggccctcttgggattagtctagccaaggttcaaagggtagacgcaaccttagtggacatcaataatcgtgctcttgatttagctagaaaaaatgcaactaataaccaagtggcagtaactatttttcaatcaaatatttatgaaaatattagtggccattttgagcatattattagtaatcctcctattagagcaggaaagagagtagttcatagtattattgaaaaaagcatagattttttagtggttaatggtgacttaacgattgtgattcaaaaaaaacaaggagctcctagcgctaaagcaaaaatggcaactatttttggtaatgttgagatattaaggaaagataaaggttattatgtattaagaagtataaagcaagcctaa

SEQ ID NO: 38408 - DNA, 921 bp, Streptococcus pyogenes
atgtcaaatgaatttattaactttgaaaaaatttctagagagtcttggaaaacattacatcaaaaggcaaaagctctcctcacacaagaggaacttaaaagtattactagcttaaatgataacatcagtattaacgatgtcattgatatctaccttccattaattaatctgatccaggtttacaaaattgcgcaagaaaatctttctttttctaaaagcctttttctaaaaaaagacattcaattaaggccttttattattggaatttctggttcagtagctgttggtaaatcaacaactagtcgtcttttacaacttttattatcacgaacgcaccccaatagtcaagtcgaactggtaacgactgatggttttttatatcctaatcagtttcttattgaacaaggactgttaaatcgtaaaggatttccagaatcttataacatggaacttctcttagattttctagattccatcaaaaatggtcaaactgcttttgcacccgtctattctcatgatatttacgatattatcccaaatcaaaaacaatcatttaataaccctgacttccttatcgtcgaaggtattaacgtttttcaaaatcaacaaaacaatcgtttatatatgagtgattactttgatttttctatttatattgatgcagacagcagtcacatcgaaacctggtacattgaacggtttctaagcattttaaaattagcaaaacgtgaccctcataattattatgcccaatatgcacaattacctcgatctgaggctatagcatttgcgcgcaacgtttggaaaaccgttaatttagaaaatcttgaaaaattcattgaacctacacgtaaccgtgctgaattaattttacataaaagtgctgatcataaaattgatgaaatttacctcaaaaagtga

SEQ ID NO: 38409 - DNA, 234 bp, Streptococcus pyogenes
ttggcaaatattaaatcagctattaaacgcgctgaacttaacgttaaagcaaacgaaaaaaactcagcacaaaaatcagctatgcgtactgctatcaaagcatttgaagctaacccatctgaagagcttttccgcgctgcttcttcaagcatcgataaagctgaatcaaaaggtttgattcacaaaaacaaagcaagccgcgataaagcacgccttgctgcaaaacttggctaa

SEQ ID NO: 38410 - DNA, 2538 bp, Streptococcus pyogenes
atgaagacagtagaacatctcatcgaaacatttgtgcctgaaaattataacatctttttagatattaatcgtcagactaaaacatttacggggaatgttgcgattaatggtgaagctttagataatcatgtggctttccaccaaaaagatttggacattaagtctattttgctcgataatgaagctgttatttatcaagtggataacgacaatgaagttgtgcgtgttgaattacctgaaacaggaatgatgacgcttgtcattgaattttcaggtagcattacagataatatgacaggtatttacccttcatattacactaaaaatggtgagaaaaaagaagtcatttcaactcagtttgaaagccattttgcacgtgaagctttcccatgtatcgatgaaccacaagcaaaagctacttttgatttaagcttgacctttgatcaagaaattggtgagatagcgttatcgaatatgccagaagtcaatattgaccgtcgcgaggagactggtctttggacatttgatacgacactaagaatgtcatcttacttgctagcgtttgcgctaggagaacttcatggaaagactgtagaaagcaaaaaaggaacaactgttggtgtgtatgcgacaacagcgcatcctcttagctcgcttgatttttcattggatattgcagttcgtgttatcaacttttatgaagactattttggagtacattacccaatcccgcaatctcttaatattgcgcttccagatttttcatctggtgctatggaaaattggggtttaatcacttatcgtgaaatttatttattagtagatgaaaattcgactgttcaaagccgacaacaagttgcacttgtaatcgcccacgagatagcacaccaatggtttggaaacttggttacaatgaaatggtgggacgatctgtggttaaatgagagttttgccaacatgatggaatatgtctctatcgaggctattgagccgtcttggaaaataatagaagatttccaaacaggcggtattcctcttgctttaaaacgtgatgctactgatggtgttcaatcagtgcatgttgaagtcaatcatccagatgagataaatacattgtttgatcctgctattgtctatgcaaaaggtagtcgtttgatgcatatgttacgccgttttattggtgatcgtgattttgccattggcttacatcactactttgaaaaatatcaatatcgaaatactgtcgggcgtgatttatggaatattttatcagatacttcaggcaaagacgtagctgcttttatggatgcttggcttgaacaaccaggttatccagttttaacagctcgccttgaaaacgatcaattgattttgagtcaaaaacaattttttattggaaaaggtgaagaaaaaggtcgcctttggccgattcctttaaacactaattggcatggccttcctgaaactttgacagaggcagaaatggtcattccaaactttagtcaattggcagcagaaaatgaaggagctctacgtttcaatattgataatacagctcattacattacagactaccaaggatcattattagatgccttagtcactgaacttgcccaacttgataatacttctgctttacaagttattcaagaacgtcgtttattggcagatagtggcttgatttcctatgctgaattggttgacttaattgctcaattggacgattctaagtcttatatggtagcagaagcggttcaacaagtggtctctggtttgaaacgcttcattgatgaaggaagcttagcagaaaaatcctttaatcgcttggtaaccaccatctatcaagaagactttaatcagcatggttttgagaaaaaagctgacgaatcagatgaagatgagatggtacgtcaggttgccttgggccgcttgtggctagcagaaaatcagacgattattgacggattgagaactatttttgaagcatatcaaaacaatattgcaagtattccagcagctgttcgtcgcttggttttagccaaccaaatgaaatattttgaaacagatagcttggttgatatttattttgagacttatgtagcaactactgataataatttacgcagtgatttaacggttgcttttagtcaaacaaaacaaccaactactattagacgtattcttgttagtttaaaagataaagatattattaaacctcaggatttatcttattggtacaatgctttgcttggacaaagctttactcaagatatcatttgggaatgggctagagaaaattgggattggattaaatctgcacttggtggagatatgagctttgataaatttgttatttatccagcaagtaactttaaaacaccaaaacatctagcagaatataaatctttctttgaacctaagctagatgatatggctattagccgtaatattaccatgggaattaatgaaattgaagcacgtgttgctttgattactaaagaaaaagaagcagttattgcagctctcagtcattactag

SEQ ID NO: 38411 - DNA, 762 bp, Streptococcus pyogenes
atgatgacagaacctattttacagatcagagacctttctgtttactacaatcaaaagaaaacgttaaaagatgtctctttggacctttatccaaatgaaataacagctttaattggtccttctggatctgggaaatcaacgctcttgcgttctatcaaccgtatgaatgatttgaatcctgaagtaaccattacaggctctatcgtctataacggacacaatatttatagtccaaggacagatacggttgatttacgcaaagaaattggtatggtattccaacaacccaacccatttccgatgtctatttatgagaacgtggtttacggccttcgcttaaaaggtatcagagataaatcaatcttagaccatgctgttgaaagctctcttaaaggggcttccatttggaatgaagtcaaagatcgtttacatgattctgcggttggcttatcaggcggacagcaacagagagtttgcatagctagagttcttgctaccagccccagaataatccttttagatgaacctacctcagctcttgatcctatctcagctgggaaaattgaagaaacattattgttattaaaaaaagattatacactggctattgtgacccgctcaatgcagcaagcctcacgtttatcagatcgaacaggttttttcttggagggtgacttacttgagtgtggtcctacaaaagccatgtttatgaatcctaagcgcaaagaaaccgaagactatatttctggtaaatttggttga

SEQ ID NO: 38412 - DNA, 936 bp, Streptococcus pyogenes
atggaaaatcaggaattggctaaaaaattagcctcaccatcaaagaattcaaggcttgaaacctttggccgcaccattacgtttttgtgtctggctttgattgtttttatcgttgcgatgattctgatcttcgttgctcaaaaagggttgtcaaccttctttgttgacaaggttaatctttttgatttcttgtttggaaaggagtggcaaccaagtgtaaaaaatgcggccggcattccttatcttggtgctctgccaatgattacaggatcctttttggttaccattttatctgctattattgccaccccatttgccattggcgcagccgtttttatgactgaaatctcacctaaatatggcgctaaattattacagcctgcggttgagcttttggttggaattccttcggttgtttatgggtttatcggtttgcaagtgattgttccttttatgcgctctatctttggtggcacaggttttggaatcctatctggggtctgtgtcttgtttgttatgattttaccaacagtgacttttatgacaacagacagtctgcgggcggtgcctcgtcattaccgcgaagcgtctatggctatgggagcaacacgttggcaaaccatttggcgtgttgtccttaatgcagctcgtccaggaatttttaccgctgttatttttggaatggcaagagcttttggagaagccttggctatccaaatggtagtcggtaactctgctgtaatgccaagttcactaacgacaccagccgcaaccttaacgtctgtcttgacaatgggtattggtaacacggttatgggaacggtccaaaataatgtgctttggtcccttgccctagtcttattattaatgagtctggccttcaattcccttgtcaaattaatcacgaaagaaagaaagagaaattatgaacgctaa

SEQ ID NO: 38413 - DNA, 933 bp, Streptococcus pyogenes
atggaaattgaatatatcaaagattatcgtgatattaaccaagaagatgatacagtcttgatattgggatattttgatggattacaccgtggtcataaagccttatttgacaaagcaagagaggttgcaaataaagaagggttaaaagtagtcgtttttacgtttacagagtctccgaaattggctttttcgcgtttttctcctgagttattgcttcatattacttatccaaagaagcgttatgaaaaatttgccgattacggtgtaaataaattatatttggttgattttacttctaaattctctaaggtctcatctgatcattttataactcattatattaaaaacctgaaagcaaagcatattgttgtcggttttgactataagtttgggcataatcgtacagatagtgattatttaaccagaaattttgaaggacaagtttataccattgaggaaataaaagaagatcatcgaaaaatttctgctacatggataaggaagcttattcaagaaggtaatgtagttaaagcaaaccacttgttaggctatgacttatcgacaaggggaagagtcgttcacggggatgcgcgtggccgtactattggtttcccaacagccaatctagctccaattgacaacacatacttaccagctgatggagtctatgttacaaatgttattgttgctaataaaatctatcgctctatgacgagtttaggtaaaaatgtgacatttggggggaaagagttgcgtctagaagttaacatttttgactttgacgaagagatctatggagaaattattgagattgtttggttagataagattcgagacatggaaaaattcgagggaatcgaagatttgactgatagattggaatatgataaacgaacagcattaaattggaaaaaagatagcaaattatcttaa

SEQ ID NO: 38414 - DNA, 885 bp, Streptococcus pyogenes
atgataaatggaatcattaatttaaaaaaagaagccggcatgacctctcatgacgcagtttttaaattacggaagttattacaagaaaaaaagattggacatggggggaccttagatcctgatgtggtcggtgttctaccaattgcagttggtaaggctactcgtgtgatcgaatacatgacagaagctggtaaagtttatgaaggacaagtgactctcggttactcaacaacgactgaggatgctagtggagaggtagttgcgaggtcctctttgccagctgtgctaacagaagaactcgttgatcaaacgatgacgactttccttgggaaaatcacacagaccccacctatgtattcagccgtaaaggttaatggccgtaaattatacgagtatgcgcgtgctggtgaaagtgtggaacgtcctagaagagaagtgactatttctctgtttgaacgcaccagccctttgaattttactgaagacggtctttgccgattctcttttaaagttgcttgtagcaaagggacttatgtgcggaccttagcagttgatttaggtcgagctctaggggtagagagtcatatgtccttcttgcagcgatcagcttcagcaggattaaccctcgagactgcctatactttgggagaaattgctgatatggtttctaaacaagagatgtcttttttgttaccgatcgagtatggcgttgctgatcttcctaaaatggttattgatgatactgaattgactgaaatttcatttggtcgccgtcttagtctccctagtcaagagccactgttagctgcttttcatggcgaaaaagtaattgctattttagaaaaaagagatcaagaatacaaacccaaaaaagttcttatttaa

SEQ ID NO: 38415 - DNA, 957 bp, Streptococcus pyogenes
atgggttcagttgaacgtacattaaaaatgaccttggctaccattgttgccattttaattgcttaccaacttcatctggattatgcaatgtcagcggggatcattgccctgttaagtgttttagacacccgtaagtccagtttggtggtcgctaggaatcgcttgctatcttttttcctggcttttgggattgcgatgatgtgctttagcttgtttggttttacgacagtaggttttatgtgttatttgttaattattattcctttgctctatcactttcagatagaggcaggactggttcctataacagtacttgtgacacatttgattgctaaaaaaagtattgcattacctattttatcgaatgagtttatgctcttttttgtagggactagtgtcgctttactatttaatgcttatatgggtccacaagatcagcaaattcggtactatcaccaaaaagttgaatcggatctgaaaggtatcttataccgttttgaaagctttctactggaaggaaaaggtcaaaatgaagggctcttgatcaaaaaccttgataaaatattagatgaagctctaaaactagtttatcgagaaaggcataatcaactatttcagcagaccaattatcaagttcattattttgagatgcgacgacaacaaaatagactattgggacaaatggctatcaacgtaaacacgttaatgagacaaagtaaggaaagtattcttttgtcacatctttttcacgaaactgcttgtcagctaagcgaacaaaatccggctttaaccttgattgatgacatcgaacaattgcttgaaacctttcgtcatggtgatcttcctcaaactcgggaggaatttgagcgacgtgcggttttatttcagctcttacaagacttagagcgctttatcttattaaaggtagagttttatcaggattatcaaaatgactaa

SEQ ID NO: 38416 - DNA, 201 bp, Streptococcus pyogenes
gtgtcagatgaaaaatataatgcgaaattagatcaagctggtggcaagttaaaagaaggatttggtaagatttctggagataaatctttagaaactgaaggtaaagtagataaagttactggaaaagttaaagaggttattgcagacgccaaagatactgtaaaaggattagctaaaggcttagataataaagataaataa

SEQ ID NO: 38417 - DNA, 189 bp, Streptococcus pyogenes
atggaattttatgaaaaattcaagtaccctattattggtggcttggtggggctaattattgccatattgctcatggcttttggtttattcaaaacgctactagcaattattttcattattttaggaatatatggtggcctgtatgccaaaaaaacaggtattattgatcaatttcttaatcgtaaataa

SEQ ID NO: 38418 - DNA, 249 bp, Streptococcus pyogenes
atgggacttatttggactttaatcgtcggtgcgcttattggtgtgattgctggagcacttactaaaaaaggtggttcaatgggctggattgcaaacatcgctgctggtctagttggttcttccgttggtcaagctttacttggttcatggggcccttctttagcaggaatgtctttgatcccgtcagttattggtgccgttatcgttgttatgatcacttcttttgtactaaacaaaactaacaactag

SEQ ID NO: 38419 - DNA, 2319 bp, Streptococcus pyogenes
atgaatcctttattaaatggaatgaatgatcggcaggcacaagctgttcaaacaactgaaggccccttattgattatggcgggggctggttctggtaaaacaagggtactgacccatcgtattgcctatttaattgatgaaaaatttgtcaatccttggaatattttagctattacctttactaataaggctgcgcgtgaaatgaaagaaagggccttggccttaaatccagctactaaagataccttaattgctacctttcactccatgtgtgtacggattctgcgtcgtgaggctgatcacattggttacaaccgaaacttcacaatcgtggatccaggtgagcaacgaacgttgatgaagcgcattttaaaacaattaaatatagaccctaaaaagtggaatgaacgttctattttaggaactatttcaaacgctaaaaatgatttgcttgatgaaaagggatacgaggcacaggctgctgatatgtatagtcaaatcgtagcgaggtgttacaaagcttatcaggaagaattacgacgtagcgaagcacttgactttgatgatttaatcatgatgacgctacgcctgtttgacgctaatcctgacgtgttagcttattaccagcagcgttaccaatacattcatgtggatgagtaccaagataccaaccatgctcaatatcagctaattaaattactagcttctcgctttaaaaatatttgcgttgttggagacgctgatcagtctatctatggttggcggggagctgacatgcaaaatattcttgattttgaaaaagattacccagatgctaaggtagtgcttttagaagaaaactatcgctctaccaagaaaattctgcaagcagctaacgacgtgattaacaataaccgtaatcgccgtcctaagaaactttggacacaaaatgcggatggtgaacaactggtttattaccgggcaaatgatgagcgagatgaggcagtatttgtggcctcaaccattagcaatatgagtcaagagcttggaaaaaacttcaaagatttcgctgttttataccgtaccaatgcccaatctcggaccattgaagaagcactcttaaaatccaatattccttacaccatggttggaggcaccaagttttacagccgtaaagaaattcgggatttgattgcctatttaaccattgttgctaaccctgctgataatatttcttttgagcggattgtgaatgagcctaaacgaggtgttggtccaggaacgcttgataaactgcgtcagtttgcctatgagagtgaccagtctttattagaagcagcttcaaatctattgatgtcccccttgaaaggtaaagcagcacaagctatcatggacttggccaatattctcggtcagctacgtcaagacctagatcagatgagtatcaccgacttagcagaagctttgttagaaaaaacaggttatttagatagcttacgcctgcaaaatacattggaaagccaagcccgtatcgaaaatatcgaagaattcttatctgttaccaaaaattttgacgagtcaagtgcctctcaagaagaagacgaaaccggtgttgatcgcttgggacgttttttaaacgatttagcactgattgctgatacagatgattcccaagcagaagctgctgaagtaaccttaatgaccctacatgctgccaaaggcttggagttccctgttgttttcttaattggtatggaagaaggtgtcttccccttatcacgtgcctctgaagatccagatgaattggaagaagaaagacgtttagcttatgtcggaatcacaagagctgaagaagttctctttatgaccaatgccaacaccagaaccctctttggtaaaagtagttataaccgtccaacacgcttcttgaaagaaatttcagaggaactactctcttataaaggattggcaagaccagcacaatcttcatttggtgtgcgtttttctactgaaacacacacacagtttggacaagggatgagcctatcagaagccttacaagctcgaaaggcccaggctcaagtaagacaatcagcacagccaatgcaggcacatacgataccatcagcttcaactagctcagttttaccgtttggttctaatagctctgtagaagaggtcacttggcagattggcgatatcgctcaccataaaaaatggggagacgggactgtgcttgaggtttcaggctccggaaaaacgatggaattgaaaatcaaatttccagaagttggtttaaagaaattactagcaagtgttgctcctattgagaaaaaataa

SEQ ID NO: 38420 - DNA, 1815 bp, Streptococcus pyogenes
atgtgtggaattgttggagttgttggaaatcgcaatgcaacggatattttaatgcaaggccttgaaaagcttgaataccggggttatgattcagcaggaatttttgtggctaatgccaatcaaacaaacttgattaaatcagtggggcggattgctgatttgcgtgccaagattggcattgatgttgctggttcaacagggattggtcacacccgttgggcaacgcatggccaatcaacagaggataatgcccatcctcacacgtcacaaactggacgttttgtacttgttcataatggtgtgattgaaaattaccttcacattaaaacagagttcctagctggacatgattttaaggggcagacagatactgagattgcagtacacttgattggaaaatttgtggaagaagacaagttgtcagtactggaagcttttaaaaaatctttaagcattattgaaggttcctacgcctttgcattaatggatagccaagcaactgatactatttatgtggctaaaaacaagtctccattgttgattggacttggtgaaggttacaacatggtttgttcagatgccatggccatgattcgtgaaaccagtgaatttatggaaattcatgataaggagctagttattttaaccaaagataaggtaactgttacagactacgatggtaaagagctgatacgagattcctacactgctgaattagacttatctgatattggcaaagggacttatcctttctatatgctgaaagaaattgatgagcaaccaaccgtaatgcgtcaattaatttcaacttatgcagatgaaactggtaacgtacaggttgatccggctatcattacctctatccaagaggctgaccgtctttatattttagcggcagggacttcctaccatgctggttttgcaacaaaaaatatgcttgagcaattgacagatacaccagttgagttgggcgtggcttctgagtggggttaccacatgcctctgcttagcaagaaaccaatgtttattctactaagccaatcaggagaaaccgcagatagtcgtcaagttttagtaaaggcaaatgctatgggcattccgagtttgacagtaactaacgttccaggatcaaccttatcacgtgaagcaacatacaccatgttgattcatgctggacctgaaattgctgttgcgtctacaaaagcttacactgcacaaattgctgcccttgcctttttggctaaggcagttggtgaggcaaatggtaagcaagaagctcttgactttaacttggtacatgagttgtcattggttgcccaatctattgaggcgactttgtctgaaaaagatctcgtggcagaaaaggttcaagctttgctagctactactcgtaatgctttttacatcgggcgtggcaatgattattacgttgcgatggaagctgctttgaaattaaaagagatttcttatattcaatgcgaaggctttgcggctggtgaattgaaacatggaaccatttcattaattgaggaggacacgccagtaatcgctttaatatcgtctagtcagttggttgcctctcatacgcgtggtaatattcaagaagttgctgcccgtggggctcatgttttaacagttgtggaagaagggcttgaccgtgagggagatgacattattgtcaataaggttcatcctttcctagccccgattgctatggtcattccaactcaactgattgcttactacgcttcattacaacgtggacttgatgttgataagccacgtaatttggctaaagctgtaacagtagaataa

SEQ ID NO: 38421 - DNA, 1503 bp, Streptococcus pyogenes
atgaataaacgcgtaaaaatcgttgcaacacttggtcctgcggttgaaatccgtggtggtaaaaaatacggagaagatggctactgggctggtcaacttgatgttgaagaatcagcaaaaaaaatcgctgaattaattgaagctggtgcgaatgttttccgtttcaatttctcacacggtgaccacaaagagcaaggtgaccgtatggcaactgttcgccttgcagaagaaattgctcgtcaaaaagttggtttccttttggatactaaaggtcctgaaatgcgtacggaattgtttgcagatgatgctaaagagtttagctatgttactggagaaaaaatccgtgtagcgactacacaaggtattcaatcaactcgcgatgttattgctttgaacgttgctggtagccttgacatctacgatgaagtagaagtaggtcatactattcttatcgatgatggtaaacttggtttgaaagtgatcgacaaagatatcgcaacacgtcaatttatcgttgaagtagaaaacgacggtattattgctaaacaaaaaggtgttaatatccctaacactaaaattcctttcccagcacttgcggaacgcgacaatgctgatatccgttttggtcttgaacaaggacttaactttattgcaatctcatttgttcgtacagccaaagacgttgaggaagttcgtgaaatctgtcgcgaaactggtaacgaccatgtgcaattatttgctaagattgaaaaccaacaaggtatcgataatcttgatgaaatcatcgaagctgctgatggtatcatgattgcacgtggcgacatgggtatcgaagtaccatttgaaatggttccagttttccaaaaaatgattatcactaaagtgaatgcagctggtaaagcagttatcacagcaacaaacatgcttgaaacaatgactgaaaaaccacgtgcgacacgttctgaagtatctgacgtcttcaatgctgttatcgatggtactgatgcaacaatgctttcaggagagtcagctaacggtaaatacccggttgaatctgttcgtacaatggcgactattgatcgtaatgcacaaactcttcttaacgaatatggtcgtttagattcatctgccttcccacgtaccaataaaacagatgttattgcttcagctgttaaagatgccactcattcaatggacatcaaacttgttgtgactattactgagacaggtaatacagctcgtgcgatttctaaattccgtccagatgcggacatcttagctgtaacatttgatgaaaaagtacaacgtgctttgatgattaactggggtgttattcctgttcttgctgaaaaacctgcatctactgatgacatgtttgaagtagcagagcgtgttgctgtggaggcaggcttagttcaatctggggataatattgttattgttgctggtgttccagttggtactggtggaacgaatactatgcgtgttcgtacagtaaaataa

SEQ ID NO: 38422 - DNA, 1014 bp, Streptococcus pyogenes
atgaaacgtattgctgttttaaccagtggcggcgacgctcctggtatgaacgctgctattcgtgcagtcgttcgtaaagcaatttcagaaggaatggaagtttatggtatcaaccgtggctatgcaggtatggttgatggcgacattttcccactgggttcaaaagaagttggtgataaaatctcacgtggtggaactttcttatactcagctcgttatccagagtttgctcaacttgaaggtcaattggctggtattgagcaacttaaaaaacatggtattgaaggtgttgttgttattggtggggatggttcttatcatggcgctatgcgcttgacagagcacggcttcccagcggtaggtatcccaggaacaatcgataacgatattgcgggaactgactacactatcggatttgatacagcagttaacacagcagttgaagctattgataaacttcgtgacacctcatcaagtcacggacgtacttttgtggttgaagtgatgggtcgcaatgcgggtgatattgctctttgggcaggtattgctagtggtgctgatcaaatcattgttccagaagaagagtttgatattgaaaaagtggcatcaacaatccaatatgattttgaacacaaaggtaaaaatcaccacattatcgtcttagctgaaggtgttatgagcggtgaagcttttgctcaaaaactgaaagaagctggcgataagagtgaccttcgtgtgacaaatcttggccacattcttcgtgggggttcaccaactgctcgtgaccgtgtcattgcttcttggatgggttcacatgctgttgagctacttaaagatggcaaaggtggtttggctgttggtattcacaatgaagaacttgttgaaagcccaatccttggtactgcagaagaaggtgctttgttcagcttgactgaagaaggcaagattattgttaataatccacacaaagctcgtttagactttgcagctttgaaccgttcattgtcacaataa

SEQ ID NO: 38423 - DNA, 3111 bp, Streptococcus pyogenes
atgtttgctcaacttgatactaaaactgtatactcatttatggatagtttaattgacttaaatcattattttgaacgagcaaagcaatttggttaccacaccataggaatcatggataaggataatctttatggtgcttaccattttattaaaggttgtcaaaaaaatggactgcagccagttttaggtttggaaatagagattctctatcaagagcggcaggtgctccttaacttaatcgcccagaatacacaaggctatcatcagcttttaaaaatttccacggcaaaaatgtctggcaagcttcatatggattacttctgccaacatttggaagggatagcggttattattcctagtaagggttggagcgatacattagtggtcccttttgactactatatcggtgttgatcagtatactgatttatctcatatggattctaagaggcagcttatacccctaaggacagttcgttattttgcgcaagatgatatggaaaccctgcacatgttgcatgccattcgagataacctcagtctggcagagacccctgtggtagaaagtgatcaagagttagcagattgtcaacaactaaccgccttctatcaaacacactgccctcaagctctacagaatttagaagacttagtgtcaggaatctattatgatttcgatacaaatttaaaattgcctcattttaatagagataagtctgccaagcaagaattgcaagacttgactgaggctggtttgaaggaaaaaggattgtggaaagagccttatcaatcgcgcttactacatgaattggtcattatttctgacatgggctttgatgattattttttgattgtgtgggatttacttcgctttggacgcagtaaaggctattatatgggaatgggacgtggctcggcggcaggtagtctagtggcttatgctctgaacattacagggattgatccagttcaacatgatttgctatttgagcgctttttaaacaaagaacgttatagcatgcctgatattgatatcgatcttccagatatttaccgttcagaatttctacggtatgtccgaaatcgttatggtagcgaccattcggcgcaaattgtgaccttttcaacctttggccctaaacaggctattcgtgatgttttcaaacggttcggggttccagaatacgaactgactaatctcactaaaaaaattggttttaaagatagcttggctactgtctatgaaaagtcaatctcttttaggcaggttattaatagtagaactgaatttcaaaaggcttttgccattgccaagcgtatcgaaggaaatccaagacaaacgtccattcacgcagctggtattgtgatgagtgatgatgccttgaccaatcatattcctctaaaatcgggcgatgacatgatgatcacccagtatgatgctcatgcggtcgaagctaatggcctgttaaaaatggattttttggggttaagaaatttgacctttgttcaaaaaatgcaagagaaggttgctaaagactacgggtgtcagattgatattacagccattgatttagaagacccgcaaacgttggcactttttgctaaaggggataccaagggaattttccaatttgaacaaaatggtgctattaatcttttaaaacggattaagccacaacgttttgaagaaattgttgccactaccagtctaaatagaccaggggcaagtgactataccactaatttcattaaacgaagagaaggacaagaaaaaattgatttgattgatcctgtgattgctcccattttagagccaacttacggtattatgctttatcaagaacaagttatgcagattgcacaggtttatgctggttttacgttaggcaaggccgacttgttaaggcgtgccatgtctaaaaaaaatctacaagaaatgcaaaaaatggaagaagactttattgcttctgctaagcacctagggagagctgaagaaacagctagaggactttttaaacggatggaaaaatttgcaggttatggttttaaccgcagccatgcctttgcctattcagctttagcttttcaattggcttatttcaaagcccattacccggctgttttttacgatatcatgatgaattattctagcagtgactatatcacagatgctctagaatcagattttcaagtagcgcaagttaccattaatagtattccttacactgataaaattgaagctagcaagatttacatggggctgaaaaatattaaggggttgccaagggattttgcttattggattatcgagcaaagaccatttaatagcgtagaggattttctcactagaactccagaaaaatatcaaaaaaaggttttccttgagcctctgataaaaataggtctgtttgattgctttgagcctaaccgtaaaaaaattctggacaatttggatggtttactggtatttgttaatgagcttggttctcttttttcagattcttcctttagttgggtagatacgaaagattactcagtaactgaaaaatattctttggaacaggagatcgttggagttggcatgagcaagcatcctttaattgatattgctgagaaaagtacccaaacttttactcctatttcacagttagtcaaagaaagcgaagcagtcgtactgattcaaatagatagcattaggatcattagaaccaaaacaagtgggcagcaaatggcttttttaagtgtgaatgacactaagaaaaagctcgatgtcacactttttccacaagagtatgccatttataaagaccaattaaaagaaggagaattctattacttaaaaggtagaataaaagaaagagaccatcgactgcagatggtgtgtcagcaagtgcaaatggctattagtcaaaaatattggttattagttgaaaaccatcagtttgattcccaaatttctgagattttaggtgcctttccaggaacgactccagttgttattcactatcaaaaaaataaggaaacaattgcattaactaagattcaggttcatgtaacagagaatttaaaggaaaaacttcgtccttttgttctgaaaacggtttttcgataa

SEQ ID NO: 38424 - DNA, 699 bp, Streptococcus pyogenes
atggcacacctattgcaactacatcatgtttcaaaatcttaccgtgaaaaaaaagctattgatgacttaaccattactatcccgaacggtaaaattatcggattattaggtccaaatggaagtggtaaaacaactttaattaaactcattaatggccttttacaaccaaataaaggagaaattgtcattgatggctaccgtccctgtgttgagacaaaaaaaattatttcttatttaccagatactacttatcttaatgaaaatatgagaattaaggacatgttggagttctttagtgatttttacagcgactttgacaaatccaaagcaacaagccttctaagagatttagaactagaccctgaagaccgcttcaaaactctatccaaaggaaacaaagaaaaagtacaattaattcttgtgatgagtcgtaaagccagactctatgtacttgatgaacctattggtggagttgaccctgccgcaagagactacatcctaaaaaccatcattaatagttattgtgaaaatgcttctgttattatctcaacccacttgatttcggacattgaacctatccttgacgaagtcattttcttgaaacaaggaagacttttcttatctggcaatgctgatgatctaagacaagaataccagcaatccattgattccctctttagggaaacttataaggtttag

SEQ ID NO: 38425 - DNA, 1020 bp, Streptococcus pyogenes
atggtaacaataaaagatgtcgctcaaaaggcaggtgttaacccttcgacggtgagtagggtattaaaagataatcgatctatttctatgaagacaaaagagaaggttagaaaagcgatggcagatttgggatatgttccaaatgtcgcagcacagattctagcgagtggtttgacacacaatataggacttgtttttcctcctattacaactagcgatagattaagtgaacctttctttatggaaattttgtcgactattactaacgaagctaaagaatctcattttactgtgtcgattgctacaggtatatctcttgatgacctgatagagcaagtgaaactgatgcatcttcaaaaacgagttgatggttttattattctttattctgatcaagatgatcctgtcaaaaaatatttgatgacaaataacttaccatttgtcattgtaggtgctccacaaggtgacactaataaaaccacttatattgataatgataatcagctaatggctaaaacagcagtagaacacctttatcaaaaaggccatcacaacatattatttataacagatgatttactatcagaagtaacttctgagcgttatcttggctatttgaagggttgttttaagcgatctttaaaaacaaagccaatgctgttatttgatcgtaaggatcctgttagcgtagaaatattgatggaaactatatcttcctttaaagcaactgccttggttgttgttggtgatgttctggctattcgtatggtacagttattatctttttatgatataaaagtgccagatgatatgtcaattatcacttttaataattctaattacgctaaattaattcacccttatttaacgacatttgatataaatgttgaaaatcttggaaaaatgtcttttaagcaattacttgatattatcaattccaatgaacagaatcttagtcagactatttttgttccttttagtttaaaacaaagagaaagcgtccgtgatattagtcattaa

SEQ ID NO: 38426 - DNA, 1704 bp, Streptococcus pyogenes
atgaatgttgccggaatgctccatattcctgattcgaggtattgctttgccatatctcaaaaggaacttgtcatccgattacgcgtggccaaagaagatagaggtattactgttaatttggtccacgggcctaaatatggttatcatgaattccaagaagaattggaaatgtcagttgcctatacagaccatacgcatgcttattatgaaactactttaacattagacgatgtgaggttggcctacatttttaaaattgaagaagaaggtcaaacctattattttagtgaagatgggttaactactagttacgatttttcaaatgggttttataatttcttccaaatgccttatatcaatgctgttgatgttcatcaagtcattccttggacaaaagacgcggttttttatcaaatctttgttgatcgctttaaccgtggggattgggaaaaaggtgacagttatgtcaacatgggttggttagaaaaaccgactcctaaaagttttgctggtggagatttaaagggaattacagaaaaattagattacctcaaagatttagggattactgtcatctatttaacgccaatttttcaatccattagtaatcacaaatatgatattagtgattactacgctattgatccacaatttggaactaaatatgatttgcaagaattgattgatttagctcacaaaatgggaatcaagattattctagacgctgtctttaaccatgccagcagtgatgccgtggaatttcaggatgtcttgagatacggtaaagagtctaagttttttgattggtttatgactcatgatgaacacccatccatggacctagtaaactatgaaacctttgctggatgtaactatatgcccaaatggaatacctcaaatagagacgtgcaagactatctgattgagattgggcgatactggattaaagaattttgtatcgatggttggcgcctagatgtttctgatgaagtatctcatgatttttggcgacgtttccgtcaggcggttaaagcggaaaaagcagatgccattttaattggggagaactggcatgatgcctatccttatttggcaggggatcagtatgatgggataatgaattatgctttcaccaaagcctgtttggattactttgcttttgaaaccatgacatcaaaacaattggctgagaaattaagcaacattttgatgcgaaacacttggcaagtcaatcgcatgaacttgaatcttttggattctcatgatacgcatcgtttcttcactcaagttaagggttccaaagataaattgttagctgctttagcattgctctttatctttatgggcattccttgcttgtattatgggacagaagtggcaatggaagggggttacgaccctgattcgcgtcgcggttttccttgggatgatgctgagcgggacaaggatttctttagcaaagtaaaagcgattattgctcttcgccaacagccagctcttcaagaaggagctattagcattgattatgacgaagactgcctcattctgaaacgcagcttaggtgagcaaagcatttcacttgttcttaacaatggtgagagtgcttattctattaaggaaggaggacagattttgacaagcaatggggtaactaaaaacaaaaaacaattactccaggatggatatattgtgtttagtaactaa

SEQ ID NO: 38427 - DNA, 1260 bp, Streptococcus pyogenes
atgtcatggaattggaaaaaaacatctgtgcttggaactttatccttagcttcagtgctacccctaactgcttgcgtaagtggtggtggtaaaggcgttaaggaaacagacggaaagactattgtagtctctgttgatgagggatatgttgattacattaagagtattaagggtgagtttgaaaaagaacataaagtcaccgttaaagtcaaaaaagaaggtatgatggatactcttgataagctatcaacggatggtccaacaggagcttcaccagatgtctttttagcaccttttgaccgtgtaggtggtttaggaactgaaggtcaaatcgctgaggttactttaggaaacagcaaagagtttgatgatacggttaagaaattagtaaccattgatggtaaaacttatggtgcaccagacgtaattgaaactttggtaacttattataataaggatttagtgcctcaagcacctaaaagctttactgaattagaagtcttacaaaaagattctaagtttgcttttgcctctgaaccaggaaaatctgtaggtttcttggcgaaatggacagacttctattatggttatggtttaattgccggttatggcggttatatctttggtgataaaggaaccaaaccaagtgatttaggcctaggtaacgacggaactgttgaagggttaaactacgcgaaacagtggtatggcacttggcctcaaggaatgcaagacactaaaaaagctggtgattttatcactgaacaatttatttctaaaaaagctggtgtcattattgatggtccatgggcagctagctcctttaaagatgctggtgttaactttggggtaatggaaattcctactttgacaaatggtaaaaaataccaaccgttcgcaggtggtaaagcttgggttatttcaaactattctaaaggaaaaacgactgctcaaaaattccttgattatgtgaccaatgctgaaaaccaaaaacgtttctatgataaaacacaagaaattccagctaacttaacagcacgtaactatgcttctaaagagggtaatgagttaacgaaagctgtgattagtcagtttgagagcgcacaaccaatgccaaatattccagaaatggctgaagtttgggaaccaggtgcaaatatgttctttaacgtggcttctggtaaggaagaagcatctaaagctgcaaaagaagcagcaaaaactattaaggaagctattgaacaaaaatacgctgaataa

SEQ ID NO: 38428 - DNA, 1539 bp, Streptococcus pyogenes
atgattaaggatatgattgacagtattgagcagtttgctcagacacaggctgattttccagtttatgattgtttaggggaacgccgcacttacggacaactcaaaagagattctgatagcattgctgcatttatagatagcttagctttactggcaaaatctccagttttggtttttggggcgcaaacttatgatatgttagctacttttgtagctttaaccaaatctggtcatgcctatatcccagtagatgtgcattcagcaccagaacgtattttagcgattattgagattgcaaagcccagtttaatcattgctattgaggaattccctcttactattgaagggatttcccttgtctcactatcagagattgagtcagcaaaattagcagaaatgccctatgagcgaacacattctgttaaaggagatgataattattacattattttcacctctggaacaacgggccaaccaaaaggggtgcaaatttcacatgacaatcttttgagctttaccaactggatgatcgaagatgcagcatttgatgtacctaaacagccacaaatgctggcgcagccaccctattcctttgacctttctgtcatgtactgggcacctaccttggctttaggtggaaccttatttgcacttccaaaagaattggtggcagactttaaacagttatttacaacgattgcgcaacttccagttggcatttggacatcgactccttcatttgctgatatggccatgcttagcgatgatttttgccaggctaagatgccagctttaacgcatttttattttgatggcgaagaattaaccgtttctacggctcgaaaactctttgaacgtttcccgagtgccaagattatcaatgcctatggaccaacagaagcgactgtagccttatccgctattgaaattaccagagaaatggtggataattatacccgcttgccgattggctaccccaaaccagattctccgacctatattattgatgaagatggtaaggagttatcttcaggggagcagggtgaaattattgttacagggcctgctgtgtcaaaaggttacctcaacaatcctgagaaaaccgcagaagctttctttacttttaaaggacagcctgcttatcatacaggggacattggctcactgacagaagataatattttgttgtatggtgggcgtttggattttcagattaaatatgctggttatcgtattgaactagaagatgtttcccaacagttgaatcaatcaccaatggtagcatcggctgtggctgttccaaggtacaataaagaacataaggttcaaaatctcttggcctatatcgttgtcaaagatggggttaaagagcgttttgatagggaattggagttaaccaaagctatcaaagcctctgttaaggatcatatgatgagttatatgatgccttctaagtttctttatcgagatagtctaccattaactccaaatggtaagatagatattaaaactttgattaatgaggtcaataaccgatga

SEQ ID NO: 38429 - DNA, 1095 bp, Streptococcus pyogenes
atggttgatttaggattttctctataccctgagcggtatgatgttaccaagagtaaagcttatattgacttatgtcatagctatggagccaagcgcttgtttatgagtctcttacagctggcaccagctgatcaccagatgtttcattgctacgcagagctcattgcttatgcaaatcaattaggcattcgagtgattgctgacgttagtccaagctttattagccaagctggttggtcagatcagcttattgaacgagctcatgccttcgggttagcgggcttacgcttagacgaggctctccctctagcagagattgtaactttaacaagaaatccctttgggcttaaaattgaacttaatatgagcactgataaacaattattgatgtcattgctagcgacagatgcagaacggagcaatattattggttgccataatttttatccacatgaatttaccggtttgtcatggcaacattttaaggatatgtcacgtttttatcatgagcatgatattgaaacggctgcttttattaccgctcagtcagcatctgaaggcccttggctactggcagaaggcttgccgacagtggaagaccataggcacttgcccattggcctgcaagtagaattaatgaaagcgataggaaccattgataatatcctcatatctaaccaattcatttcggaagaagaattggcagcatgtactcaagctttagcaagaccagtcacgacgatcaaggttaggcctatcatcgatttgacagaagttgaggagcaaatcattggctatccgcattgttatcgtggcgatgtatctgattatgtgattcgatcaaccatgccacgtctagtctatgctcaggaatcgattgctccaagagaccaatctaaggaggtcaaacgaggtagcattattattgacaatgaccgctatcatcgatataagggagaactgcaaattgctttgaaaaattttacggtcagttcaaaagctaatgtggttgctgaggtcagagaggactatcttagtttgttagatgatttgcgaccttggcaggaattttgtttggagattgccccatcatag

SEQ ID NO: 38430 - DNA, 1401 bp, Streptococcus pyogenes
atgaaacaaagaaaacaccgttatcaatttccagatggctttttatggggaagttccacatctgggcctcaaagcgaaggaacggttcctggagatggcaaaggacctagcaactgggattactggtttagtattgagtcagctaagtttcatcaccaaattggtccagaaaaaacctcaaccttttatgaaaactataagggtgacattgcccttttgaaagaaacaggccacacgatttttcggacctcaatccagtggtctcgattgattccagaaggagtcggggaggttaatccaaaggcggtgacattttaccgagaagtatttcaagacattattgctcaaggtattaaattgattgttaacctctatcattttgacctcccctatgccttgcaagaaaaaggtggctgggaaaacaaagctactgtctgggcttatgaaacctacgcaaaaacctgttttgagctttttggtgatttagtaaacacttggattacctttaatgaaccgattgttccagtcgaatgtggctatttaggttattatcactacccttgtaaagtagatgccaaggcagcagttcaagtggcttacaacacacaactggccagttcactggcggtcaaagcttgtcataagcttcatcccgaccacaagattagtattgtgcttaacatgacacctgcttatcctcggagtaatgctcctgaagatgtcaaggctgctagaatcgcagagcttttccaaaccaaatccttcctagatccatcagttttgggtgtttacccagcagagttagtttccattttagaggaagctgatttattacctcaatatagtgctgatgaattagagattatcaaaaacaatactgttgattttttgggagttaattattatcagcctttgcgggttcaggcacctagtaagtcacagcaagagggggacctccttatcttagatatttattttgaaccttatgatatgcctggtaaaaaagtcaatcctcaccggggttgggaaatttatgaaccaggactttatgatattgcccttaatttaaaagaacactatggtaacatcgaatggctagtcacggaaaatggtatgggtgtcgaaggtgaagaagcttttttagcagatggccagatacaagatgactaccgcatcacctttatcgaggatcatcttatccagcttcataaggctttgggagaaggagccaactgcaaaggctacctcttgtggacttttattgattgctggtcttggttaaatgcttataaaaaccgatatggtttggtagctttggatttagagagtcaaaagcgaaccataaaaaaatcaggttactggtttaaggcgttgagcgagtcaaatggttttgataaatag

SEQ ID NO: 38431 - DNA, 1314 bp, Streptococcus pyogenes
atgagtatgtttttagatacggcaaaaatcagtgtccaagcaggccgtggtggcgatggtatggtagcttttcgtcgtgaaaagtacgtcccaaatggcggtccttggggaggagacggcggtaaaggtggctcagttatcttccgagtggacgaaggtttgcgtaccttgatggatttccggtataatcgtaaattcaaggcgaaatctggtgaaaaaggtatgaccaaaggcatgcacggccgtggtgcagaagatttgattgtctttgttcctcaagggacaacggttcgtgatgctgaaactggaaaagtaattacagacttagtagaacatggtcaagaagtggtcattgctaagggtggtcgtggtggccgtgggaatattcgttttgcaactcctcgtaatcctgcgccagagattgctgaaaatggtgagccaggtgaggaacgtcagttagagttagaactcaaaatcttagctgacgttggcttggtcggattcccatctgttgggaaatcaaccttgttaagtgttgtgtcatcagctaaaccgaaaattggtgcctatcattttaccactattgttcctaatcttggaatggttcgtacaaagtcaggtgatagctttgctatggcagatctgccaggtttgattgaaggtgctagccaaggggttggtttaggaactcaattcctccgtcatatcgagcggacacgggttattcttcatgtgattgacatgtctgctagtgagggtcgtgatccttacgaagattatgtttccattaataacgagctggaaacctataatttgcgattgatggagcgcccacagattattgtggctaataaaatggacataccagaggctcaagaaaacttgaaagccttcaagaaaaaattggctgcccaatatgacgagtttgatgatttgccaatgattttccctatttcaagcctagcacatcaaggcttagagaacttgttagaagcaacggcagaattactcgctaaaacagacgaattcttattatatgatgaatctgatctggtggacgaggaagcttactatggctttgctgagactgaaaaagactttgagatcacacgtgacgatgacgctacttgggtcttgtctggtgagaagttagaacgtctctttgtcatgaccaatatggaacgtgatgagtccatcatgaaatttgcccgtcaattgcgcggtatgggggttgacgaagctcttcgtgaacgtggagcaaaagatggggatcctgttcgtattggcaagtttgaatttgaatttgtggattaa

SEQ ID NO: 38432 - DNA, 516 bp, Streptococcus pyogenes; identical to SEQ ID NO: 38173

SEQ ID NO: 38433 - DNA, 807 bp, Streptococcus pyogenes
atgctacttgaaatccttgatttatcacgctccacctattactatcaagtgaagcgactagctcaaggagataaggatatagaactaaagcatgtgattcgagagatttatgatgagcataaaggtaattacggttatcgtcgtattcatatggagttgcgtaaccgaggatttgtggtcaatcataaaaaagttcaacgtctcatgaaagtcatgggcctagcagcccgcattcgtcggaagcgcaagtattcttcttacaaaggagaggttggtaagaaggctgataatctgattaaacgtcacttcgaaggctctaaaccttacgaaaaatgttacactgatgtgacggagtttgccctacctgaagggaagctttatctatcgccagtttttgatagctataactgtgagattattgatttcactctgtctcggtctcctaacttgaaacaggctcaaaccatgcttgagaagacttttccagcggattcatacagcggaactattcttcatagtgaccaggggtggcaataccaacaccagtcctaccatgattttttagagtctaaaggtattctgccatccatgtcccgcaaagggaatagcccggataacggcatgatggattccttctttggcattctcaaatctgaaatgttttatggactcgagacaacttatcaatcacttgacaagcttgaagaagctattacagattacattttttactacaacaacaaacgaattaaagcaaaactaaaaggacttagtcctgtccaatacagaactaaatcctttcaataa

SEQ ID NO: 38434 - DNA, 735 bp, Streptococcus pyogenes
atgatgcgcttagataaatttttagtggcaactggtgttggaactaggagccaagtcaaacttctcttaaaaaagaaggctattttcgtcaatcaaaaggttgaaacctctgccaaagcacacattgatgaatacaaggatttggtgacgtatcaaggtacgcccttggtctatgaatcctttgtttattacctgttaaacaagccgtcagggtatgtgtcagcaacccaggacagacagcaggctactgttatggagttgttagatgacacggctaggcaaaaagcagtttttcctgtgggtaggttagataaggatacccgtggacttttgctcttgaccaataatggacaactagcccatgaccttttatcccctaaaaaacatgttacgaaagagtacttggctaaagtagcaggcatcatgactgaagctgataaagattattttgctagaggtatttccttaaaggatcaccagtgcctacctgctcatttagaagtgcttgctagtgatttacagcagcaaacaagtttggttaaaattaccatacaagaaggaaaattccatcaggtgaaacgcatggtagcagcctgtggaaaggaagtgcttgacttacagcgtctcagcatgggaccattaaaactagaccctagccttgcagaaggggagtttaggcgcctgacgcctgaggaattgcagagcctggcaccttattgtcagagctcactataa

SEQ ID NO: 38435 - DNA, 366 bp, Streptococcus pyogenes
atgactatttattctcacacttatgaaacccgtcccaatcattcggctaaagccatgggctcaggaacgctgaatgtcctagctactcctgctcttgttgcttttatggaaaatgcttcttacttatttgcccaagaacagctcgacagtgactttacaacggttggcagcgagatagctatccaacatttggcagcttcagccattggagatcctgttacaattatcattacagcccttaaagaagaaggccgaaaatacgatttccgcttggaagcttttgtgggagaacaactcattggaaaagcctgtcatactagagttagggtgaacagtaaacattttatggccaaagtagcggagtaa

SEQ ID NO: 38436 - DNA, 1221 bp, Streptococcus pyogenes
atgtcaacattatcattggacaccacaaataagcgagctttagtggcagctattgcagcttcaggaacggatgacttgaatgtcatgtttcttgccttttccatgtcttccattatgacagacttgggtcttagtggcactcagggtggctggattgcgaccattaccaatttaggaatgttggtgggaggcctcttattcgggttgctggctgataggcaccacaagtttaaggtctttaaatggacgattttactgttttcagtagcaacaggattaatttattttacccagtctttgccctacctgtacctgatgcgatttattgctggcataggagttggaggtgagtacggtgtagccattgccataatggcagggattgtaccaccagaaaaaatgggtcggatgtcttctttaaatggtattgctggccagcttggctctattagttcggctcttttagcagggtggctggctccaagtctaggctggcgtggcctttttctctttggattacttccgattctcttggtgatttggatgactttagccatagatgaccaaaaaatttgggatcattatgggcaagaggaggaagaatgcagtcaaccaattaaaatcaatgaactattcaaaacaaaatccttaacagctcaaacccttgctttaatggtcatgacgactgtgcagattgcgggctattttggaatgatgaattggttgccaaccattattcaaacaagcttaaacctttcagtaaaaagttcgtccttgtggatggtggctactattgtcggcatgtgtttggggatgctgtattttggtcagcttttagattgctttggtccacgtctgatttattccctctttttattagcatcatctatttgtgtttacctttttcaatttgccaattccatggcgagtatggttattggaggtgctattgtcggtttttttgtcaatgggatgtttgctggctacggggctatgattaccagactttatccccatcacattcgatccacggctaataatgttattttgaatgttggccgtgctctaggaggattttcgtccgttgctattggtagtattttagatgcctcaggtatttcaatggtcatgattttcctagcttctctgtatgtgattagttttggagccatgtggtctattggtcagttaaaagcagaacgctaccaacaattgcgttag

SEQ ID NO: 38437 - DNA, 1452 bp, Streptococcus pyogenes
atgacaaaataccccatgggtggccttagtcaccatgaagaattacgttatttttatctcctaaggaatttgagttaccttagtgagaatgaaaaaaaagagtttgcttttttaaaatctaaattggaaattggtcgagcttatgctccttctaagcagcattataggaagtcaaaacggcaagaaccttactttgaagatgactactataacgactactcaccaaatgatttactagaagatgatgacgtcaatcatgactcttcttttgttccatatggtttaccgatatatcctaaagaagacagatatttaaacaaaaaaacaaaacttacagctcgtagacctatagatgctccgcagcctattgatgaagacgatgcttttttaacagagtctgttgctcgttgtgctcttcctagatctcaaaaaaggaagcataagaaaaaaggatgtatgaaatggttttttaacattcttggcttattgctaatgactgtgcttatggggttagggttgatgtttgcaaaaggggtttttgatatttctactaataaagctaattacaaaccagctgtttcccaagcttttgatggtcaagaaactcaagatggtacgaacattctgattttgggttctgaccaacgagttactcaaggttctacagatgctcgcacagataccattatggttgtcaatgtcggcaaccatgctaaaaaaataaaaatggtctcttttatgcgtgacactttgattaacattccaggatacagttataatgataattcgtatgatcttaaattaaatagtgcatttaatcttggagagcaagaagatcaccacggagcagagtacgttcgacgggccttaaaacataattttgatatcgacattaagtattatgtgatggtagattttgaaacatttgcagaagctattgacaccttgtttccaaatggtgttaagattgatgccaaatttgcgacagtaggtggtgtagctgttgactccgtagaagttccagatgacttgcgaatgaaaaatggggttgttcccaaccaaaccatcgaagttggagaacaacgcatggatggtagaaccttgctcaactatgctcgtttccgtaaagatgacgaaggagatttcggacgaaccgtccggcagcaacaggttatgtcagctgttatgtcccaaatcaaagacccaactaaactctttacagggtctgcggctattggtaaaatctatgcgctgacttcgaccaatgtttctttcccatttgttgttaaaaatggtgtttctgttttaggaagtgggaaaaatggagttgagcacgtgaccatcccagaaaatggggattgggttgacgaatacgatatgtatggaggacaagccctttacatagattttgataagtatcagaaaacgttagccaaattaggtctgcgctaa

SEQ ID NO: 38438 - DNA, 1260 bp, Streptococcus pyogenes
atgcgtaaaattattattaatggcggaaaagccttatctggagaagtggcagtttcaggggcaaaaaacagtgttgttgcgcttattccagcaatcatcttagccgatgatattgtgattcttgatggtgtacctgctattagtgatgtagatagtctgattgaaatcatggagcttatgggagcaacagtaaactatcatggtgatactttagaaattgaccctagaggggtgcaagacatcccgatgccttacggaaagattaatagtcttcgagcttcctattatttctacggtagtcttttaggtcgttttggacaagcagttgttggcttacctggtggttgcgatttaggaccaagaccaattgacttgcatttgaaggccttcgaggctatgggagttgaagtgtcttatgagggtgaaaatatgaatttatcgacaaatggtcaaaaaattcatggcgctcatatctatatggacaccgttagtgtcggtgctacaattaatactatggttgcggcaacaaaagctcaaggtaaaacggttattgaaaacgctgcacgtgagccagagattattgatgtggctactcttttgaataacatgggtgcgcatattcgtggagcaggtacagatattattacgatacaaggtgttcagaaattgcatggtactagacaccaagttattcctgatcgtattgaagcagggacttatatcgctttggcggcagctattggaaaaggtgttaagatcactaatgttctttatgagcatttagagagtttcattgctaagttagaagaaatgggtgtccgtatgacggtagaagaggatgctatctttgttgaaaagcaagaatccctcaaggctattacaattaaaacctctccttaccctggttttgccactgatttgcaacagccattaacgcccttgttgttaaaagcagatggtcgtggaacgattattgacactatatatgaaaagcgcattaaccatgtgccagagttgatgcgcatgggagcagatatctcagttattggtggtcaaattgtttatcaagggccgtctcgcctgacaggagctcaggtcaaagccactgatttacgtgccggagcggctctagtgactgctggtctaatagctgaaggcaagacagaaattactaatattgaatttatcttacgtggctatgctagtatcattgcaaaattaacagcactaggggcagatattcaattaatcgaagactaa

SEQ ID NO: 38439 - DNA, 1197 bp, Streptococcus pyogenes
atgtcagaacgtaaacttttcacgtctgagtccgtatctgaagggcatccagataagattgcagaccaaatttcagatgctattttagatgccattttagcagaagatccagaagcccatgtggctgcagaaacttgtgtttacacaggttctgttcatgtttttggagaaatctcaacaacagcatacattgatattaaccgtgtggtccgcgacaccattgcagaaattggttatacagaagcagaatatggcttttcagcagaatcagtgggagtacatccatcacttgtagaacaatctggagatatcgctcagggggttaatgaagctttcgaaagcagagaaggtgatactgatgaccttagccatattggagcgggtgaccaagggctcatgtttggttttgccatcaatgaaacaccagaattgatgcctttaccaatttccttatctcaccaattagtgcgtcgcttggcggaattacgtaagtcaggtgagattagttatctacgtccagatgctaaatctcaagtgacagttgagtacgatgaacacgataaacctgttcgtgtggatacagtcgttatttctactcagcatgatccagaagctactaatgaccaaattcgtcaggatgtgattgaaaaagtgatcaaggctgtaattccagcagattatttagatgatgacacaaagttcttcattaatccaacaggacgttttgttattggaggtccgcaaggagactctggattgaccggacgtaagattattgtggatacctatggaggctattcacgtcatggtggcggtgctttttcaggaaaagatgcgacaaaagtggaccgttcggcttcttacgctgctcgctatattgctaaaaaccttgtggcagcaggccttgtgaccaaagctgaagtccaactagcttatgcgattggggtggctcagcctgtgtctgttcgcgtggatacatttggaacctcaacggttcctgaagctgttttagaagctgctgttcgtcaagtctttgatttacggccagcaggcattattcaaatgcttgatttaaaacgcccgatttacaaacaaacagctgcctatggtcacatggggagaacagatattgatttgccatgggagcgtttaaataaggttgatgctttagtagaagctgtaaaaacagtattataa

SEQ ID NO: 38440 - DNA, 1671 bp, Streptococcus pyogenes
atgtatcaagctctttatcggaaataccggagccaaacgtttgacgaaatggtgggacaatcggttatttccacaactttaaagcaggcagttgaatctggcaagattagccatgcttatcttttttcaggtcctagagggactgggaaaacaagtgcggcaaagatttttgcaaaggccatgaattgtcctaaccaagtcgatggtgaaccctgtaatcaatgcgatatttgccgagatatcacgaatggaagcttggaagatgtgattgaaattgatgctgcctcgaataatggtgttgatgaaattcgtgacattcgagacaaatcaacctatgcgccaagtcgtgcgacttacaaggtttatattattgatgaggttcacatgttatcaacaggggcttttaatgcgcttttgaaaactttggaagaaccgacagaaaatgttgtctttatcttggcaacaacggaattgcataaaattccagccactattttatctcgtgtgcaacgctttgaattcaaagctattaagcaaaaagctattcgagagcatttagcctgggttttggacaaagaaggtattgcctatgaggtggatgctttaaatctcattgcaaggcgagcagaaggaggcatgcgtgatgctttatctattttagatcaggctttgagcttgtcaccagataatcaggtcgccattgcaattgccgaagaaattacaggttctatttccatacttgctctgggtgactatgttcgatatgtctcccaagaacaggctacgcaagctctggcagccttagagaccatttatgatagtgggaagagcatgagccgctttgcgacagatttattgacctatctgcgtgatttattggtggttaaagctggcggcgacaatcaacgtcagtcagctgtttttgataccaatttgtctctctcgatagatcgtatattccaaatgataacagttgttactagtcatctccctgaaatcaaaaagggaacccatcctcggatttatgccgaaatgatgactatccaattagctcagaaagagcagattttgtcccaagtaaacttgtcaggagagttaatctcagagattgaaacgctcaaaaatgagttggcacaacttaaacaacaattgtcgcagctccaatcgcgtcctgattcactggcaagatctgataaaacgaaacctaaaaccacaagctacagggttgatcgggttaccattttgaaaatcatggaagaaacggttcgaaatagccaacaatctcgacaatatctagatgctctaaaaaatgcttggaatgaaattctagataacatttctgcccaagacagagccttattgatgggctctgagcctgtcttagcaaatagtgagaatgcgattttggctttcgaggctgcctttaatgcagaacaagtcatgagccgaaataatcttaatgatatgtttggtaacattatgagtaaagctgctggtttttctcccaatattctggcagtaccaaggacagattttcagcatattcgtaaggaatttgctcagcaaatgaaatcgcaaaaagacagtgttcaagaagaacaagaagtagcgcttgatattccagaagggtttgattttttgctcgataaaataaatactattgacgactaa

SEQ ID NO: 38441 - DNA, 1428 bp, Streptococcus pyogenes
ttggcaaaacaatataaaaatttagtgaacggtgaatggaaactatcagaaaacgagattaccatttacgcaccagcaacaggtgaagagttaggatcagttccagcgatgacgcaggcagaggtagatgctgtttacgcttcagctaaaaaggctctatcagattggcgcgctttgtcttatgtggaacgtgcagcttaccttcataaagcggctgatattttagtacgtgatgctgaaaagatcggcgcgattctttcaaaagaagtagccaaaggtcacaaggcagctgtcagtgaagttattcgtaccgctgaaatcattaattatgcagcagaagaagggcttcgtatggaaggtgaagttcttgaaggtggtagcttcgaagctgcaagtaagaagaagattgctattgttcgtcgtgaaccagttggtttagttcttgccatctcaccttttaattatcccgttaacttggcaggttctaaaattgctccagctcttattgcaggaaatgttgttgctcttaaaccaccaacacaaggctctatttctggtttgttactagcagaagcttttgcagaagctggtattccagcaggtgtctttaataccattacagggcgaggttctgttatcggtgattatatcgttgagcacgaagcggttagctttatcaactttacaggttctactccaattggggaaggaatcggtaaattagcgggtatgcgaccaattatgcttgagcttggcggtaaggattctgctatcgttttggaagatgcagatcttgctttagcagcgaaaaatattgtagccggtgcttttggttactcaggccaacgttgtacagcggttaaacgtgttcttgtgatggacaaggtggcggatcaattggcggctgagattaaaacacttgttgaaaaactaagtgtcggaatgcctgaagacgatgctgatattacaccattaattgatacatcagctgctgattttgttgaagggttgattaaagatgcaactgataagggagctactgctttgacagcctttaatcgtgaaggcaatcttatttcacccgttctctttgatcatgtgacaactgacatgcgtttggcatgggaagagccgttcggcccagtattaccaattattcgtgtaaccactgtagaagaagccatcaagatttctaatgagtctgaatatggtttgcaagcttctatttttacaactaatttcccaaaagcttttggcattgctgagcaattagaagttggaactgttcaccttaacaataaaacacaacgtggaacagataatttcccattcttaggcgctaaaaaatcaggtgcaggggtacaaggagttaaatattctatcgaagctatgacaactgttaaatctgttgtatttgatatccagtaa

SEQ ID NO: 38442 - DNA, 1734 bp, Streptococcus pyogenes
atgacagaaatgcttaaaggaattgcagcctcagacggcgttgctgttgctaaagcatatctactagttcagccggatttgtcatttgagactgttacagtcgcagatacaaatgcagaagaagctcgccttgatgttgcactccaagctgcacaagacgagctttctgttatccgtgaaaatgcagtagaaagcttaggtgaagaagcagcagccgtttttgatgcccatttgatggttcttgctgatccagaaatgatcagccaggttaaagaaacgattcgcgcaaaacaaacgaatgcagaaacaggtcttaaagaagtgactgacatgttcatcaccatctttgaaggcatggaagataacccatacatgcaagaacgtgcagcggacatccgcgacgttgcaaaacgtgtgttggctcaccttttaggtgtaaaacttccaaatccagctacaatcaatgaagaatcaatcgttatcgcacacgatttgacaccttcagatactgctcaacttaacaaacaatttgtaaaagcatttgttacaaatatcggtggtcgtacaagtcactcagctatcatggcacgtacacttgagatcgctgcggtacttggaacaaatgatattacaaaacgtgttaaagatggtgatgtgattgccgttaatggtatcactggtgaagtgattatcgatccaagcgaagatcaagtacttgcttttaaagaagctggtgcggcttatgccaaacaaaaagcagagtggtctctccttaaagatgcgcacactgaaacagctgatggcaaacactttgaattggctgctaatatcggtacgcctaaagacgttgaaggtgttaatgacaatggtgctgaagctgttggcctttaccgtactgagttcttgtacatggattctcaagacttcccaactgaagacgaacaatacgaagcttacaaggcagtgcttgaaggcatgaatggcaaacctgttgtggttcgtacgatggatattggtggcgacaaggaacttccttactttgaccttccaaaagaaatgaatccattccttggtttccgtgctcttcgtatttccatctctgaaactggggatgccatgttccgcacacaaatgcgtgcgcttcttcgtgcctctgttcacggacaacttcgtattatgttcccaatggttgcgcttcttaaagaattccgtgctgcaaaagcagtctttgacgaagaaaaagcaaacttgcttgcagaaggcgttgcggttgctgatgacatccaagttggtatcatgattgagattcctgcagctgctatgcttgcagaccaatttgctaaggaagttgatttcttctcaattggaacaaacgaccttatccaatacactatggcagcagaccgtatgaacgaacaagtatcatacctttaccaaccatacaacccatcaatattacgtttgatcaacaatgtgatcaaagcagcgcacgctgaaggtaaatgggcaggtatgtgtggtgagatggcaggtgaccaacaagctgttccacttcttgtcggaatgggcttggatgagttttctatgtcagcaacttcagtacttcgtacgcgtagtttaatgaagaaacttgactctgctaagatggaagaatatgcaaatcgtgcgcttacagaatgttcaacagcagaagaagttcttgaactttctaaagaatacgtttctgaagattaa

SEQ ID NO: 38443 - DNA, 264 bp, Streptococcus pyogenes
atggcttcaaaagactttcacattgttgcagaaacaggtattcatgcgcgtccagcgactttgcttgttcaaacagctagcaaatttgcttcagacatcactcttgactacaaaggtaaagcagtaaatctaaaatcaatcatgggtgttatgagtcttggtgttggtcaaggtgcagatgttactatctcagctgaaggtgcagatgctgaagatgccattgcagcaattgaagaaacaatgactaaagagggattggcataa

SEQ ID NO: 38444 - DNA, 960 bp, Streptococcus pyogenes
atgactacatattatgaagcaattaactggaatgaaatcgaagacgtcattgacaagtcaacttgggaaaagttgaccgaacaattttggcttgatacccgtatccctttatcaaatgacttagacgattggcgcaaactttctcttcaagaaaaagatcttgttggcaaggtttttggaggattaaccctacttgataccatgcaatcagaaactggtgtcgaagctattcgtgctgatgttcgcactcctcacgaagaagctgtcttaaacaatattcaattcatggaatctgttcacgctaaatcttattcgtctatcttttcaaccttaaacaccaaaaaagaaattgaagagatctttgagtggactaataataatgagtttcttcaagaaaaagcacgtattatcaatgacatttacgctaatggagatgccttacaaaagaaagttgcctcaacatatctcgaaactttccttttttattctggctttttcacccctctttactatttgggaaataataagctagcaaatgttgctgaaatcattaaactaattattcgtgatgaatctgtacatggtacttatatcggttacaaattccagcttggttttaacgaactaccagaagatgagcaagagaattttcgtgattggatgtatgacctcctttatcagctgtatgaaaatgaagaaaaatacaccaaaacgctttatgatggcgtagggtggactgaggaagttatgacctttttacgctacaatgctaacaaagctcttatgaatttaggacaagatcctttattcccagatactgcaaacgatgttaacccaattgttatgaatggtatttcaacaggaacatcaaaccatgactttttctcacaggtagggaatggctatcttcttggttctgtagaagctatgtctgatgacgattataattatggactctaa

SEQ ID NO: 38445 - DNA, 2619 bp, Streptococcus pyogenes
atgaaagaattatcgtctgcacaaatccgccaaatgtggttggatttctggaaatctaaaggacattgcgttgagccttcagctaacttggttcctgtgaacgacccaacgcttctttggatcaactcaggtgttgcaaccttgaaaaaatattttgatggttcagtgattccagaaaatccacgtattaccaatgcacaaaaatcaattcgtactaatgatattgaaaatgttggtaaaacagcacgtcaccatactatgtttgaaatgcttggtaacttctcaattggagactatttccgtgatgaagctattgagtggggatttgaactcttgacaagtccagactggtttgatttccctaaagacaagctctacatgacttattacccagatgacaaggattcgtataaccgttggattgcttgtggcgttgaaccaagtcacttggtgccgatcgaggataacttctgggaaatcggtgctggtccttcaggtccagatacggagattttcttcgaccgtggtgaagatttcgatccagaaaatatcggacttcgcctcttggctgaagatatcgaaaacgatcgttacatcgaaatctggaacatcgttctctcacaattcaatgctgacccagccgtaccacgttcagaatacaaagaattaccaaacaaaaacattgatacaggtgctggtcttgaacgtcttgcagctgttatgcaaggggcaaaaacaaactttgaaactgacctcttcatgccaatcatccgtgaagtagagaagttgtcaggtaaaacttacgatccagatggcgacaacatgagtttcaaggttatcgctgaccacatccgtgcgctttcatttgctatcggtgatggtgcgcttcctggaaatgaaggtcgtggttacgttcttcgtcgtcttctccgtcgtgcggttatgcacggtcgccgtcttggcatcaacgaaactttcctttacaaattggttccgactgttggacaaatcatggaaagctactacccagaagtgcttgaaaaacgtgattttatcgagaaaatcgttaaacgtgaggaagaaacatttgctcgtactatcgatgcaggtagcggtcacttagattcattgcttgcgcagcttaaggctgaaggtaaggatactcttgaaggtaaagatatcttcaaactttatgatacttatggattcccggttgaattgacagaggaattggcagaagatgcaggctacaagattgaccacgaaggctttaagtcagccatgaaagaacaacaagaccgtgcgcgtgcagctgttgttaagggtggttcaatggggatgcaaaatgaaaccctagctggtattgttgaagaatcacgattcgaatacgacacatatagtcttgaatcaagtctttcagtcatcatcgctgataatgaacgtaccgaagctgtttcagaaggtcaagcccttcttgtctttgctcaaacaccattctatgctgaaatgggtggacaggttgctgacacaggtagaatcaaaaatgataagggtgacacagttgctgaggttgttgatgttcaaaaagcaccaaatggtcaacctctacacactgtaaacgttttagcatcactttcagttggaacaaactacacacttgaaatcaacaaagagcgtcgtttggctgttgagaaaaaccacacagctactcacttgctccatgcagctcttcacaatgttatcggtgaacacgcaactcaggctggttcattgaacgaagaagaattcttgcgctttgattttactcactttgaagcagtaagcaatgaggaacttcgtcacattgaacaagaagttaatgagcaaatttggaacgctcttacaatcacaacgactgaaactgacgttgaaaccgcaaaagagatgggagcaatggcgctttttggtgagaaatatggtaaagtggttcgtgtggttcaaattggtaattattctgttgaactttgtggtggaactcacttaaataattcttcagaaatcggtctcttcaagattgtcaaagaagaaggtattggttcaggcactcgtcgtattattgcagttactggtagacaagcttttgaagcttatcgtaaccaagaggatgccctaaaagagatcgctgctactgtaaaagctccgcaattgaaagatgcagcagctaaagtacaagctcttagcgactcgcttcgtgatcttcaaaaagaaaatgcagaacttaaagaaaaagcagcagctgcagcagctggtgatgtctttaaagatgttcaagaagctaagggcgtgcgcttcattgctagtcaagttgatgttgcagatgcaggggcacttcgtacatttgctgataactggaaacaaaaagactactctgatgtgcttgttctcgtagcagctattggtgagaaggttaatgtccttgttgcaagcaaaaccaaagatgtccacgctggtaacatgatcaaagaattggcaccaattgtagcaggtcgtggtggaggtaaaccagacatggctatggcaggtggtagcgatgcaagtaaaattgcagagctgctagcagcagttgctgaaatagtgtaa

SEQ ID NO: 38446 - DNA, 705 bp, Streptococcus pyogenes
atgaaaattattcgggtccaagatcagattgaaggtgggaaaatcgcttttaccttattgaaagatagcttagctaagggagctaagacgttaggattagcaacaggaagttcaccaattagtttttaccaagaaatggtcaaaagtcctttggatttttcggacttaacaagtattaacttggatgaatatgtcggtctttcagtagagagcgatcagagttatgattattttatgcgtcaaaacctttttaatgcgaagccttttaaaaagaattacttgcccaatggtttagcaaccgatgtcgaagcagaagctaaacgatataaccaaatcattgcagagcatccgattgattttcaagtgcttgggattgggcgtaatgggcacattggttttaacgaacctgggacctcttttgaagaagaaacgcatgtggtggatcttcaagaatcaaccattgaagccaatagtcgtttctttacaagtattgaggatgtgccaaaacaagctatctctatgggaattgcctccatcatgaagtccgaaatgattgttcttcttgcctttggacaagaaaaagctgatgcgatcaagggaatggtttttggaccaatcacagaacacctcccagcaagtattctccaaaaacatgatcatgttatcgtcattgtggatgaagctgctgcgtcacaattagactaa

SEQ ID NO: 38447 - DNA, 1029 bp, Streptococcus pyogenes
atgaatactaacaattttgattttgagttaccagaagaattgattgcccaaaccccactcgaaaaaagagacagttcaaaactattgattattgatcaccgtcaaaaaactatggttgatagccattttgaccatatcattgatcaattaaatccaggggatgccctcgtcatgaataacacccgtgtcttgcctgccagactttatggagaaaaacccgatactcatggtcatgtggaattgcttttgcttaaaaatacacaaggagatcaatgggaagttttagccaagccagccaaacggctcaaggttggtagccaagtcaattttggagatgggcgtctcaaagccaccattatcgacgaattagaacatggtggacgaattgttgaattcagctatgatgggattttcttagaagttttagagagcctcggcgaaatgccattgcctccttatattcacgaaaaattagaggatgctgagcgataccaaaccgtttatgctaaagaaaatggctctgcggccgccccaactgctggtctccacttcacaacagacttgctcaaaaaaatcgaagccaaaggggtacatttggtttatttgaccctacatgtagggcttgggacttttagacctgtttccgtggataacctcgatgagcatgatatgcattcggaattttattccctctcagaagaagcagcgcaaaccctaagagacgtcaaacaagctggcggtcgtgttgtcgctgtaggaaccacctctattcgtacgttggaaaccatcggaggtaagttccaaggggacattcaagctgattcaggttggaccaatatttttattaaaccaggctaccaattcaaggtagttgatgctttttcaactaatttccatcttccaaaatcaacccttgtgatgctagtatcagcctttgcagggcgtgactttgtccttgaagcttacagacacgcggttgacgaaaagtatcgtttctttagctttggcgatgccatgtttgtcaactaa

SEQ ID NO: 38448 - DNA, 819 bp, Streptococcus pyogenes
ttgaagagtgattttgactttcgaaaagtcagctttcgtgatacaataagtaagattattctattaaaggagaagcctgtgttttacgcttacttacgcggtttagtagtctttttattatgggttgtcaatggcaatgcccactaccatcatgaagaaaagatgttagatgcttctgagaattatattctggtagcaccccatcgaaccttttgggatccagtttacatggcatttgcagcacgtcctaagcagtttatttttatggctaaaaaagagttgtttgcaaatcgtctctttgcttggtggattaaaatgtgtggtgcttttcctattgatcgtgacaaaccgagtccagatgctattcgttaccctgttaatatgctcaaaaagagcaatcgttctcttcttatgtttccaagtggaagtaggcattcgcaagaggtcaaaggaggggtcgctgtgattgctaaattggctaaggtcaagattatgccagcagcctatcaggggcctatgtcggtcaagggattactagcgggagaacgggttgacatgacttttgggaatcccattgacgtctcagatattaaacgcatgaatgatgaagggattgctgaggtggcaaaccgtattcaggcagagtttgatcggattgatgacgagttggcacctttccaaccaggcaaagcaaggaaccctttaacttatctctaccgtttaccattaggattggttttggtggtggtattattattaaccatgttattttcctatattgctagttttgtttggaatccagataaacatcgccattaa

SEQ ID NO: 38449 - DNA, 2001 bp, Streptococcus pyogenes
atgtctgatagccatcttactgcctttgacaaagcttcaaaagcaggttttattattgctttaggtattgtttatggagatattggaacaagccccctttatacgatacagtctctagttgaaaatcaaggaggggttaatcaggtttctgaatcctttattttaggatcaatctctttaattatttggacactgaccttaatcacaacaatcaagtacgttttgattgctctaaaagcggataaccaccatgaaggtgggattttttctttattcaccttggtacgtaaaatgtcaccgtggctcattattccggcgatgattggaggtgcaacacttttgtctgatggggctcttacacctgcggtaacagttacttcagctattgagggcttgaaagccgttcctggtctgagtcacatctaccaaaatcaaaccaatgtcattatcacaactctagtgattttaatagtcttgtttggtattcagcggtttggaacaggttttattggtaaaatttttggaccagttatgtttatctggtttagttttctaggtgttagtggtttttttaatacgttggggcatctggaaattttcaaggctatcaatccttactatgctctgcatttgctgtttagtcctgaaaaccatcgtgggatttttatcttggggtccatttttcttgcgacaacaggagctgaagctctttattcggatttaggacatgttggtcgaggaaatatttacgtgagctggccctttgttaagatgtgtattgtgttgtcttactgtggccaggctgcgtggattttagcgaataaacactcaggtattgaactaaaccctttctttgctagtgtgccatcacaattaagagtttaccttgttagtttggcaaccttggcagctattattgcctcacaggctcttatttcaggctcctttaccttggtttcagaggccatgcgtttgaaaattttccctttgtttcgtgtgacttacccaggggcaaatttggggcaattgtatattcctgtcattaactggattttatttgcagtgacctcttgtactgttttggcttttagaacatcagcccacatggaggcagcttatggtcttgctattaccatcaccatgttgatgacaacaatcctcttaaagtattacttaatcaagaaaggaacgagacccatcttggctcatttagtgatggctttctttgcccttgtagaattcattttcttcttggcttcagctatcaaatttatgcacggtggctatgcggttgttatcttggcacttgcaattgtctttgtcatgtttatctggcatgcgggcacacggattgttttcaagtatgtgaaatctcttaatttgaatgattacaaggagcagattaaacaacttcgtgacgacgtttgttttgacctctaccaaacaaatgttgtctacctatccaatcgtatgcaggatcatatgattgaccggtctattttatactccattttagacaagcggccaaaacgcgctcaagtttattggtttgtaaatgtccaggtaactgatgaaccttatacagctaagtacaaggtagatatgatgggaacggattatatggttcgagtcaacctttatcttggttttagaatgccacagactgtgccacgctatttgcgcacgattgttcaggatttgatggaaagtggccgtttacccaaacaagaacaggaatataccatcacacctggtcgtgatgttggtgattttcgctttgttttaatagaagaacgggtctccaatgcacgtcaattgagtaactttgaacgctttattatgcagactaaggcaagcattaaacatgttaccgctagtccaatgcgttggtttgggcttcaatattcagaagtaacccttgaagtggttcccttgattctatcagatgtcttgaagttaccaatcaaagaattggtgcctgtggaagacagtgaagcataa

SEQ ID NO: 38450 - DNA, 1620 bp, Streptococcus pyogenes
ttgaaatttacagaatttaacttatcacaagacatccaatcagctgttgttaccgctggttttgagaaagcatctcctatccaggaaatgacgattcctctcgcactagaagggaaggatgttattggtcaagcacaaacaggaactggtaaaacagcagcgtttggtctaccaaccttgaataagattcgtactaacgaaaatatcatccaagcattggtcattgcaccaacgcgtgaattggctgtacaaagtcaggaagaattgttccgttttggacgtgaaaaaggggttaaggttcgctctgtttacggtggatcaagtattgaaaaacaaatcaaagcccttaaatcaggtgcccacattgtcgtgggaacaccgggtcgcttgttagatttgattaagcgcaaggctcttattttagatcatgtggaaaccttaatccttgatgaagcagatgaaatgcttaacatgggattcttggaagacattgaagctattattagtcgtgtcccagcagaccgtcaaaccttgctcttctccgcaacgatgccggcacctattaaacaaatcggggttaaattcatgaaagaccctgaacatgttcaaattaagaacaaagaattaacaaacgtcaatgttgatcaatactatgttcgtgtgaaagaacaagaaaaatttgatactatgacccgtctgatggatgttaaccagccagaattatccatcgtttttgggcggactaagcgccgagttgatgaaattacacgtggcttgaaacttcgtggtttccgtgccgaaggaatccatggtgatcttgaccaaaataaacgcttacgtgttatccgtgatttcaaaaacgaccaaattgatattcttgttgccactgatgtagcagcgcgtggccttgatatttcaggagttacccacgtttataactacgatattacccaagatccagaaagttatgttcaccgtattggtcgtacaggtcgtgccggtaaatctggtgagtctatcacttttgtctcaccaaatgagatgggctacctctcaatgattgagaacttaacgaaaaaacagatgaaacctcttcgtccagcaactgctgaagaggcctttcaagccaagaaaaaagtagccctcaagaaaattgaacgcgactttgcggatgagactattcgttcaaactttgataaattcaaaggcgatgctgtccaattggctgccgaattcactcctgaagaattagctttatatattttgagcttaacggttcaagatccagatagcttaccggaagttgaaattgcacgtgaaaaaccattaccattcaaatatgtgggtggtggtcacggcaataaaaatggcaaaggtggtcgtggacgtgacaaccgtaaccgtggtgatcgccgtggcggctatcgtggtgaccgtaacagagatgagcgtgatggtgaccgtcgtcgtcaaaaacgtgataagcgtgatggtcacgatggcagtggcaaccgcgatttcaaacgtaaatcaaaacgtaatagtaaagactttttcaataaagagaaaaaatcaagtgctaaaaatactggttttgtgattcgtcacaaaggtgaataa

SEQ ID NO: 38451 - DNA, 1545 bp, Streptococcus pyogenes
atgtcacttacagaagaaattaaaaaacgccgtacttttgccatcatttctcacccggatgctggtaagacgactattactgagcaactattatattttggtggtgaaattagagaagcagggacagtaaaaggcaaaaaatcaggtacgtttgcaaagtccgactggatggatattgaaaagcaacgtggtatctctgttacttcatctgttatgcaatttgattacgcgggtaaacgtgttaatattttggatacacctggacatgaggatttctcggaagatacataccgtaccttaatggctgtggatgcggctgtcatggttgtagattcggctaaaggtattgaggcgcaaacgaaaaaactttttgaagttgtcaaacatcgtaatattcctgtcttcacctttattaacaagttagaccgtgatgggcgtgagcctttagaactcttggaagaattagaagaagttttagggattgcttcttatccgatgaactggccgattggtatgggacgcgcctttgagggcttatatgatttacataataaacgtttagaactctataagggagacgagcgttttgcaagtattgaagacggtgatcagctgtttgccaataatcccttttatgaacaagtcaaagaagatattgaacttcttcaagaagcaggtaatgacttttcagaacaagctattcttgatggtgacctaactccagtcttttttggctctgcccttacgaactttggagttcagacttttcttgatactttcttggagtttgccccagaacctcatggtcacaagactacagaaggtaatgttgttgaccccttagctaaagatttttcaggttttgtctttaaaattcaagctaacatggaccctaaacaccgtgaccgtattgcttttgtgcgtattgtttctggtgaatttgagcgcggtatgggagttaatttgacacgcactggcaaaggcgctaagctctccaatgttactcaatttatggcagaatcacgggaaaatgtgacgaatgctgttgctggggatattatcggggtttatgatacaggaacttatcaagttggggataccttaacagttgggaaaaataaatttgaatttgaacccttaccaacttttaccccagaaatcttcatgaaggtttctccgaaaaatgttatgaagcagaaatccttccacaaaggtattgaacaattagtacaagaaggagcaattcagctttataagaattatcagacaggcgaatacatgctgggtgctgtgggtcaactgcagtttgaagtctttaaacatcgtatggaaggtgaatacaacgctgaagttgtgatgacaccaatgggtaaaaagactgttcgctggatttcagaagatgatttggatcaacgcatgtcttcaagccgaaacattttagctaaggatcgttttgaccaaccagttttcctatttgaaaatgattttgcccttcgctggtttgcagacaaatacccagatgtcactttagaagagaaaatgtaa

SEQ ID NO: 38452 - DNA, 1392 bp, Streptococcus pyogenes
atgaaattaaccttacacgaagtggctaaaatagttgacgcccaaaataatgtgtctgacttagacgacgttcctctgcatcacattgaatttgatagccgaaagattacaaaaggagacctctttttacccttaaaaggtcaaagggatggtcatgagtttattgatttagcctttcaaaatggagctgtcgctactttttcagaaaaagaattgccggggaaacctcaccttcttgttgaagactgcctaaaagcttttcaaaagctagcccattattatattgataagatgcgcgtggatgttattgctgtgacaggctcaaatggtaaaacttccaccaaagatatgataggagctgtcctatcaaccacttacaaaacttacaaaacgcaaggaaattacaataatgagattggtttgccttacaccgttctccacatgcctgacgatacggaaaaaattgttcttgaaatgggacaagatcacatgggagatattcgtcttctgtctgaaattgcaaggcctcgtattgcagttttaaccttagtcggcgaagctcatttagaatattttggaagccgagacaaaatagcccaaggcaaaatgcagattgttgacggcatgaattcagatgggattttaattgctccgggagatccgattattgacccatatcttccagaaaatcagatggttatccgttttggaaatcagcaggaaattgacgttactggtattcaagaagacaaagatagcttaacgtttacaacaaatgtgttagcaacacctgtgtccctacctctaccaggaaaatacaacgcgaccaatgctatggtagcagcctatgtaggaaaactattggcagtaacagacgaggatattatagctgctttacagactgtgacgttgacaggtaatcgtacggagtggaaaaaagcagccaatggtgctgatattttgtcagatgtctacaatgccaacccaacagccatgcgtctgattttagaaacatttgctaacatagcaaagaaccccggaggaaaaaagattgcagtgctagcagatatgaaagaacttggaaaggattcagtgatacttcattctcagttaattgacagcttaacatcaggtaatattgatcagcttgttttttatggggatcatattaaagaattagcacggttggcaagtcaggtttatcctgctgagcaagtacattattttttaaaaactgaacaagaagaccagtttgaagccatggcacaatatgttcaaaacattcttaatccctttgatcaaattcttttaaaaggcagccactcgatgtcgctagaaaagttagtagatcgattagtgactgacaagaattgtgacagctatcagccttga

SEQ ID NO: 38453 - DNA, 1047 bp, Streptococcus pyogenes
atgtccaaacaaacgttagttctattatacggaggccgctcagcagaacgtgaagtctcagtgctttcagcagagagtgtgatgcgagcagtcaactatgataagttcttagtaaaaacttattttattactcagatgggccaatttatcaaaactcagcaattttcagaaaagccatcggaatcagaacgcttgatgacaaatgagacgatagagctaactcaaaaaataaaaccaagtgatatctatgaagaaggtgcagttgtatttcctgtattacatggacctatgggagaagatggctctatccaaggtttcttagaagtgcttagaatgccatatatagggactaatgtcatgtcttctagcatagctatggataaaattactactaaacgtgtcttagaatcaattggaattccacaagttgcctatactgtttatattgacggacaagatttggaggcttgtttagttgaaactttagcaagacttacttttcctatcttcgtaaaaccagctaatatgggttcttctgtggggatttccaaagcccaaacaaaagtagaattaagaaaagcgattcagttagccctgacctatgacagtcgtgtcttgattgaacaaggcgtggttgcaagagaaattgaagttggtctccttggaaatgataaggttaaatcaactctaccaggagaagtaatcaaggacgttgatttttacgactaccaggcaaaatatgttgacaataagattacgatggccattccagcagatgtagaccagagtattgtgacagaaatgcgttcttatgctgaagtagcctttaaagccttaggtggttgtgggttgtcccgttgtgactttttcttgacccaagatggacaggtttaccttaatgaattaaacaccatgccaggctttacccaatggtctatgtatccactcttatgggaaaatatgggattggcttatccagatttgattgaagagctggtgacactggcacaagaaatgtttgaccagcgtgagagccacctgatttaa

SEQ ID NO: 38454 - DNA, 597 bp, Streptococcus pyogenes
gtgctttatccaacacccattgcaaagttaattgacagttactctaaacttccaggaattggtatcaagacggcgacgagattagccttttatactattggaatgtcaaatgaagatgtcaatgattttgctaaaaacttattagcagctaaaagagaactgacctattgttcgatttgtggaaaccttaccgatgacgatccttgtcacatttgcacagacacgagtcgtgatcagacgaccattctggtagtagaagatgctaaagatgtttctgccatggaaaaaatccaagagtatcatggctattatcatgtgcttcacggcttgatttcgcctatgaatggtgtggggccagatgacatcaaccttaaaagtttaattacccgtctaatggatggtaaggtgagcgaagttatcgtagctaccaatgccacagcagatggggaagcaacgtccatgtatatttcacgtgtcttgaaaccagccgggattaaggtaactcgtttggcaagaggtctcgcagtaggttcagatattgagtatgctgatgaagtaacattattgagagctattgagaatcgtactgaactttaa

SEQ ID NO: 38455 - DNA, 1785 bp, Streptococcus pyogenes
atgagcagagacccaacatatacaataaacgagcacgacttatcttttgcagatggtcgtttttatgtgacctttaaggcagataagtcaagtgagactgtgagacttaacagtagttgccttggcaataccataatcaaaaagctacaggtcgaggatgacaatacaatgcacgactttgtaaagcctaaagttaccactcaacaagcttttggactagctcagcaggtcaaagagcttgatttacagctaaaagaccctaagtcagatttgtggggcaaaatcaagttcaataataaggcaatgctagtcgagtacgccaacaaagagatgtcaagtgccattgcgcaatcagctgagcagatattgttacaagtcaagtctattgatgatgaacgatattccaaatttgagcaaactctgaatggtatcaaacaaactgtcaaaagtgagtcagttgaatccgcacgtactcagctagcatcaatgtttgatagtcgtattagtggacttgatggcaaatacagtcgtttgagccaaacaattgatagtcttagcagtcgtcttgatgatggtgttggtaactactcaacgctatctcaaaaggtaagtggcattgatttacgagttagtaatgcagctaatgatgtttctcgattgtctcagacagcacaaggattgcagtcacaaatcacaaatgcaaaccaaaattacagcagtttgtctcagactgtacagggactacaaacaactgtacgtgataatcaatcaaatgctacaagtcggattaatcagttaagtgacctgatcagcacaaaggtatcaaaaggtgatgttgagacaactattgctcagagttacgacaagatagccttcgcaatcagggataaactcccagcaagcaaaatgtctggcagtgagattatctcggcaatcaatcttgataggtctggggttaaaatcactggaaaaaatatcactcttgatggtaacagctacatcagcaacgctgtcatcaaagatgctcatattgctaacatggatgccggtaagattaatactggttatcttaatgctaataggattgcaaccgaggccattactggtgagaaaattaagatggactatgccttttttaataaactcactgctaacgagggatattttaggacgttgtttgccaaagacatctttgcaacatcagtccaatctgtaacactatcagctagcaaaattactggaggtgtattagccgctacaaatggggcaagtcagtgggacctaaataatgccaatatgacctttaatcgagatgccacaattaattttaatagcaaaaacaatgccttagtacgtaaagatggcacacatactgcttttgtacattttagtaatgccacaccaaaaggctatagaggctcagcgttatatgcctctatcggcattacctcatcaggagatggcatcgacagcgcttcttccggtcgttttgcagggctaaggtcatttaggtacgctacgggatataaccatactgctgcagtcgaccaaaccgagctatacggtgataatgtcttgattgcagatgactttaacatcaatcgaggatttaaatttagaccagacaaaatggaaaaagtgctcgacatgaacgacttgtatgcggctgtagtagccttaggccgctgttgggggcacttggctaacgtcggctggaatactgctcatagcaattttacaagtgctgtgagtagggaattgaataactacatcactaaaatttaa

SEQ ID NO: 38456 - DNA, 276 bp, Streptococcus pyogenes
atggctaacaaacaagatttaatcgcaaaggttgcagaagcaactgaattgactaaaaaagattcagcagcagcagttgatgccgtgttttctacaatcgaagctttccttgctgaaggtgaaaaagtacaattgatcggttttggtaacttcgaagtacgcgaacgtgcagctcgtaaaggtcgtaacccacaaactggtgcagaaattgaaattgcagcttcaaaagttccagccttcaaagctggtaaagctcttaaagacgctgttaaataa

SEQ ID NO: 38457 - DNA, 861 bp, Streptococcus pyogenes
ttgcggttatggttcgttatgaataatcgtcatttatttagtgggatatttttctttgttattagtttatgtctggcctttttattgctaaatattattatccctaagtcaaattcacgtttgaaaaagagtgattttctgaaaaaagaacaagtagctatccaatatgttgctataggagattcattgacagaaggagtaggtgatctaactcatcaaggtggttttgttcctttgttaacgaatgatctcagtgaatattttaaggctaatgttaatcatcaaaattacggcgtatctggtgataccagtcaacaaattcttgataggatgataaaacaaaagcagatacagttatctttaaaaaaagcagatataatgacgttaaccgttggtggtaatgatgttatggcagttattcggaagaatttagcggatttgcaagtttctagttttagaaagccagctcgtcagtatcaaaaacgattaagacagattatcgagttagccagaaaagataataaagatcttcctatttttattttaggcatctataatccgttttatttgaattttccagaactaactgatatgcaaaaagtgattgatgactggaataccaaaactaaggaggttgttggagaatacgatcgtgtgtactttgtgccaataaatgacctcttgtataaagggataaatggacaagaaggaattgttcattcttcaggagatcaaactacaattgtcaatgatgccttgtttactggggaccattttcacccaaataatactggctatcaaatcatgtcaaatgcagtaatggagaaaattaaaaagcatgaaaaaaaaatcaaaccttaa

SEQ ID NO: 38458 - DNA, 873 bp, Streptococcus pyogenes
atggacaaattagctagaattgacgaagccattcgtcgctactataagacgactagtaacggtgtatctgaagagttgattgatgctatcttgtattctgttgacagtggtggcaagcgcattcgcccacttatcttattagagatgattgagggatttggggtatcgttacagaatgctcattttgatttggctgcagctcttgaaatgattcatacaggaagtctgattcacgatgatttgccagccatggataatgatgattaccgacgtggcagactgaccaatcacaaacaatttggagaagccacggccattttggcgggagacagcttatttttagacccctttgggttaatagctcaagctgaattaaatagtgaggttaaagtagccttaatccaagaactttccctagcttcaggaacttttggcatggttggtggtcagatgttagatatgaaaggggaaaatcaagcattaagtcttcctcagttgtcactgattcacctcaataaaaccggaaaattattagcttttccttttaaagcagcagctcttataacagaacaggctatgactgttcgtcaacaactagagcaagcgggaatgctcatcgggcacgcctttcagattagggatgatattttagacgtgacagctagctttgaagatcttggaaaaacgcctaaaaaggacttattcgcagaaaaagctacttatccaagtttactggggttagaagcctcttaccaactgctgacagagagtttagatcaggctttgacgatttttcagacactagaaagcgatgtaggctttaagcctcaaataattacaaaactgatagaagggttacgacttaatgcctaa

SEQ ID NO: 38459 - DNA, 1341 bp, Streptococcus pyogenes
atggcagattatttaaccgtcactcatttgacgaaatatttaaaattaaaatttgaccgtgacccttatttggaacgggtttatctgactggtcaagtgtccaattttcgaaaacgaccaactcatcaatatttttccttaaaagatgaaagtgctgtgattcaagccaccatgtgggcaggagtctataaaaaactaggattcgacctagaagaaggcatgaaaattaatgtaattgggcgagtccaactttatgaacctagtggctcttactctatcgtgattgaaaaggcagagccagatggtataggtgccttggctttgcagtttgaacaattaaagaaaaaattaacggcagaaggttattttgagcaaaaacacaagcagcccttgccacagtttgtatcaaaaattggggtcattacaagtcctagtggtgctgtgattcgagatattatcacaaccgtttcacggcgttttccaggggttgagattttattattcccaactaaagtacaaggtgatggagccgcccaagaagtagtggctaatattcgaagagccaatcaaagagaggatttggacttgctcattgtcggccgtggaggtggctcgatagaagacctttgggccttcaacgaggaaatagtggttcaggctatctttgaatcgcaacttccagtgatttcgagtgtgggtcatgaaacagacacgactttagcggattttgtggcagatcgcagagcagccacaccaacagcagcagcagagttagcaacgcctattacaaaaacagatcttatgtcttggatagtagagcggcaaaatcgttcctatcaggcctgcttgaggcggattaagcaacggcaagagtgggtggataaactctcgcaatctgttatttttaggcaaccagaacgattatatgatgcctacctgcaaaaaattgatcgccttagcatgaccctgatgaatacgatgaaagatcgtctgagttccgccaaagaaaacaaggttcagttggaccatgccttggccaatagtcaattacagacaaaaatcgagcgataccaagaccgtgttgctaccgctaagcgtttactgatggctaatatggctagtcaatatgatagtcagctggctcgctttgaaaaagcacaggatgctttgctatcactggatgccagccgaattatcgcccgtggttatgcaatgattgaaaaaaatcaagcactggtagcctctgtaagtcagataacaaagggtgatcagttaaccattaagatgcgtgatggacaattagatgtagaggtaaaagatgtcaaaaacgaaaacatttga

SEQ ID NO: 38460 - DNA, 2283 bp, Streptococcus pyogenes
atgctgtgtcaaaattgtaatttaaacgaatctactattcatctttatacaagtgttaatggaaaacaaagacaggttgatctctgtcaaaattgttatcaaatcatgaaatccgatcctgccaattctattttaaatggcctaaccccaggatatagagcacaagatagatccacaagtcctttctttgatgacttttttggtgatttgaataattttagagcttttggtaatcttccaaataccccacctactcaggcagggcaaaatggaaatggcggaggacgctatggtggtaactacaacggacaacgacctgctcagccacaaacaccaaatcagcaagcaaagggcttgttagaagagtttgggattaatgtcacagatattgcaagaaatggtaatattgatcctgttattggtcgtgacgaagagattacacgcgttatcgagatcctcaaccgccgtactaaaaataatcctgtgctaattggtgagcctggagttggtaaaactgctgttgtagaaggtttggctcaaaaaattattgatggtactgttcctcaaaaactccaaggcaagcaagtgattcgtcttgatgtggttagcctcgttcagggaacaggtatccgtggtcagtttgaagagcgcatgcaaaaattaatggaagaaattcgcaatcgcaaggatgtgattctctttattgatgaaattcatgagattgtcggtgctggttctgcaggagacggcaatatggatgctggtaatattttaaaaccagccttggcccgtggtgagttgcaactcgttggtgctactacattaaatgaataccgtattattgaaaaagacgctgccttagaacgacgtatgcaacccgttaaagttgatgaaccttctgttgaggaaaccatcacgattttaaaaggtatccaaccgaaatacgaagactatcatcatgtcaaatatagcccagccgctattgaagctgccgctcatttatctaaccgctatattcaagaccgttttcttcctgataaggctattgaccttctggacgaagctggttccaaaatgaatctaaccctcaactttgttgatcctaaagaaattgacaaacgtcttattgaagctgagaatctcaaggcgcaagctactcgagacgaagactatgaacgcgcagcttatttccgcgatcaaattacaaaatacaaagaaatgcaggctcaaaaagtcgatgagcaagatattcccatcattactgaaaaaaccattgaagctattgtagagcaaaaaactaatattccagttggggacttaaaagaaaaggaacagtctcaactcgtaaacttagccaatgatctgaaagcacacgtgatcgggcaagacgatgctgttgataaaatcgctaaggctattcgtcgtaaccgtgtgggattaggaactccaaatcgccctattggttctttcttattcgttggaccgactggggttggtaaaactgaattgtctaaacaactagccattgaactctttggttcgacaaacaatatgattcgctttgacatgtccgaatacatggaaaaacacgctgtcgccaaattagtcggggctcctccaggttatatcggctatgaagaagctggacagctaaccgaacaagttcgtcgcaatccatattcacttattctcttagatgaggtggaaaaagcccatcctgacgtcatgcacatgttcttacaagttcttgatgatggccgtttaacagatggtcaaggacgaacagtcagcttcaaggacaccattattatcatgacctctaatgccggaacaggtaaaagcgaagcttctgtcggatttggtgctgctagagaaggacggacaagttctgtccttggtgaattaagcaacttcttcagcccagagtttatgaatcgtttcgatggtattattgaattcaaagctttatctaaagagcatttgctgcatatcgttgatttaatgctggaagatgttaatgagcgcttaggctataatgggattcatcttgatgtgacacaaaaggtcaaagaaaaattagtagatttaggctatgatcctaaaatgggcgctcggccgctccgtcgtactattcaagattatatcgaagatgccattacagactattatttagaacacccaactgaaaaacagttacgtgcactgatgacaaacagtgaaaatatcacgattaaagctgttaaagagggagattcttttcttaacgaagagtctctcgattaa

SEQ ID NO: 38461 - DNA, 456 bp, Streptococcus pyogenes
atgatgattccaacatttggacataaaaatgcacataaagactatgtcacacgttacggtgtctatgctatcattcccaatcacgaacaaacaaaaattattcttgttcaagctcctaatggttcctggtttttacctggtggtgaaattgaagcaggtgaaggtcagcttcaggccctagagcgtgaactgattgaagaacttggtttttctgctactattggttcatattacggtcaggcagatgaatatttctactctcgccatcgtgatacccacttctaccatcctgcctatctttatgaagtaactgcatttcaagccgtttctaagcccttagaagattttaataacttaggttggttttctcctatcgaggcaattgctaaattaaaacgagagagccatcaatggggagtcaaggaatggcaaaaaaagcatcattctactaactaa

SEQ ID NO: 38462 - DNA, 2802 bp, Streptococcus pyogenes
atgaaattaaaagagacacttaatctaggaaaaacagcctttccaatgcgcgcaggtcttcctaataaagagccacaatggcaagcagcttgggaacaagcagagctttacaaaaaacgtcaagaattgaatgcaggtaagcctgcctttcatcttcatgatggacctccatacgctaacggcaatattcacgttgggcatgcccttaataaaatttcaaaagatatcattgtgcgttctaagtccatgtctggctttcaagcgccttatgtacctggttgggacacacacggccttccaatcgaacaagtcttggctaagcaaggaatcaaacgtaaggagatggatttagcagaataccttgagatgtgtcgtcaatacgctttaagtcaggttgataaacagcgagatgatttcaaacggttaggtgtttcggcagactgggaaaatccttatgtcactttggacccacagtttgaagctgatcaaattcgtgtttttggagcgatggctgaaaaaggttacatctatcgtggtgctaaacctgtttattggtcatggtcttcagaatcggccttggcagaggctgaaattgaataccatgacatcgattcaacctctttatactacgccaataaagttaaagatggtaaaggtatccttgatactaatacgtatatcgttgtttggaccacaacaccatttaccgttacagcatcacgcggtttgactgttggtcctgatatggattatcttgtggtgaaacctgctggttcagaccgtcaatatgttgtggcagaaggtcttttggatagccttgctggaaaatttggctgggaatcttttgaaactttagctagccataaaggagctgatttagagtacattgtgacagaacacccatgggatactgacgtagaagaattggttatccttggtgaccatgttacccttgagtcagggacagggattgtccacacagcaccaggttttggtgaggatgactacaatgttgggacaaaatacaaactggaagttgctgtgactgttgatgaacgtggcctaatgatggaaaatgcaggtccagatttccacggacaattttataacaaggtaacgccgattgtcattgataaacttggtgatcttttattggcacaagaagtgatcaatcactcttacccatttgactggcggacgaaaaaaccaatcatctggcgtgctgtaccgcaatggtttgcttctgtttctgatttccgtcaagatattttggatgaaattgaaaaaacaacctttcatccatcatggggtgaaacacgcctttacaatatgattcgtgatcgtggcgactgggttatttctcgtcaacgtgcttggggagttccgcttcctatcttctatgccgaagatggcacagctattatgactaaagaagtgacagatcatgtggctgatttgttccaagaaaatggatcaatcatttggtggcaaaaagaagctaaagacctattaccagagggcttcactcatccagggtcaccaaatggcgagtttacaaaagaaactgatatcatggacgtttggtttgactctggttcttcttggaatggagtcatgaatactaaagaaaatctttcctatccagcggatctatacttagaaggctctgaccagtatcgtggttggttcaattcatccttaattacatctgtggctgttaatgggcatgctccatataaggctattttatcgcaaggctttgttcttgatggtaagggcgaaaaaatgtctaaatcaaaaggcaatatcatttctcctaatgatgtggctaaacaatatggtgcagatattcttcgactttgggtagcttctgtggataccgataatgatgtccgtgtttctatggagatccttggtcaagtctctgaaacttaccgtaaaatccgtaacacccttcgcttcttgattgctaatacatctgatttcaaccctgctacggatacagtagcttatgcagatttaggaactgttgataagtacatgacaattgtctttaatcagttggtagcaacgattactgacgcttatgagcgttatgactttatggctatttacaaagcagtggtgaactttgttacggttgatttatcagccttctatcttgattttgctaaagacgttgtctatattgaagctgccaatagcttagaacgtcgtcgcatgcagacagtcttctatgatatcttggttaagattaccaagttattgacgccaatcttgcctcacactactgaagaaatctggtcttatctagagcatgagtcagaagcatttgttcaattggcagaaatgcctgtggcagaaaccttctcggctcaagaggatattttagaagcttggtcagctttcatgactttgcgtactcaagctcaaaaagctttggaagaagcgcgaaatgctaagattatcggtaaatcattggaagcccatttgaccatctacgctagtgaagaagtgaaaaccttattgactgctttagacagcgatattgctttgcttttgatcgtgtctcaattaaccattgctgacttggcagatgcgcctgcggatgcagtggcatttgaaggtgttgcctttatagtagaacatgccataggtgaagtttgtgagcgttcacgtcgcatcgacccaactactcgcatgcgttcttacaatgcatttgtctgtgatcacagcgctaaaatcattgaagaaaatttcccagaagctgtggctgaagggtttgaagagagtggcaaataa

SEQ ID NO: 38463 - DNA, 759 bp, Streptococcus pyogenes
atggcacttacaacgctagaaattaaagataaaacttttaagacaaaattccgaggatactgtgaagaagaagtcaatgaattccttgatattgttgttgatgattacgaagctcttgtacgtaaaaatcgtgataacgaagcaagaattaaagatcttgaagaaaaattatcttactttgatgaaatgaaagagtcacttagccagtctgtaatcttagctcaagaaacagctgaaaaagtgaaagcaacggctaatgcggaagcaacaaacttggttagtaaagcgacttatgatgctcagcatttattagatgaatctaaagctaaagccaatcaaatgttgcgtgatgcaactgatgaggctaagcgagttgcgattgaaacagaagaactaaagcgtcaaacacgtgtgttccaccaacgtttaatctcatctattgagtcacaattaagcttatcaaattcacctgaatgggatgaactgctacaaccgactgcaatctatcttcaaaattctgacgatgcttttaaggaagtcgtgaagaccgttcttaatgaagacattcctgaatctgatgatagtgcctcttttgatgcaacacgtcagtttactccagaagagttagaagaattgcaacgtcgtgttgatgaaagcaataaggagttagaggcttaccaacttgactctcaatctgattctacgactgagccagaggtaaatctcagtgaaacacaaacgtttaaattaaatatctaa

SEQ ID NO: 38464 - DNA, 657 bp, Streptococcus pyogenes
atggcttttaaagatacatttaacaagatgatttcttattttgacacggatgaggttaacgaagttgaagaagatgttgcagcatcaactgataacgttattccaagatcacaacaatcagtcagagcaagtagtcatccaaaacaagaacctagaaacaatcacgtacaacaagatcatcaagcgagatcccaagaacagacaaggtcacaaatgcatccaaaacatggcacttctgaacgctattatcagcagtctcagccaaaagaaggccatgaaatggttgacagaagaaaacggatgagcacttctagtattgcaaatcgccgtgagcagtatcaacaatcaacttgttcagatcaaacaactattgccttaaagtatcctcgtaaatatgaggatgctcaagaaattgtggatcttttaatagttaatgaatgcgttttgattgattttcagtttatgctagatgctcaggctagacggtgtttagattttattgatggtgctagtaaagtgctctatggtagcttacaaaaggtcggctcttcaatgtacttactggctccgtcaaatgtatccgtcaatatagaagaaatgactatcccacatactacacaagatattggctttgattttgatatgaaaaggcggtaa

SEQ ID NO: 38465 - DNA, 672 bp, Streptococcus pyogenes
atggatttactgacaaataaaaagaaaatttttgagactatccgcttatctacagaggcagcaaataggactaatgatagtgtttcagttattgctgtaacaaaatatgtggatagtacaattgcaggtcagcttatcgaagcaggaattgagcacattgccgaaaaccgtgttgataaatttcttgaaaagtatgatgcgttaaagtatatgccagtaaagtggcatttaattggtaccttacaacgtcgtaaagtcaaggaagttatcaattatgttgattattttcacgctctagattctgtgagattagctttggaaatcaacaagagagctgaccatcctgtgaagtgttttctacaagttaatatttctaaagaagagagtaaacatggttttaacatttctgagattgatgaagcgattggagaaataggtaagatggagaagatacagttagttggtttaatgactatggcaccagcaaatgccagtaaagaaagtattataactatttttcgacaagcaaatcaattaagaaaaaacttgcagttaaaaaaaagaaagaatatgccttttacagaattgagcatgggcatgagtaacgattatccaattgctattcaagaaggctcaacttttattcggattggtagagctttctttcactaa

SEQ ID NO: 38466 - DNA, 1320 bp, Streptococcus pyogenes
atggcattttcatttgatactgcatcaattcaaggtgcaattataaaagtaattggagtcggcggaggtggcggaaatgccattaatcgtatgattgatgaaggtgttgctggtgtcgagttcatcgcagcaaacacagacattcaggcattaagctcatcaaaagctgaaacggttattcaactaggccctaaattaactcgtggacttggtgctggaggacaacctgaagtaggacgtaaagctgctgaagaaagcgaagaaattttaacagaagctcttacaggagcggacatggtatttattactgccggtatgggtggtggctctgggacaggggctgcaccggttattgctcgtatcgctaaaagtttgggagccttgacagtagctgttgttactcgcccgtttggttttgaaggtaacaaacgtggtaattttgctattgaaggtatcgaagaactacgtgaacaagttgatactttgttaattatttcaaataataaccttcttgagattgttgataaaaagacacctttattagaagcacttagtgaagctgataatgttttacgccagggagttcaagggataaccgacttaattactagtcctggccttatcaatctcgattttgccgacgtgaaaacagttatggcaaataaagggaatgccttgatggggattgggattggctctggagaagagcgcattgttgaggcggcgcgtaaggcaatctattcacccctattagaaacgactattgatggtgcacaagacgttattgtgaacgttacaggaggtctcgacatgacacttacagaagctgaagaagcctctgaaattgttgggcaagctgctggtcaaggcgttaacatttggttaggaacatctattgatgatactatgaaagatgacatccgtgtgactgttgtagcaactggagtgcgccaagaaaaagccgaacaagtttcaggttttcgtcagcctaggacttttacccaaaccaacgcgcagcaagtagcgggtgcacaatatgcatcagatcaagcaaaacagtcggttcaaccagggtttgatcgtcgctcaaattttgattttgacatgggggagtctcgcgagataccaagtgcacaaaaggtaatttctaatcataatcaaaatcaaggttctgcttttggaaattgggatttgagacgtgataatatttctcgtccaacagaaggtgaattggataaccatcttaatatgtcaacgttctcagctaacgatgacagtgatgatgaattagaaacgcctccattctttaaaaaccgttaa

SEQ ID NO: 38467 - DNA, 1365 bp, Streptococcus pyogenes
atggctagaaatggcttttttactggtttggacattggaacaagctcgataaaagttttagtagcagaatttatttctggtgagatgaacgtcattggtgttagtaatgttccaagtaccggcgtaaaagatggcataataatcgatatagaggcagctgcgactgccatcaaaactgcggtagaacaagcagaagaaaaagcagggatgacaattgaaaaggttaatgttgggctaccggcaaaccttcttcaaattgaaccaacacaaggaatgattcctgtcccaagtgagtctaaagagataaaagatgaggatgttgatagcgttgttaaatcggctttaacaaaaagtatcacaccagaacgagaggttatctctttagttccagaagagttcattgtggatggctttcagggcattcgagatccacgtggtatgatggggattagattagagatgcgcgggcttatttatactggaccaagcaccattttacataatctgcgtaaaacggtagaaagagcaggcattaaagttgaaaacatcattatttctccgttagctatggctaaaaccattttaaacgaaggtgagcgcgagtttggagctactgtaattgatatgggaggtggacagacaactgtcgcttctatgcgagcacaagaattgcagtataccaatatatatgccgaaggcggcgaatacattactaaagatatatcaaaagtattaaaaacgtctttggctattgcagaagcacttaagtttaattttggtcaagcggagatatcagaagctagtataactgaaacagtaaaagttgatgtggtaggtagtgaagagcctgttgaggtaactgaacgttatttatctgaaattatttcagcgcgtattcgtcatattttagatcgtgtgaagcaagatttggaaagaggtcgtttactagacttaccaggaggcattgttttgattggtggcggtgcaatcatgcctggagtggtagaaattgcacaagaaatctttggagtaactgtaaagctccatgttccaaaccaagtcggtattagaaatccaatgttttcaaacgttatcagtttggtagaatatgttggtatgatgtctgaagtagacgttttagcacaaactgcagtttcaggagaagaacttttgcgacgcaagcctatcgatttcagtggccaagaatcttatttaccagattatgatgattcaagaagaccagaatcgaccattggctatgaacaacaagcgtcacaaacagcatatgattcacaagttccgagtgatcctaaacaaaaaatttcagaacgtgttcgtggcatatttgggagtatgtttgattaa

SEQ ID NO: 38468 - DNA, 1149 bp, Streptococcus pyogenes
atggcaaaagataaagagaaacaaagtgatgacaagctcgttttgacagagtggcaaaagcgtaacattgaatttttaaagaaaaagaagcagcaagctgaggaagaaaaaaaactcaaagagaaattattgagtgataaaaaagcgcagcagcaagctcaaaatgcttctgaagcggttgagcttaaaactgatgagaaaactgatagtcaggaaattgagtcagaaacgacgtcaaaacctaaaaaaaccaaaaaagttagacaacccaaggaaaaaagcgcgacacaaatcgcttttcaaaaatccttgcctgttcttttgggggcgctcttactcatggcggtgtctatttttatgatcactccttatagcaaaaagaaagagttttctgtaagaggaaaccatcaaacgaaccttgacgaattaatcaaagctagcaaagtcaaagcatctgactattggttaacgctgttaacttcgcctggtcagtatgaacgaccgattcttcgtactattccatgggtgaaatctgtacatctctcttaccaatttcctaatcactttctatttaacgttattgaatttgaaatcatcgcttatgcacaagttgaaaacggttttcagcctattttggagaatggaaaacgtgtggacaaggtcagggcatcagaactaccgaaatctttcttgattcttaatttaaaagatgagaaagcgatccaacagttagttaagcaattaacgacattacctaaaaaattagtcaagaatatcaagtcagtgtctcttgcaaattccaaaacgacagcggatttactacttattgaaatgcatgacggtaatgtagttagagtaccgcagtcacaactcacattgaaacttccctattatcaaaaattgaaaaaaaaccttgaaaatgatagtatagtggatatggaagtgggaatttatactacaacacaggagattgaaaatcaacctgaagttcctcttacgcctgaacaaaacgcagctgataaagaaggagataagcctggtgaacatcaggaacagacagacaatgattcagaaacgccagcaaatcagagtagtcctcagcaaacaccaccatccccagaaacggtcctcgaacaggcccatggctag

SEQ ID NO: 38469 - DNA, 1083 bp, Streptococcus pyogenes
atgcctaagaagattttatttacaggtggtggaactgtaggtcatgtcaccttgaacctcattctcataccaaaatttatcaaggacggttgggaagtacattatattggtgataaaaatggcattgaacatacagaaattgaaaagtcaggccttgacgtgacctttcatgctatcgcgacaggcaagcttagacgctatttttcatggcaaaatctagctgatgtttttaaggttgcacttggcctcctacagtctctctttattgttgccaagcttcgccctcaagcccttttttccaaaggtggttttgtctcagtaccgccagttgtggctgctaaattgcttggtaaaccagtctttattcatgaatcagatcggtcaatgggactagcaaacaagattgcctacaaatttgcaactaccatgtataccacttttgagcaggaagaccagttgtctaaagttaaacaccttggagcggtgacaaaggttttcaaagatgccaaccaaatgcctgaatcaactcagttagaggcggtgaaagagtattttagtagagacctaaaaaccctcttgtttattggtggttcggcaggggcgcatgtgtttaatcagtttattagtgatcatccagaattgaagcaacgttataatatcatcaatattacaggagaccctcaccttaatgaattgagttctcatctgtatcgagtagattatgttaccgatctctaccaacctttgatggcgatggctgaccttgtagtgacaagagggggctctaatacactttttgagctactggcaatggctaagctacacctcatcgttcctcttggtaaagaagctagccgtggcgatcagttagaaaatgccacttattttgagaagaggggctacgctaaacaattacaggaacctgatttaactttgcataattttgatcaggcaatggctgatttgtttgaacatcaggctgattatgaggctactatgttggcaactaaggagattcagtcaccggacttcttttatgaccttttgagagctgatattagctccgcgattaaggagaagtaa

SEQ ID NO: 38470 - DNA, 1359 bp, Streptococcus pyogenes
atgaaagtgataagtaattttcaaaacaaaaaaatattaatattggggttagccaaatcgggcgaagcagcagcaaaattattgaccaaacttggtgctttagtgactgttaatgatagtaaaccatttgaccaaaatccagcggcacaagccttgttggaagaggggattaaggtcatttgtggtagccacccagtagaattattagatgagaactttgagtacatggttaaaaaccctgggattccttatgataatcctatggttaaacgcgcccttgcaaaggaaattcccatcttgactgaagtagaattggcttatttcgtatctgaagcgcctattatcgggattacaggatcaaacgggaagacaaccacaacgacaatgattgccgatgttttgaatgctggcgggcaatctgcactcttatctggaaacattggttatcctgcttcaaaagttgttcaaaaagcaattgctggtgatactttggtgatggaattgtcctcttttcaattagtgggagtgaatgcttttcgccctcatattgctgtcatcactaatttaatgccgactcacctggactatcatggcagttttgaggattatgttgctgctaaatggatgattcaagctcagatgacagaatcagactaccttattttaaatgctaatcaagagatttcagcaactctagctaagaccaccaaagcaacagtgattcctttttcaactcaaaaagtggttgatggagcttatctgaaggatggaatactctattttaaagaacaggcgattatagctgcaactgacttaggtgtcccaggtagccacaacattgaaaatgccctagcaactattgcagttgccaagttatctggtattgctgatgatattattgcccagtgcctttcacattttggaggcgttaaacatcgtttgcaacgggttggtcaaatcaaagatattaccttctacaatgacagtaagtcaaccaatattttagccactcaaaaagctttatcaggttttgataacagtcgcttgattttgattgctggcggtctagatcgtggcaatgaatttgacgatttggtgccagaccttttaggacttaagcagatgattattttgggagaatccgcagagcgtatgaagcgagctgctaacaaagcagaggtctcttatcttgaagctagaaatgtggcagaagcaacagagcttgcttttaagctggcccaaacaggcgatactatcttgcttagcccagccaatgctagctgggatatgtatcctaattttgaggttcgtggggatgaatttttggcaacctttgattgtttaagaggagatgcctaa

SEQ ID NO: 38471 - DNA, 1842 bp, Streptococcus pyogenes
atgactaacttaagaaacgatatccgtaacgtagcgattattgcccacgttgaccacggaaaaacaacacttgtagatgaattattaaaacaatcccatactcttgatgagcgtaaagagcttcaagagcgtgccatggattccaatgaccttgaaaaagaacgtgggattacaatccttgcgaaaaatacggcagtagcctataacgatgttcgtattaacatcatggataccccaggacacgcggacttcggtggtgaagttgaacgtatcatgaaaatggttgacggggttgttcttgttgtggatgcctacgaaggaacaatgccccagacgcgtttcgtattgaaaaaagcacttgagcaaaaccttatcccgatcgttgtggtgaacaagattgacaaaccttcagctcgtccagcagaagttgtagatgaagtgcttgaattattcatcgaacttggtgccgatgatgagcaattggaattcccagttgtttacgcatcagctattaatggaacatcatcattatcagatgaccctgctgaccaagagcatactatggcaccgatctttgatacgattattgatcatattccagcgccagttgataattcagatgagcctttgcaattccaagtgtcacttttggactacaacgatttcgtaggtcgtatcggtatcggtcgtgttttccgtggtactgttaaagtgggtgaccaagtaactctttcaaaacttgatggtaccactaaaaacttccgtgttacaaaactgtttggtttcttcggtttggaacgtcgtgaaattcaagaagctaaagcaggtgacttgattgctgtttcaggtatggaagatatctttgttggagaaaccattacaccaactgactgtgtggaagctctgccaattcttcgtattgatgagccaacacttcagatgactttcttggtcaataactctccttttgcaggtcgtgaaggtaaatggatcacgtcacgtaaggttgaagaacgtcttttagcagaattgcaaacagacgtgtcacttcgtgttgacccaacagattcgccagataaatggacggtttcagggcgtggagaattgcatttatctatcctcattgaaaccatgcgccgtgaaggctatgaacttcaagtatcacgtccagaagttatcatcaaagaaattgatggtgtcaaatgtgaaccgtttgagcgtgttcaaattgatacaccagaagaatatcagggtgcaatcatccagtctctttcagaacgtaaaggggatatgcttgatatgcagatggttggtaatggtcaaacgcgtttgattttcttgattcctgcacgtggtttgattggttattcaacagagtttctttcaatgacacgtggatatggtatcatgaatcatacttttgatcagtatctaccggttgttcaaggagaaatcggtggccgtcatcgtggtgccttggtttctattgaaaatgggaaagcaacgacatattcaatcatgcgtattgaagaacgtggaactatctttgtcaatccaggtacagaagtttacgaagggatgattgttggtgaaaactcacgtgataacgaccttggtgttaacattacaacagctaagcaaatgacaaatgtccgttcagcgactaaagatcaaactgcagttatcaagacgcctcgtatcctaacgcttgaagaatcattagagttcttgaatgacgacgaatacatggaagtaacgccagaatctatccgcttgcgtaaacaaatcttgaataaagctgcgcgtgataaagctaataaaaagaaaaaatcagccgaatag

SEQ ID NO: 38472 - DNA, 390 bp, Streptococcus pyogenes
atgtctccaatcacacttatcttatggttacttcttgtcggcattgttggttattatacatggaactatttctcttttcgaaaaatggcaaagcaggttgataacgagacttttaaagacgtgatgcgtcaaggtcaattgattgatttacgagagccagcggcttttagaactaagcatattttaggagctcgaaattttccagcgcaacaatttgatgctgctattaagggactacgcaaggacaaacctgttcttatttacgaaaatatgcgtccccagtaccgtgtgcctgcggtcaaaaaacttaaaaaagctggctttgaagacgtttatgtcttaaaagacggtattgattattgggatggcaaagttaaacaaacaacctag

SEQ ID NO: 38473 - DNA, 972 bp, Streptococcus pyogenes
atgagtcaaaaattactggggattgatttaggtggtaccaccattaaatttggaattttaacagcagcaggagaagtccaagaaaaatgggcaattgagactaatattttagaaggaggcaaacatattgtccctgatatcatcgcttccatcaaacatcgcttagacttgtatggtctaagcagtgctgactttgtgggaattggtatgggatcaccaggagcggttgaccgtgatactaatacagttactggggcattcaaccttaattggaaagaaacccaagaagtcggttccgttgttgaaaaagaattgggcattccttttgccattgacaatgatgccaatgtggctgcccttggtgaacgttgggtaggtgctggtgaaaataacccagatgtcgtcttcatgacacttggaacaggtgtcggtggaggcattattgctgatggtaacttgattcatggtgttgcaggagcaggtggtgaaatcggccacatgattgttgagccagaaaatggctttgcttgtacttgtggctcacacggctgtttggaaacagtagcttcagcaacaggagttgtcaaagtggcacgtttactggcagaagcctacgaaggggattcagccatcaaagcagctattgacaatggtgaaggtgttaccagtaaagacattttcatggcggctgaagcaggggattcctttgctgattctgttgtggaaaaggttggttactaccttggccttgcttcagcaaatatttccaatatcttgaatccagactcagtggttatcggtgggggtgtgtcagcagcaggagaatttctacgctcacgtattgaaaaatactttgtgaccttcactttcccacaagtgaggtattcaactaaaattaagattgcagaacttggcaatgatgctggaattatcggtgcagctagccttgctcgacaatttatcacaaaatag

SEQ ID NO: 38474 - DNA, 528 bp, Streptococcus pyogenes
atgacaaacacactcgttgaaaatatttatgcttcagtaactcacaatatttctaaaaaagaagcatcaaaaaatgaaaaaactaaagctgttttaaaccaagctgtcgctgacttatctgtggctgcatctattgtgcaccaagtacactggtatatgcgtggtccaggtttcttgtaccttcaccccaaaatggatgaattacttgatagcttgaatgctaatttagatgaaatgagcgagcgtttgatcactattggcggagcgccttattctaccctagctgagttttctaaacactctaaattggacgaagcaaaaggtacttacgataaaaccgttgctcagcatttagcaagattggtcgaagtttacctttacctcagcagcctttaccaagttggtttggatattaccgatgaagaaggcgatgctggaacaaacgatttgtttacagcagctaagacagaggctgaaaaaaccatttggatgctccaagcagagcgtggacaaggcccagcactctaa

SEQ ID NO: 38475 - DNA, 645 bp, Streptococcus pyogenes
atggatttttcagaaaggtgtcaaatgaaaaaagaaatttcgccagaaatgtacaactataataaatttccaggtcccaaatttattcattttgaagagcaagttaaggctgaaggcattgatttgttactcttagaagatgttaagaacgcttttgatacgactagctttggtcaacgttatacagaagttctcctaaagtatgactatattgttggcgattggggaaatgaacagcttcgtcttaaagggttttataaggatagtgacgatatcaagaaaacgaatcgcatctcacgtttagaagattatattaaagaattttgcaattttggttgtgcttattttgttttagaaaatcttcatccacaagatattaaatttgaagaggagcgccaaccaagacgaaagaaatcacctaaatcaaaatcaaatcgtcgcaagccaaactattcaaatcagcagcccgcaacacctaagagcaaatcgaagcgggcatcaaaagaaaagcaacctgaaaaccaagcgtttaccagtcaaaaacgtcgaagtaatactaagcataaagaaaagtcaaaacgtaatcagactagtcaacttaataccaaaattagtcattttatcatcagaaagaaagataaataa

SEQ ID NO: 38476 - DNA, 951 bp, Streptococcus pyogenes
atgacgaaacaaaaaatcgtagtcgcacttggaggaaatgctattctttcaacagatgcgtcagcaaaagcacaacaagaagccttgatttccacatcaaaatcactggttaaattaattaaagaaggtcatgaagtcatcgtgacccacggcaatggcccacaagttggtaatctcttgttacaacaagcagcagcagattctgaaaagaatccggctatgcctttggatacttgtgttgccatgacagaaggtagcatcggtttttggttagttaatgccctcgataatgaattgcaagcccaaggtattcaaaaagaagtggcagctgttgtcactcaagtgatcgtggatgccaaagacccagcttttgaaaacccaacaaaaccaattggtccatttcttaccgaagaagatgccaaaaaacaaatggcggagtctggtgcaagtttcaaagaagatgcaggtcgtggctggcgtaaggttgtgccatcaccaaaaccagttggtattaaagaagccaatgtcatcagaagtctcgttgattctggcgttgttgtggttagtgctggtggtggcggtgtgcccgttgtggaagatgctactagcaagaccctgactggtgtggaagctgttattgacaaggactttgctagtcaaaccctttcagaattggtggacgcagacctctttatcgttttgacaggagttgataatgtttacgtcaacttcaacaaacctgaccaagccaaattggaagaagtgactgtctctcaaatgaaagaatacatcacacaagaccaatttgcaccaggtagtatgttaccaaaagtggaagctgccattgcttttgttgaaaacaaaccaaatgctaaagccattatcacatcgctcgaaaatattgacaatgtactatcagcaaacgctggaacacaaattatcgcagggtaa

SEQ ID NO: 38477 - DNA, 1494 bp, Streptococcus pyogenes
atgacagaagaaaaaaaacggggttttagaattccttcttcttacaccgttctttttatcattatagccatcatggcagtgttaacttggtttattccagctggcgcctacgaaaccgctaagggcggtggtgttatttcaggaacctacaaaacagtagcatccaatcctcaaggattttttgacatcttgatggctcccgttcgaggcatgttaggtgttgaaggcactgatggtgctattcaagtgtctttctttatcttaatggttgggggctttttaggagttgtcaacaaaacaggtgctcttgacacagggattgcgtcagtggttcgtaaaaacaaaggtagagaaaaaatgctgattgctattttaatccctttgtttgctctaggtggaacgacctatggtatgggggaagaaaccatggccttttacccacttttaattcctgttatgattgcggttggttttgacagtattgttgctgtagccattattttgattggttctcaaattgggtgtctagcctccactattaacccatttgcaactggtgtagcagctgatgctgctggtgtcagcattgcagatggaatgatttggcgtgttatccaatgggttattcttgtcggcatgtctatttggtttgtttacaattacgctagtaagattgaagaagacccaagtaaatcattggttgcagacaaggaagaagagcataaggaactcttccagttgcaaaattctggagaagacttaaacaagcgccaacgaaacgttttgaccatttttactttgacctttgtcattatgattcttagtttgattccgtgggaagattttggcatcaaattctttactaatatcaatacttggttaaccacaatgcctatcttagggggagttattgggaaaaccatgggagcatttggtacttggtatttcccagaaatcaccatgctctttatcatgatgggtgtcttagttgctattgtttatcgtatgagtgaagaagacttttttagctcttttttgactggtgcaggtgaatttttaggtgttgccatgatctgtgctattgcacgcggtattcaagttatcatgaatggtggtatgattacagccactatcttacacttaggtgaaacaagtctttctggtttatcttctcaagtttttgtgatattagcttatattttctacctcccaatgtccttcttgattccatcaacatcaggacttgctggggctacaatgggaattatggcaccgcttggacaattctcaaatgtccctgctcaccttgttattacagccttccagtcagcttctggaatcttaaacatgatttctccaacttcagcaatcgttatgggagcacttgcgcttggtcgcgttgaccttggtacttggtggaaattcattggtaaatttattgtaatggtgatgcttgtaagcgtgctattacttgtagttgcaacattcttttaa

SEQ ID NO: 38478 - DNA, 1014 bp, Streptococcus pyogenes
atgacacaagtatttcaaggacgtagcttcctagcagaaaaagattttacacgcgctgaattagaataccttattgatttttcagcacatttgaaagatttgaaaaaacgtggtgtgcctcatcactacttagaaggtaaaaacattgccctcttgtttgaaaaaacatcaactcgtacgcgtgcagcttttacaacagcagccattgacctaggtgctcacccagaatacctcggtgccaatgacatccaacttggtaaaaaagaatcaacagaagacactgctaaagtattgggtcgtatgtttgatgggattgaattccgtggctttagccaacgcatggttgaagaattggcagaattctcaggtgtgccagtttggaatggtttgactgatgaatggcacccaacccaaatgcttgctgactattttacagtgaaagaaaactttggcaaacttgaaggccttacccttgtttactgtggtgacgggcgtaataacgttgccaattcccttcttgtgactggtgctatccttggtgttaatgttcatatcttctcaccaaaagaacttttcccagaagaagagattgtgacattggctgaaggctatgctaaagaaagtggcgctcgtatccttatcacagaagatgctgacgaagctgttaaaggcgcagacgtgctttacacagatgtttgggtatcaatgggtgaagaagacaaattcaaagaacgtgttgaattgcttcaaccatatcaagtcaacatggaccttgttcaaaaagcaggaaatgacaagcttatcttcttgcactgcttgccagctttccatgacacaaataccgtttatggtaaagacgttgctgaaaaattcggcgtgaaagaaatggaagtcactgatgaagtcttccgcagcaaatacgctcgtcattttgaccaagctgaaaaccgcatgcacactatcaaagcggttatggcagcaacccttggtaacctctttattccaaaagtgtaa

SEQ ID NO: 38479 - DNA, 2649 bp, Streptococcus pyogenes
atgacagaactatcacctaaatacaatcctgccgaggttgaggcaggtcgctatcaaaaatggcttgatgcagatgttttcaagccatcaggagaccaaaaagcaaaaccgtattctatcgtgattccaccgccaaatgtgactggtaagttgcacttgggacatgcttgggacacaacacttcaagatattatcattcgtcaaaaacgcatgcagggctttgatacgctttggcttccagggatggaccatgcaggaattgcgacacaggctaaggtagaggagcgtctgcgcgagcaggggatttctcgttacgaccttggtcgtgacaaattcctagacaaggtctgggagtggaaagacgaatatgccactacgattaaagagcagtggggcaaaatggggctttctgtggactacagccgtgagcgcttcacccttgatgagggcttgtcaaaagcagttcgcaaggtttttgttgacctctacaaaaaaggctggatttaccgtggtgaattcatcatcaactgggatcctgctgccagaactgccctttctgacatcgaggttatccacaaggatgttgagggagctttctatcacatgaactatatgttggaagatggctcacgcgcccttcaagtggcaacaacgcgaccagaaaccatgtttggagacgttgccgttgccgtaaacccagaagatcctcgttacaaagatttgattggcaaaaatgttattttaccaatcgtgaataaattgattccaatcgtgggtgacgagcatgctgaccctgaatttgggactggagttgtgaaaatcacgcctgcccatgatcctaacgatttcgaggttggtcaacgccataatctaccacaagtgaatgtcatgaacgatgacggtaccatgaatgagttagctggcgactttgcaggcatggaccgttttgaagctcgtcaagctaccgttgctaaacttgaagaacttggcgccctagtaaacatcgaaaaacgtgttcactcagtaggtcactcagaacgttcaggtgcagtcgttgagcctcgtctatccactcaatggtttgtaaaaatggatgagcttgctaaacaagctatggacaaccaagaaacagatgaccgagtagatttctacccaccacgtttcaacgataccttcctccaatggatggaaaatgtccatgactgggtaatctctcgccaattatggtggggtcaccaaattcctgcttggtacaatgcagaaggtgagatttacgttggcgaagaagcaccagaaggtgatgactggactcaagatgaagatgttcttgacacttggttctcatctgctttatggccgttctcaactatggggtggcctgacacagatgtagaagatttcaaacgttatttcccaacctcaaccttagtaacaggttatgacatcattttcttctgggtgtcacgtatgattttccaatcgcttgaatttaccgggcgtcagccattccaaaatgtcctgattcacggtcttattcgtgacgaagaaggacgcaaaatgtctaaatcattggggaacgggattgatccgatggatgtcattgagaaatatggtgccgatagcttacgttggttcctctcaaacggctctgccccaggacaagacgtgcgtttctcatacgaaaaaatggacgcctcttggaatttcattaataaaatttggaatatttctcgctatatcctcatgaataatgaagggttgacattggaagatgctgaaagtaatgtggctaaggtagctgcctcagaagctggaaatgtgactgaccagtggattctccacaatctcaatgaaaccatcgctaaagtgacagaaaactttgacaagtttgagtttggtgtggcaggacacattctttacaactttatttgggaagaatttgccaactggtatgtggaattgaccaaggaagtgctgtatagcgacaacgaagctgaaaaagttatcacgcgctctgtccttctttatactttggacaagattttacgtctccttcacccaatcatgccatttgtaacagaagaaatttacgctcaatatgcccaaggttctattgtgacggtggactatcctgtggttcgcccagcttttgaaaatgaagctgcgcataaaggtgtggaaagtttgaaagacctgattcgtgcagttcgtaatgcgcgcgctgaagttaacgtggcaccatcaaaaccaatcaccattttggtgaagacagcagatagtgaattagaagactttttcaacagcaatatcaactacatcaaatgcttcactaaccctgaaaaattagaaatcagctcagccattgctgcgccagaactggctatgaccagcatcatcacaggtgctgaaatctacttgccactagcagatttgcttaacgtggaagaagaacttgctcgcctagataaagaactggctaaatggcaaaaagaactggacatggtcggcaaaaaactcggcaacgaacgctttgttgccaacgccaaaccagaagttgtccaaaaagaaaaagacaaacaagctgactaccaagctaagtacgacgcaacccaagaacggattgcagagatgaagaaaattaaatcatag

SEQ ID NO: 38480 - DNA, 753 bp, Streptococcus pyogenes
atgattgacattatgtctgactttcaaaataagacttgttctaagaataattttattgttggaccttgttccattgaatcttatgatcacattagattagcagcttcaagtgccaaaaaacttggttacaactattttagaggaggcgcctataaaccaagaacatctgctgcttcttttcaaggccttggcctgcaaggaattcgttacttgcatgaggtttgtcaggaatttggcttactatcggtcagtgaaatcatgtccgagcgccaattagaagaagcctatgactatctcgatgtcattcaggttggtgcccgcaacatgcaaaattttgaatttttaaaaaccttgtcacacatcgataagcctattttgtttaaacgaggcttgatggctactatcgaggaatatttgggcgccctttcctacttacaagacactggaaaatctaacattatcttatgcgaacgtggcgttcgtggctacgatgtggagactagaaatatgcttgatattatggcagtccctattattcaacaaaagacagatttaccgattattgtggacgtatctcattcgacaggcagacgagatttactcttacctgctgctaagatagcgaaggctgtcggtgccaatggcatcatgatggaggttcatcctgatcccgaccatgcgctgtcagatgctgcccagcaaattgattataagcaattagaacagttggggcaggaactttggcaagattaa

SEQ ID NO: 38481 - DNA, 879 bp, Streptococcus pyogenes
atgtcagaacgtttatcaggccacaccctgttggtctctttgcttgctacccctattcgtcatagtttgtctcccaaaatgcacaatgaagcctatgctaaactggggctggattatgcctaccttgcttttgaagtagggacagagcaattagcagatgccgtgcaagggattcgtgccttaggaattcgtggctccaatgtgtctatgccaaataaagaagctattttacccttattggatgacttgtccccagctgctgagttggtcggtgcagtcaatacggttgtcaataaggatggtaaaggacatctcgtggggcatattacagacggtataggagcgctcagagccttggctgacgaaggagtgtcggtaaagaacaaaatcattaccctagcaggagttggtggggctgggaaagctatcgctgtccagctcgcttttgacggcgccaaagaggttcgtttgtttaaccgacaagctacacgtctaagtagcgttcaaaagcttgtgacaaaactgaaccagctaacaaggactaaagtaacccttcaagacttggaagatcagactgcctttaaggaggccatcagggaatctcatctatttattgatgctacaagtgtaggaatgaagcctttagaaaatctaagtttgattaccgaccccgagctcattcgcccagacttggtggtctttgacatcgtgtacagcccagcagaaaccaagttactagcctttgcccgtcaacatggcgcccaaaaagtcattaatgggctaggaatggtgctttatcaaggagcagaagcttttaaattaatcactggtcaagacatgccagttgacgctattaaacctcttttaggtgatgagtaa

SEQ ID NO: 38482 - DNA, 1725 bp, Streptococcus pyogenes
atgagtgttaaaacattgggaaggtatgtgactaaccactttaagcagggttttttgattaatcgactgatgaaattatatagcctgctaattgtaagttttttcactttagcagctattggcttgagcagttattctattagtagtacttataaaagggtggatgctgaggcgcagatgcgattggaggagactctaggtagattgcagtcacaaaacgatattaccctacgggttttagaccagttggttggccgttcagaagattaccataatctctatcaatacatgacgttaaccccaaaccaatatttttcaaacgtttttgaagactgggaaaaaggaaaagacacggtcctattttctgaagaggtgaggcgtctttttgacttgtaccctgatgtgacttctatgaccctactgctagaggacagtagtgcttatctgtacgccgataaggtcattaagacgggtcgtttgctttatagcaagcctgaaaaagtaaccggaaatgttttagttcgctctattcgaaatccagaatcaggagatgtgacaggtcgtctttacctgacctttgacaaaccaccgactttggtagagacacagcaggatcactatttagctacttttgcttttgattactatggccgcaaactcttccatcaaggaggtcggagatttcctcatttagaggctgaggttaaaaaggctatcaaggcagatcgggcagctgatcttagtaatcttagcaaggcttatcggatgcagtacaatcgctcgggagacctcttggcttatgtggctgtcagaaaatcctatttattagcggaagctgtcaggacagtttttgtgtatggccttgtttctctacttttagcttggctgttattgcagttgctctttagggttttccgaaattatatccagcaggtttctgaaattacggatactgttgaaatggttgcagcaggcgatttgtctttaaccatcgacaacagccacatggaattggaactgtatcatatctcagaagccattaatcagatgttggccagcattaaagcttatattgacgaagtttatgtgttagaggtagagcaacgagatgcccaaatgagagctctgcagtctcaaatcaaccctcattttttatacaacacgttagagtatattcggatgtacgcccttagttgtcaacaagaagaattagcagatgtcatttatgcctttgcgagtctgcttcgcaacaatattagccaagataagatgaccaccttaaaagaagaactggctttttgtgaaaagtacatttacctttatcaaatgcggtatccagatagcttcgcttatcatgtaaaaattgatgagagtgttgctgacttagccattcctaaatttgtcattcaacctctcgttgaaaattattttgtgcatgggattgattatagtcgccatgacaatgcactaagcatcaaggctttagatgagacggatcatctcttgattcaggtgcttgataatggacgtggtattagtcaagagcgcttagcagatatggaaaaaaggcttcaagagcaccaaacaacaggcaatagctctattggtttgcaaaatgtttacctccgtctctttcatcattttcgagacagggtttcttggtccatggctaaggagccaaatggtggctttatcattcaaattaggattagaaaggatgcttga

SEQ ID NO: 38483 - DNA, 777 bp, Streptococcus pyogenes
atgaaaatcactaaaattgaaaagaaaaaacgcctctaccttatcgaattggataatgacgaatccctttatgtaacagaagatactattgttcggtttatgttgagtaaagataaagtccttgacaatgatcagcttgaagacatgaaacattttgcccaactgtcctacggcaaaaatttagccctttattttctttcctttcaacaacgcagcaacaagcaagttgctgattacctgcgcaagcatgagattgaagaacacattattgctgacatcatcactcaactccaagaagaacaatggatagacgacaccaaattggctgatacctacattcgccaaaatcagttaaatggtgataaaggtccccaagtcttaaaacaaaaattattacaaaaaggcattgcaagtcatgacattgatcctatcttatctcaaactgactttagccaactcgctcaaaaagtaagccaaaaactctttgacaaatatcaagaaaaattgccaccaaaagccttgaaagataaaatcacccaagcattactgaccaaaggcttttcatacgatctagctaaacatagcctcaatcaccttaattttgaccaagataatcaagaaatagaagatcttcttgacaaagaattagacaaacaatatcgtaaactcagtcgcaaatatgatggttataccttaaagcaaaagctctatcaggctctctaccgaaaaggctacaacagcgacgacattaattgcaagttaagaaattatttatag

SEQ ID NO: 38484 - DNA, 942 bp, Streptococcus pyogenes
atgactaaaatttacaaaactataacagaattagtaggtcaaacacctattatcaaacttaaccgtttaattccaaacgaagctgctgacgtttatgtaaaattagaagcttttaacccaggatcttctgttaaagatcgtattgctttatcgatgattgaagctgctgaagctgaaggtctgataagtcctggtgacgttattatcgaaccaacaagtggtaatacaggtattggtcttgcatgggtaggtgctgctaaagggtatcgagtcattattgttatgcccgaaactatgagcttggaaagacggcaaatcattcaggcttatggtgcagagcttgtcttaacacctggagcagaaggtatgaaaggggctattgcaaaagctgaaactttagcaatagaactaggtgcttggatgcctatgcaatttaataaccctgccaatccaagcatccatgaaaaaacaacagctcaagaaattttggaagcttttaaggagatttctttagatgcattcgtatctggtgttggtactggaggaacactttctggtgtttcacatgtcttgaaaaaagctaaccctgaaactgttatctatgctgttgaagctgaagaatctgctgtcttatctggtcaagagcctggaccacataaaattcaaggtatatcagctggatttatcccaaacacgttagataccaaagcctatgaccaaattatccgtgttaaatcgaaagatgctttagaaactgctcgactaacaggagctaaggaaggcttcctggttgggatttcttctggagctgctctttacgccgctattgaagtcgctaaacagttaggaaaaggcaaacatgtgttaactattttaccagataatggcgaacgctatttatcgactgaactctatgatgtaccagtaattaagacgaaataa

SEQ ID NO: 38485 - DNA, 1005 bp, Streptococcus pyogenes
atgaaaaaacgttactatgctcttgtttggctctactcaaccattaccattttatctattgtttttgtggtcatggataatttaggaatcacttttaactaccttcgcaatcatttatggcaggtcgaacgtctagggttttcgattttattgttgattgtttctgtgactttattattgttgttattgtggattattatggatgataacagtaagcgtaacatcaaccaaaatctaaaatatattctcaataatcgacgactctatctagatgagacatcagaaatcaatactaatttaagtcgactttctaaaaaaatgtctcacctgactgctaacatgcaaaagaaagaaagtgcttatattcttgatagccaagaagttgtaaaacaagagcgcaaacgaattgcaagagatttacatgacacagtcagtcaagagctattcgcttcgtcattgattttatcaggaatttcgatgagtttggaacaactggacaaaacacaattacaaacacagttaacaacggttgaagcaatgttgcaaaatgctcaaaatgatctacgcattctccttttgcatcttagacctaccgagctagctaatcggactttatctgagggccttcatatgattcttaaggaattaacagataaaagtgatattgaagtcatttataaggaaaccattgctcagcttcctaaaacaatggaagataatctttttagaattgcccaagaattcattagcaacacgttaaaacatgctaaagctagtcgaattgaagtttatctcaatcaaacctcaacagaattacaattgaagatgattgatgatggtgtaggatttgatatggatcaggtaagggatttgagttatggtctgaagaatattgaagaccgtgtcaatgatttagcaggaaacctacatttaattagtcaaaaaggcaaaggagtttccatggatattagactgccgatagtgaagggagatgacgatgagtaa

SEQ ID NO: 38486 - DNA, 1899 bp, Streptococcus pyogenes
atgattcagattggcaaattatttgctggtcgttatcgcattctgaaatctattggccgcggtggtatggcggatgtttatttagcaaatgacttgatcttggataatgaagacgttgcaatcaaggtcttgcgtaccaattatcaaacagatcaggtagcagttgcgcgtttccaacgagaagcgcgggccatggctgaattgaaccatcccaatattgttgccatccgggatataggtgaagaagacggacagcaatttttagtaatggaatatgtggatggtgctgacctaaagagatacattcaaaatcatgctccattatctaataatgaagtggttagaattatggaagaagtcctttctgctatgactttagcccaccaaaaaggaattgtacacagagatttaaaacctcaaaatatcctactaactaaggagggtgttgtcaaagtaactgatttcggcatcgcagtagcctttgcagaaacaagcttgacacaaactaattcgatgttaggcagtgttcattacttgtctccagaacaggctcgcggctccaaagcgacgattcaaagtgatatttatgcgatggggattatgctctttgagatgttgacaggccatatcccttatgacggcgatagtgctgttacgattgccttgcaacattttcaaaagcctcttccatctattatcgaggagaaccacaatgtgccacaagctttggagaatgttgttattcgagcaacagccaagaaattaagtgatcgttacgggtcaacctttgaaatgagtcgtgacttaatgacggcgcttagttataatcgtagtcgggagcgtaagattatctttgagaatgttgaaagtaccaaacccctccccaaagtggcctcaggtcccaccgcttctgtaaaattgtctccccctaccccaacagtgttaacacaggaaagtcgattagatcaaactaatcaaacagatgctttacagccccccaccaaaaagaaaaaaagtggtcgttttttaggtactttattcaaaattcttttttctttctttattgtaggtgtagcactctttacttatcttatactaactaaaccaacttctgtgaaagttcctaatgtagcaggcactagtcttaaagttgccaaacaagaactgtatgatgttgggctaaaagtgggtaaaatcaggcaaattgagagtgatacggttgctgagggaaatgtagttagaacagatcctaaagcaggaacagctaagaggcaaggctcaagcattacgctttatgtgtcaattggaaacaaaggttttgacatggaaaactacaaaggactagattatcaagaagctatgaatagtttgatagaaacttatggtgttccaaaatcaaaaatcaaaattgagcgcattgtaactaatgaatatcctgaaaatacagtcatcagtcaatcgccaagtgcgggtgataaatttaatccaaacggaaagtctaaaattacgctcagtgttgctgttagtgatacgatcactatgcctatggtaacagaatatagttatgcagatgcagtcaataccttaacagctttaggtatagatgcatctagaataaaagcttatgtgccaagctctagctcagcaacgggctttgtgccaattcattctcctagttctaaagctattgtcagtggtcaatctccttactatggaacgtctttgagtctgtctgataaaggagagattagtctttacctttatccagaagaaacacactcttctagtagctcatcgagttcaacgtcaagttcaaacagttcttcaataaatgatagtactgcaccaggtagcaacactgaattaagcccatcagaaactacttctcaaacaccttaa

SEQ ID NO: 38487 - DNA, 1323 bp, Streptococcus pyogenes
ttggcagataattggaaaaaaagtacgcgaggcaaagccctccttgtcattgaagctatttttgatcagggggcttacacaaacatagcgcttaatcagcaactaagcaataaagctttatctgctaaggacagagctctattaactgagattgtatatggtaccgtttcacgtaaaattagcttggaatggtatttagcccattatgtcaaagaccgagataaattggacaaatgggtttattatctccttatgctcagtctttatcaactgacttatttagataagttaccagcgcatgccattgttaacgatgcggttggtattgccaaaaatcgtggcaataaaaaaggtgcagagaagtttgtcaatgctattttacgtcaattcaccagccatcctctcccagatatggaaacaattaagcgtcgaaataagtattattcggtcaagtattcactgcctgtttggttggttaaaaagttagaagaccaatttggttctgacagatcagtggccatcatggaaagtttatttgtgcgtagtaaggctagtattcgcgtgacagaccctttgaagctagaggaagttgctgaggctttagatgcagaacgttcccttttatcagcaactggtttaaccaaagcgtcaggtcattttgcagccagtgattatttcacaaatggggacatcactattcaagatgaaagcagtcagcttgtagctcctactttaaacattgacggtgacgacataattcttgatgcgtgtagcgctccagggggcaagacctctcatatagcatcttacttaaaaacaggtaaagttattgccttagatctctatgatcataaactagagttggtgaaggaaaatgctaaccgcttaggagttgctgataacattgagacaagaaaactagatgccagagaggttcatcgtcattttgaaaaggatagctttgataagattttggtggatgctccttgctcaggaattggtttgattcgtcgaaaacccgatatcaaatataataaagaaagtcaaggtttcaatgctctgcaagctatccagctagagatattgtctagtgtttgtcaaaccttgcgtaaaggtggtataataacatacagtacttgcactatttttgatgaggagaatcgtcaagtcatcgaagcatttttacagagtcatcctaattttgaacaagtaaaactgaaccatacacaagcagatattgtcaaggatggttatcttattatcacaccagaacaataccagactgatggcttctttattggacaagtcagacgagtcttgtag

SEQ ID NO: 38488 - DNA, 1608 bp, Streptococcus pyogenes
atggttaatattattttattaattgtttctgccctcattggtttaatattaggttatgcacttatttcgattagactcaagtctgcgaaggaagctgcagagttgactcttttaaacgctgaacaagaagctgttgatattcgtggcaaagcagaagtagatgctgaacacatcaaaaaaacagctaaacgtgaaagtaaagcaaatcgtaaagaattacttttagaagcaaaagaagaggcaagaaaatatcgtgaagagattgaacaagaatttaagtctgaaagacaagagcttaaacaactcgagacacgcttagcggagcgctccttaactcttgaccgtaaagatgaaaacctatcaagtaaagaaaaggtactagatagtaaagaacaaagtctgaccgataaatctaaacacattgatgagcggcaacttcaagtggaaaaacttgaagaggagaaaaaagcagaactggaaaaagttgctgcgatgacgattgcagaagcgcgtgaagtgattttaatggagacggaaaacaaactgacccatgaaattgcgacgcgcattcgagatgccgaacgtgacatcaaggaccgaacagttaaaacagccaaggacttgttagcgcaagccatgcaacgccttgctggtgagtatgtgactgaacaaactattaccagtgtccatctcccagacgacaacatgaagggccgaattattggacgtgaaggccgtaatattcgtactttagagagcttgactggcattgacgttattattgacgatactcctgaagttgttatcttatcaggatttgatcctattcgacgtgaaattgctcgtatgaccttggaatctctgattgctgatggtcgcatccatccagctcgtatcgaggaattggttgagaaaaatcgtcttgaaatggataatcgtattcgtgagtacggtgaagctgcagcctatgagattggtgcaccaaaccttcatcctgatttgattaaaatcatgggacgcctgcaattccgtacctcgtttggtcaaaatgtcctacgtcactctgttgaggttggtaagttagctggtattttagctggtgagttaggtgaaaatgttgctcttgcccgccgtgctggtttcttgcatgatatgggtaaagctattgaccgtgaggttgaaggcagtcacgttgagattggaatggaatttgcacgtaaatacaaagaacatccagttgttgtcaacactattgctagccaccacggagatgtggagccagattctgtgatcgctgtgctagtagctgcagcagacgctctcagttcggctcgtccaggcgctcgtaatgagtcaatggagaattacatcaagcgtcttcgtgatttagaagaaatcgcgacaagttttgatggggtacaaaatagttttgctctacaagctggacgtgagattcgtattatggttcaacctgaaaaaatttcagatgatcaggttgtcattttgtcgcataaagtaagagaaaaaattgaaaacaatctagattacccaggaaatattaaagtaactgttattcgtgagatgagagcggttgattatgccaagtag

SEQ ID NO: 38489 - DNA, 1188 bp, Streptococcus pyogenes
atgaaaaacatagttatcgttgaagctttacgaactcctatcggagcttttggaggctcctttaaaagtgtctctgctgttgaacttggaacaactgtactgaaaaaaatccttgataaaacgcaagtaaagcctgaaatggttgatgaagtcatcctaggaaacgtccttcatgcaggcctaggacaaaatgtggcaagacaagttgcagtccactcaggaattcctgaagataaaacagctttcacattagatatggtttgcggttctggacttaaagcaatccaattagctgcgcaaagcatcatgcttggtgacgctgatatcgttattgctggtggtgtcgaaaacatgtcacaagcaacctatgtatcaactcagcaccgttttggacagcgacttggtaatagtcaattgattgatactcttgttcatgatggcttaacagatgcttttaacaattaccacatgggtattactgctgaaaacgttgctcagaaatatggcatctcaagagaagagcaagatcaatttgctttagaaagccaagaaaaagctgctaaagcattagaaaatcatcgttttgctgacgaaattgtccctgtctctgtgcctcaacgacgcaaagaccctttaattgttacaacagatgaatacccaaaagttgatacaagccttgaaaaattacagcaattacgtcctgctttcctccctaaagaaggaaccgttactgctgggaatgcctcaggaataaacgatggtgcagccttattgatgttaatgactgaagaaaaagctcttgaattagggttaacacctttagtcactattgaaagctatgctagtgcaggtgttgcacctgaactgatgggaactggaccaattcctgccactcaaaaagcccttaagaaagctggattaacaatttctgatttggacttagtggagtccaatgaagcatttgcagcacagtccttggcggttttaaaagatttaaagttaaacccagaaatcgtgaatgttaatggaggagccatcgctttaggtcatcctattggtgccagtggcgctcgcattctagtcacattaatccacgaaatgaaaaaacgccaagtaaccagaggactagcaacactttgcattggtggaggacaaggaactgctgttatcgtgaaaaacaatacttag

SEQ ID NO: 38490 - DNA, 327 bp, Streptococcus pyogenes
atgacaagtattatttatagtcctaaagatatttttgagcaagaatttaagactagtatgcgagggtttgataagaaagaagttgatgaatttcttgataatgtaattaaagattatgaaaatttcaatgctcaaattgaagctttaaaagctgagaatgaagccttaaaaaaggcgaagtttcaagctagaaatacagtttcagcgactgttcaacaaccagtaccgcaaccgactcgtgttgctcaatcagctactaattttgacatcttgaaacgtattagtaaattggaaaaagaggtttttggtaaacaaattattgagtaa

SEQ ID NO: 38491 - DNA, 2166 bp, Streptococcus pyogenes
gtgattacaattaaaaatccaaaaatccttaagtggctaaagtatgtattaagtgcaattcttagccttattatccttgttattattattggtggtcttttgtttaccttctacattagcagtgctccgaaactgtcagaagcccagttaaaatcaacaaactctagcttggtttatgacggtaataacaatctgattgctgatttgggttctgaaaagcgtgaaaatgtaacagctgatagtatccctattaatctagttaatgctattacctcaattgaagataaacgtttctttaaccatcgtggagtagatctttatcgtatttttggtgctgcctttcataatctaacgagtcagaccactcaaggggggtcaacgcttgatcagcaactcattaaactagcctatttttctactaatgaatctgatcaaaccttaaaacgtaaggctcaagaagtttggcttgctcttcaaatggagcgaaaatatactaaacaagaaatcctgactttttacatcaacaaagtatatatgggtaatggcaactatggtatgctgacagccgctaagtcttattatggcaaggatcttaaggatttatcttatgcccaactagccctattggctggaatccctcaagctcctagtcaatatgatccttaccttcatcctgaagctgctcaaaatcgccgtaacgtcgtgttgcaacagatgtacatggaaaaacatctgacgaaagcagaatatgaaactgccatcgcaactcccgtcgctgaaggtctacaatcactccaacagcgctcaacttatccaaaatatatggataattatctaaaacaagttattgaagaagtcaaaaaagaaacgaataaagatatttttaccgctggtttaaaagtttataccaatattatccccgatgcgcagcagactctttataatatttatcattctggtgattatgtttactatccagaccaagatttccaagttgcttcaacgattgttgatgtgacaaatggtcatgttattgctcagcttggcggacgtaatcaagatgaaaatgtttcatttgggactaaccaagctgttttaactgatcgtgactggggttctaccatgaagccaatcacagcctatgctcctgctattgaatctggtgtttatacttctactgctcagtcgactaatgactcagtctattattggcctggaaccactacccaattgtttaactgggaccttagatataacggatggatgacaatccaagctgctattatgctatcgcgaaatgtcccagcagtccgagcactggaagccgcaggacttgactatgctcgatctttcttaagcagtttaggtattaactatcccgaaatgcactactcaaacgctatctcaagtaataacagtagctcagataaaaaatatggtgcaagtagtgaaaaaatggccgctgcatacgctgcttttgcaaatggtggtatttatcataaaccaaggtatgtcaataaagtggaatttagtgatggtacaagtaaaacttttgatgaaaaaggaaaacgtgccatgaaagaaaccacggcctatatgatgacagatatgttaaaaactgttctcacttatggtacaggtactgctgctgccattcctggtgttgcgcaagctggtaaaacagggacttctaactacactgatgaggaactagctaaaattggtgaaaaatacggcctttatccagattatgttggtacattagcgccagacgaaaactttgttggctttactaagcgctacgccatggctgtttggacaggttacaaaaaccgcttgaccccagtatacggatcaagtctagagattgcatctgacgtttatcgtagcatgatgacttacttaacaaatggttacagtgaagattggacgatgccaaatggtctttatcgcagtggtggattcctctacttaagcggaacctatgcgagcaacaccgactatactaattcggtttacaacaatctttacagcaataacacgacaacagcttctagccaaacgacttcagatgatactagtagtagcaatgatacaagtaattcaaccaatacagacaacaatggcagtcatccatctaccgatgataaaaagacaactcattaa

SEQ ID NO: 38492 - DNA, 825 bp, Streptococcus pyogenes
atgacactacaagaagagataattcgacaattaggcgtcaaggctagcattgacccacaagaagaaattcggaaagccgttgattttttaaaagcttatttgcgtaagcactcatttttaaaaacttatgtcttaggcatttcgggaggtcaggattctaccctcgcaggaaagctagcccaaatggccattgcagagttacgggaggaagcaagtgatcaagcttaccaatttatagctgttcgcttgccttatggggttcaggctgatgaagcagatgcgcaaaaagccttggcttttattgcaccagatcagacccttaccattaatatcaaggcagctgtggacggtcaagtagaggctctacaagcagcaggcgttgagatttctgatttcaataaaggtaatattaaagcacgtcagcgaatgatcagtcaatatgccattgctggccaaatggctggtgctgttattggaacggatcatgcggcagaaaacatcactggtttctttactaaatttggtgatggtggagcagatattcttcccctctttaggcttaacaaacgtcaaggaaaggctcttttgaaagttttaggagcagatgctgctttgtatgaaaaagttccaactgctgatttagaagatcaaaaaccaggcttggctgatgaggttgctctaggggtgacctatcaagacatcgacgactatttggaagggaagctgatttccaaagtagctcaagcaactattgaaaaatggtggcataaaggacaacacaagcgtcacctgccaatcaccatttttgatgatttttggaaataa

SEQ ID NO: 38493 - DNA, 1455 bp, Streptococcus pyogenes
atgtataaagatgatagtttaactctccatactgatttgtatcagattaatatgatgcaagtttattttgagcagggcattcataatcgtcatgcggtgtttgaagtctatttccgcaaggaaccttttaacaatggttatgctgtttttgccggtttacagcgcatggtggagtacctagagcaatttcaattttcagaaacagatttggcttaccttgaagaactgggttatccagaaaactttttgacctaccttaaagagttacgattagaattgaccatccgttcagctaaagaaggagatttggtttttgctaatgagccgattgtgcaagtagaaggccctctaggtcagtgtcagttggtcgaaacagctcttttaaacattgttaacttccagaccttgattgctacaaaggctgctcgtattcgttctgtgattgaggatgaaccccttttggaatttggcacccgtcgtgcacaggaactagatgctgcgatttggggaacccgcgcagcgatgattggtggagcagatgcaacaagtaatgtgagagcaggtaaacgctttgatatccctgtttcaggtacgcatgctcatgctttagtgcaagcctatggtaatgattatgatgctttcatggcttatgctaagacccataaagattgtgtatttcttgttgacacctatgatacacttaaagtaggtgtgccaacagctatccgagtagccaaagaaatgggtgacaagattaattttctaggtgttcgattggactctggtgacttggcttacctctcaaaaacagtccgtcagcagttagacgacgctggttttaccgaggctaagatctatgcttctaatgacctcgatgaaaataccatcctcaacttaaaaatgcaaaaggccaaaattgatgtttggggtgttgggaccaaactgatcacagcctatgatcagcctgccttaggtgctgtttataagattgtctctattgagcaagaagatggcagcatgcgtgatacgatcaaattatcaaataatgcagaaaaagtatccacaccaggtaaaaaacaagtttggcgcatcaccagtcgtgaaaaaggcaaatcagaaggcgactatatcacgtttactgatattaatgttaatgaattaactgagattgagatgttccatccgacctatacctatattaagaaaaccgttaaagaatttgatgcaattcctctcttagttgatatttttgtcaagggagaattagtttaccagctaccgaccttagctgaaatcaaggcttatgctaaaaaagaatttgacaagctttgggatgaatacaagcgtgtcttaaatcctcaagactacccagtagacttagcccgtgatgtgtggcaaaacaagatggccttaattgataacattcgcaaagatgcttatggaaagagtgaatga

SEQ ID NO: 38494 - DNA, 1344 bp, Streptococcus pyogenes
atgtcatttaaagattatcattttaagcaatacgttcagcaagcgctggaagaaattggctttgtcaatccaacagaggtccagaagcggctgattcctattgttaactccggtcgtgacttagttggggaatcaaaaacaggttcagggaaaacccacacctttttgttgcccatttttgaaaaacttgatgaagctaaagcagaagtgcaagtcgttattacagcacctagccgtgaattagcaactcaaatttttgatgcttgtaaacagattgctaagcacttccaagaagagattcgtttggccaactatgttggaggcacagacaaactccgtcagattgaaaaactaaaagacagccagccgcatattgtcatcgggaccccaggtcgtatttatgacttggtcaagtctggtgatttagcgattcataaagcaacgacctttgttgtggatgaggccgatatgaccatggacatgggctttttggatacggtagataagattgcagcttcgcttccaaaatctgttcagattttggtgttctcagcaactattccacagaaattacaaccctttttgaaaaaatacttgaccaatcctgttattgaacaaatcaagacaaagaccgttatcgcagataccattgataactggcttgtgtcgacaaaagggcgtgataagaatggtcaactgttagagattctcaaaaccatgcagccttatatggctatgctttttgtcaataccaaggaacgcgcagatgatttgcatgcctttttaacagctaatggcttaaaagtggctaagattcatgggggcattcctccaagagaacgtaagcgcatcatgaaccaagtcaaaaaactggactttgaatacattgttgccacagacttagcagcgcgtgggattgacattgaaggggtcagccatgtgatcaatgacgccatcccacaagacttgtctttctttgtccatcgtgtaggccgaacaggtcgaaatggtatggcaggaactgccattacactttaccagccaagtgacgactcagatatcaaagagctggaaaaaatggggattgcctttacaccgaaggtgctcaaaaatggagaatttcaagatacctatgaccgtgatcgccgtcaaaaccgtgaaaaagcctatcaaaaattagacacagaaatgattggtttggtcaaaaagaaaaagaaaaaagtcaaaccaggttacaagaaaaaaattcagtgggcggttgatgaaaaacgtcgcaaagaacgtcgtgctgaaaatcgtgctaagggccgcgctgagcgtaaggccaaaaaacaacatttttaa

SEQ ID NO: 38495 - DNA, 1011 bp, Streptococcus pyogenes
atgtttttaacccttattgcagcaatcatatcctttatggtatccgctttcacaatgccttattttatcaaattctatcaattgaaaaaaattggtgggcaacaaatgcatgaagatgtcaagcaacatttagctaaagctggaacaccgactatggggggaactgtttttcttttagtagctacggcagtatcgttattggttagtctattttcgatcaaaaacactcaaagtttagctttgatttcaggcattttatcaattgttgtcatttacgggattatcggatttttggatgattttttaaaaatttttaagcaaatcaatgaaggattgacagccaaacaaaagttagccttgcagttggttggaggattgatgttctattttttacatgttagtccaagtggcatttcctctattaatgtgtttggttatcagctgccgctgggaattttctacctattctttgttttgttttgggtggttggtttttcaaatgccgttaatttgacagatggtatcgatggcttagcttctatctcagtggtgattagtctagtgacttacggcgttattgcctacgttcagagtcaatttgatgttttgttactgattggagcaatgattggagccttgcttggcttcttctgctttaatcacaaacctgctaaagtatttatgggagatgtaggtagtttagcccttggagctatgttggctgccatttctattgcgcttcgtcaagaatggactctcctgattattgggatcgtttatgttcttgaaacaagttctgtgatgttgcaagtgtcctatttcaagtacaccaagaaaaaatatggagaaggtcgtcgtatttttagaatgacgcctttccaccaccatttggaattgggaggcttgtctggtaaaggcaagaagtggtcagaatggcaggtagatgcttttttgtggggagtaggaagtctagctagtttactagttttagctatcttatacgtgttctaa

SEQ ID NO: 38496 - DNA, 2256 bp, Streptococcus pyogenes
atgaaaaaatggcaaaaatatgttttagattatgttgtgcgcgataggagaactccagtcgaaaatcgcgttcgagttggacaaaatatgatgctcttaactatctttattttctttattttcattattaatttcatgattattattggaacagatcaaaagtttggagttagtttgtcagaaggggcgaagaaggtttatcaagaaaccgttacgatccaagctaagcgtgggaccatttatgatcgaaatggtacagctattgcagtggattctacgacttatagcatatacgcaattttggataaatcatttgtctcggcttcagatgaaaagttatatgtacaaccttctcagtatgaaacagtagctgatattttaaaaaagcatctgggaatgaaaaaaacagatgtaattaaacagcttaagcgtaaaggacttttccaagtctcgtttggaccgtcagggtctggcatttcatatagtactatgtctactattcaaaaggctatggaagatgccaaaatcaagggaattgctttcacaactagtcctggtcgtatgtatccaaatgggacatttgcttcagaatttataggcctagcatctctaacagaagataaaaagacaggtgttaagagtttagttggaaaaacaggtctagaagcttcttttgataaaattttatcaggtcaagatggtgttattacttatcaaaaagatcgaaatgggaccacactcttgggtacaggtaagactgtcaagaaagctattgatggcaaagatatttacacaacgctatctgagcctatccagaccttcttagaaacccagatggatgtttttcaagccaaatcaaatggtcagttggccagtgcaacacttgttaatgctaaaactggtgaaattttggcaacaacacaacgccccacttataatgctgatactctgaaaggacttgaaaatacgaactacaaatggtacagtgcacttcatcaaggaaattttgaaccaggttcaaccatgaaagtgatgactctggcagcggctattgatgataaagttttcaacccaaacgaaacctttagcaatgctaatggtttgacaattgcagatgctactattcaagactggtctattaacgaaggcatttccacaggacagtacatgaattatgcacaagggtttgccttctcaagtaacgttgggatgactaaacttgaacaaaaaatgggtaatgcaaaatggatgaattatttgacgaagttccgctttggttttcctactcgttttggtttaaaagatgaagacgcaggtatatttccttctgataatatcgtgactcaagctatgagcgcttttggtcaagggatttctgtaacccagattcaaatgcttagagcctttactgctatttctaataatggtgagatgttagagccacaatttatcagtcaaatttatgatcctaacacagcaagttttagaacggcaaataaagaaattgttggaaaacctgtatcaaaaaaagccgctagtgaaacaagacaatacatgattggtgtaggaacagaccctgagtttggaacactctattcaaaaacatttggaccaattattaaagtgggtgatttacctgttgctgttaaatcaggaacagcacaaattggttcagaagatggaagtggttatcaagatggtggattgactaactatgtctattcggttgtggcaatggtgccagctgataaaccagactttttgatgtatgttactatgactaaaccacaacattttggtccccttttttggcaagatgtggttaacccagtattggaagaagcatacttaatgcaagatacactaactaagccagtagtatcagatgctaatcgtcaaacaacttataaattaccaaactttgtaggaaagaatcctggtgagacatcaagcgagttgcgtcgaaaccttgtccagccagttgtccttggtactggcagcaagatcaaaaaagtatcgcatcagcccggtcaaacgttaacagaaaaccaacaagttctcatattatcagaccgttttgtggaggtaccagacatgtatggctggacaaaatccaatgttaaaacctttgctaaatggactggaatagacatcagctttaaaggaacagattctggtcgtgttatgaaacaaagtgttgatgttggtaagtccttgaaaaaaataaaaaaaatgaccattactttaggagattaa

SEQ ID NO: 38497 - DNA, 324 bp, Streptococcus pyogenes
atgacaaatgaaaaaagaactcaggtagttacaaatgccttgcaaaaacgaataaaaactttctctagaattgagaaggctttttatactgctatcattgtaacagcgattacgatggcagtaagtattatttacctgcaaagtcgtaagttgcagctacaacaagaaatcactagtttaaatagtcatatttcggatcaaaaactagagcttaataatgccaagcaagaagtaaatgagttatctcgccgtgatcgtattatagatattgctggtaaagcaggcttaagcaaccgtaataataatatcaagaaagtcgagtaa

SEQ ID NO: 38498 - DNA, 1014 bp, Streptococcus pyogenes
atgaaatccttttctcttactttttcatttctaaaccttttgaagtatggtacaattaaagttatgacaaaagaatttcatcacgtgaccgtactccttcacgaaacagtggacatgcttgacataaagcctgatgggatttatgttgatgcgacgctaggtggctcaggccactcagcttatttgttgtccaaacttggtgaagaagggcacctctattgttttgaccaagaccaaaaggctattgacaatgcacaagttaccctcaaatcttatattgacaaaggacaggtaacttttattaaagataattttagacacctcaaagcacgtttaacagcgcttggagttgatgaaattgatggtatcttatatgaccttggtgtttccagcccgcaattggatgaaagagaacgagggttttcttataaacaagatgctccattggatatgcgcatggatcgtcagtcgctcttaacagcttacgaagtggtgaatacctatccattcaatgatttggttaagatttttttcaaatatggtgaagataaattctccaagcagatcgctcgaaaaattgaacaagcaagagctattaagcctattgagacaacaacagagttggcagaattgattaaggcagcaaagccagctaaagagttgaagaaaaaaggccaccctgctaaacagatttttcaagctattcgcattgaagtcaatgatgaattgggagcggccgatgaatctattcaggacgctatggaattattagcccttgatggtcgtatctcagttattaccttccattctctggaagatcgcctaaccaagcagttgtttaaagaagctagtacggtggatgtgccaaaagggcttcctctaattcctgaagatatgaaacctaagtttgaacttgtttcacgtaagccgatcttacctagtcattcagagttaacagctaataaaagggcacactcagccaagctacgtgttgccaaaaaaattcggaaataa

SEQ ID NO: 38499 - DNA, 1251 bp, Streptococcus pyogenes
atgactgatatgagaaggttagggcaaagggcaaaacaagctagtcttttaatagcacctttgtcgacgcaaattaaaaatcgctttttaagcaccttagcaaaggcattagttgacgatacacagactctcttagccgctaaccaaaaagatttagcgaatgctaaagaacatggtatttctgacatcatgatggatcgcttgcgcttaacttcagaacggattaaagcgatagcacagggagttcaacaggttgctgacttagctgatccaatcggacaagtcattaagggctatactaacctcgatggccttaaaatcctccaaaagagagttcctctaggggtgattgcgatgatttttgagagtcgtccgaatgtttcagtggatgcttttagtctggcgttcaaaaccaataatgcgatcatcctaaggggaggaaaagatgcccttcactcaaataaagctttggtgaagttgatccgacaaagtctggaaaaatcagggatcaccccagatgctgtccagctagttgaggatccctcacatgctgtcgctgaagaattgatgcaggcaacggattatgtagatgttttgattccacgtggtggtgctaaattaattcagaccgttaaggaaaaagcaaaagtgcctgtcatcgaaacaggtgtggggaatgtgcatatctatgtggatgctcaagctgacttagatatagctactaagattgttatcaacgctaaaacaaagcgcccaagtgtttgcaatgcagctgagggattggtaattcacgaagctgtagcagcaaggtttattcctatgcttgaaaaagcgatcaatcaagttcagccagtagaatggcgggcagatgacaaggctttgccgttatttgagcaggcagtgcctgcaaaagcagaggattttgagaccgaatttttagattatatcatgtctgttaaggttgtttcctctttggaagaagctatttcttggataaatcagtatactagtcaccattccgaagctatcatcacaagggatattaaggcagcagagacctttcaagatttagtggatgctgctgctgtttatgtcaacgcttcaacacgatttaccgatggttttgtttttgggcttggtgctgaaattgggatttctactcaaaaaatgcacgcccgtgggccaatgggcttagaagccttgaccagcactaaattttatattaatggggatggacatatcagagaataa

SEQ ID NO: 38500 - DNA, 2136 bp, Streptococcus pyogenes
atgatgtccaaactagtttttttctggcaaaatagagaaaaagaatttagggactttggaggattttctgaaaaaagcgtctatttttgtgatacaatagacaatagaaaacgtttaattttagttgtaataaacagagaggttttacttatgacatttgatgcaattgaccagttggcagtaaacactgtccgcaccctatcaatggatgccattcaagcggcaaattctggacacccaggacttccaatgggggcagcacctatggcctatgttctttggaatcacttcatgaacatcaatcccaaaacaagccgtaattggtcaaacagagaccgttttatcctatcagcaggtcatggaagtgccatgctttatagcttgttacacttagctggttatgatttatctgtagaagatttaaagaacttccgtcaatggggttctaaaacaccaggtcacccagaagtgaaccacacagacggtgtcgaagcaaccacaggacctcttggtcaagggatcgcaaatgccgttgggatggccatggcagaagctcatctagcagctaaatttaacaaaccaggctttgacatcgttgatcactacacatttgctttgaatggtgacggtgaccttatggaaggggtcagccaagaagcagcaagtatggcaggacatttaaaacttgggaaattggtcttgctatatgattcaaacgacatctctcttgatggtccaacctctatggctttcacagaagatgtgaaaggacgtttcgaagcttatggttggcaacatatccttgtgaaagatggaaatgatttagaagaaattgcagctgctattgaagcagctaaagctgaaactgagaaaccaaccatcatcgaagtcaaaaccattattggttttggtgccgaaaaacaaggaacttcagctgttcacggcgctcctcttggagcagaaggcattgcttttgccaaaaaagcttaccaatggactcatcaagattttgaagtgcctgctgaagtaacagagcgctttgctcaaggtcttcaagcgcgtggtgaaaaagcagaacaagcctggaatgacttgtttgcagcttatgaagcagaatatccagaattagcagcagaataccaaaaagcctttactaacgaagctgctcaagtagaacttgaagcgcacgaacttggtagttcaatggcgagtcgtgtatccagtcaacaagccatccaacaaatttcagaacaagtagcctctttctggggtgggtcagcagacctttcagcttcaaacaatactatggttaaggctgaaacagatttccaaccaggtcactacgaaggccgtaacatctggtttggcgttcgtgaatttgccatggctgcagccatgaacggtattgcccttcacggcgggacacgcgtttacggcggaaccttctttgtcttctcaaactatcttcttccagctgttcgtatggcagcgctccaaaacttgccaacagtttatgtcatgacacatgattctatcgctgtcggtgaagatgggccaacgcacgaaccaattgaacaattggcaagtgttcgctcaatgcctaacttgaacgttattcgtccagcagacggtaacgaaacaaatgctgcttggaaacgtgccattgctgaaacagatcgcccaaccatgcttgtattgacgcgtcaaaaccttccagtgcttgagggcacaaaagaattggcagaagatggtcttagcaaaggagcttatatcttgtcagaagccaaaggcgaccttgatggtatcttgattgcaacaggttcagaagtgaaactggcaatggatactcaagaagctcttgaagcagaaggcattcatgtgcgtgtcgtatctatgccatcacaaaatatctttgacgaacagtcagcagagtataaagaaagcatcctaccagcagctgtgactaaacgtctcgctatcgaagcaggttcaagctttggctgggcaaaatatgtcggcctatcaggaaaaacattgaccattgacacttggggtgcttcagctccaggaaatcgtatcttcgaagaatatggtttcactgtggcaaatgcaactgagttatacaaatcactctaa

SEQ ID NO: 38501 - DNA, 702 bp, Streptococcus pyogenes
atggatatctttggcgaatttttgggtacagccttattggttttactaggaaatggtgtggtagcaggggttgtcttgcccaaaacgaaaacccatgcttctggctggatcgtgattgcgactggctggggaattgcagttgctgtggcagtctttatcagtggcaaagttgcccctgcccacctcaatccagctgttagccttgcttttgccatgagtggaaccattgcctggtcaacagccattgcctatagccttgcccaactattgggagctatggttggttcaactctggtattccttcagttcaggccacattatctggctgctgagagtcaggctgatattttagggacatttgcgacaggtcctgctattcgagatactagctcaaacctattgagtgaaatctttgggacctttgtcttgatgcttggtattttggcatttggcttatatgatatgccagcaggactaggaaccctctgtgtaggtaccttggttattgggattgggttatccttaggaggaacgacaggttacgccattaacccagcacgtgatttaggacctcgtctagttcatgctattctaccactcaacaacaagggagattctgattggtcttatgcttggatacctgttgtaggaccaattattggagcggtcttagcagttttgcttttccaagtcatgtcctaa

SEQ ID NO: 38502 - DNA, 1527 bp, Streptococcus pyogenes
atgtcgcaagaaaagtatatcatggctattgatcagggaacaacaagttcacgagcgattattttcaatcaaaaaggggaaaaggttagcagtagccaaaaagaattccctcagattttcccacacgctggttgggtagagcacaatgctaatcagatttggaattcggttcagtctgttattgcgggtgcttttattgagtctagcatcaaaccaagccaaattgaagcaatcggaattaccaaccaacgtgagaccacagtggtttgggacaaaaaaacgggtgtacctatttataatgctattgtgtggcaatcacggcagacggcaccaattgctgagcaactcaaacaagatggccatacaaaaatgatccatgaaaagacaggccttgttattgatgcttacttttctgcaaccaagatccgttggattttggaccatgttcctggtgctcaagaacgagctgaaaaaggcgagttactttttggaaccattgatacttggctggtttggaaattgacagatggtgctgttcatgtgacggattattccaatgcggctcgtaccatgctctataatattaaagacttaacatgggatgatgagattttagagcttttaaatattccaaaagatatgcttccagaggttaaatccaattctgaaatttatggcaaaacagctgcctttcatttttatgggggcgaagtgcctatttcaggtatggcgggtgaccaacaggcagctttgtttggccaactagcttttgagcctggtatggtgaaaaacacttatggcacaggttctttcattatcatgaatactggtgatgagatgcagttatcgagtaataatcttttgaccaccattggttacgggattaatgggaaggttcactatgccttggaaggttccatctttattgcaggctctgccattcaatggttgcgagatggtcttaaaatgattgagacttcaccagaatctgaacagttcgctctagcatcaactagtgacgatgaagtttatgttgtgcctgcttttaccggtttaggagctccttactgggattctaatgcgcgtggatctgtctttggcttgacacgtggtaccagcaaagaagactttgtcaaagcaaccttacaatctatcgcctatcaagtgcgagatgttattgataccatgcaggtggattcaggtattgacattcaacagctccgtgtggatggcggtgcagccatgaataatatgctcatgcaatttcaggctgatattttaggaattgatattgcccgtgctaaaaatttagaaacaacagctctaggagcagctttcttagcagggcttgctgtggggtattgggaagatatggatgctttgaaagaattaaatgccacaggccagctctttaaggctagcatgaatgaatcgcgcaaagaaaaattatacaagggttggaagcgcgctgttaaagcaactcaagttttcacccaagaagaagatgcagatgacgatgcaaaataa

SEQ ID NO: 38503 - DNA, 2040 bp, Streptococcus pyogenes
atgagtaaaaatctactaatcgaacttggtctggaagaacttccagcctacgtggtcacaccaagtgaaaaacaactgggagagcgcttggcgactttcttaacagaaaatcgtctctcttttgaagatatacaaaccttttcaactccacgccgtttggcagtgcgtgtgtctggattagctgatcagcaaacggatttgactgaggactttaaagggcctgctaagaaaattgcccttgatgctgatgggaatttctcaaaagctgctcaaggatttgttcgtggcaaaggcttgaccacagatgctatcgaattccgcgaagtcaaaggagaagaatacgtttatgtgaccaaacacgaagctggaaaacctgctaaggaagtgcttctaggcgttactgaagtgttatcagcaatgaccttcccagtcagcatgcactgggctaacaatagttttgaatacattcgtcctgttcacaccttgacagttctgttgaatgatgaggccttggaacttgacttcttggatattcattctggacgcgtcagccgtggtcaccgttttttaggtactgaaaccactatcacaagtgctgattcttatgaggctgatttacgcagccagtttgttatcgctgatgctaaagagcgtcaagagatgattgtggagcaaatcaagacgcttgaagtggagcagggtgtgcaagttgacattgacgaagacttgcttaatgaagttttgaacttggtcgagtttccaacagctttcatgggaagttttgaggctaaataccttgatgtcccagaagaagtattggtaacatcaatgaaaaaccaccaacgttattttgtagtacgtgatcaggctggtcacttgatgccaaactttgtatcagttcgtaatgggaatgatcaagccattgaaaatgttattaaagggaacgaaaaagttttggtagctcgcttagaagatggtgaattcttctggcgtgaggatcagaaattgcaaattgctgatttggttgccaaattgaccaatgtgaccttccatgaaaaaatcggctctcttgctgaacacatggatcgtacgcgtgtcattgccgcatcacttgctaaggaagccaacctatctgctgaggaagtcacagctgttgaccgtgctgcccaaatttacaaatttgacctgttaacaggtatggtgggtgaatttgatgagctgcaagggattatgggtgaaaaatatgcccttctagctggtgaagatgctgctgtggcaacagcaatccgtgaacactacttacctgatgctgcaggaggtgcgctacctgaaaccaaagttggcgctgtcctggccttggcagctaaattggatactctcttgtcattcttttctgttggcttgattccatctggctctaatgatccttatgctctacgtcgtgcaacccaagggattgtccgtattcttgatcattttggatggcgcatcccaatggataagctggtagatagcttatatgacttgtcctttgatagtttgacctatgccaataaggcggatgtgatgaactttatccgtgctcgtgtggataagatgatgggcaaagccgcaccaaaagacattcgggaagctattctagcaagttcaacctttgtggttccagaaatgttggccgcagctgaagctcttgtcaaagccagtcatacggaaaattacaaaccagcagttgaatctttgtcacgtgcttttaatttggcagaaaaagcggacgcttctgttcaggtggaccctagcctctttgaaaatgagcaagaaaacactttgtttgcagctattcaaggcttgactctagcaggcagtgctgcccagcagttagaacaggtctttgcccttagcccagtgattaatgatttctttgataacacaatggttatggcaggagatcaagcccttaaaaacaaccgtttagctattttatcagatttagtaagcaaagctaagaccattgttgcttttaaccaactaaacaccaagtaa

SEQ ID NO: 38504 - DNA, 918 bp, Streptococcus pyogenes
atgtctaaaaaacttacctttcaagaaatcatcttgaccttacaacaatattggaatgatcagggttgtatgctcatgcaagcctatgacaatgaaaaaggagctgggaccatgagtccttacacgttcttacgtgctataggtcctgagccatggaatgcggcttatgtagagccatcacgtcgtcctgcagatggccgttacggagaaaacccaaatcgtctttaccaacaccaccaatttcaagtggtcatgaaaccatcaccatcaaatattcaagaactttaccttgcttctttggaaaaattgggcatcaatcctttagaacatgatattcgttttgttgaagataactgggaaaacccatcaacaggatcagcagggcttggttgggaagtttggcttgatggaatggaaatcacacaatttacgtatttccaacaagttggtggccttgcgacatctccagtgacagcagaagtaacttatggtcttgagcgcttagcttcctatattcaagaagtggattcggtctatgatattgagtgggcaccaggtgttaaatatggtgaaatcttcttacaacctgagtatgaacattcaaaatattccttcgaaatatcagaccaagacatgctgcttgaaaactttgaaaagtttgaaaaagaagcctcgcgtgccctagaagaaggtttggttcacccagcttatgattacgtgctcaaatgttctcatacgtttaacctgctggatgcccgtggcgctgtttccgtcacagaacgtgcaggctacattgctcgtatccgtaatttggcacgtgtcgttgctaagacctttgttgcagaacgcaagaagcttggatttccactgttggatgaagcaacacgcgcaatcttgctagctgaagatgacgaataa

SEQ ID NO: 38505 - DNA, 1149 bp, Streptococcus pyogenes
atgacatgctatcttaaagcagattgtttttattacccaacagaggtgagaccggctggctacctaagtcttcatgatggtgtttttggggagtggacagaaattgttccggcagatgcgcaaatcattgactacaccggttatcaaattgcaccaggtcttgtggatacgcatatccatggctatgcgggagctgatgtcatggataattctgcccaagggattcatcaaatgagtgaaggactattagcaacaggagtaacgtcttttttaccgacgaccttaacttctacctttgagcagttagaaaaagtatcagggactattgcttcagttgctgatcaggtaaaaggtgctaaaatacaaggtatctactttgaaggtccttattttaccgaagaatataagggtgctcaaaacccaagttatatgaaaaccccacgcttggaggaatttgatgcttggcaaaaagctgctaaagggctcatcaaaaaaattgcccttgctcctgaacgtgatggtgtcaaagaatttgtgtctgcagtgacaaaacaaggcgtaacagtggccttagggcattcaaacggtacttatcaagaggctaaagaagctgttcaagctggtgctagtgtttgggttcatgcttataatggcatgcgaggattgacccaccgtgaaccaggaatggtgggagcggtttataatcttccaaatacttacgcagagttgatttgtgatggccaccatgtctcaccaattgcttgtgatattttgatgcagcaaaaagggcatgatcatgtagccatgattacggactgtatgcgagcaggtggttcaccagatggtgattacctcttgggggaattctctgtggttgtggcaaatggcactgctcgtcttaaagagagtggaaacttggcaggatctattttgaaattaaaagatggccttagaaatgtagtggcctggggaatcgcaactccggcagaagccattcatatggcaacttatgtgccagctgtttctgtcggtattgacgacgtatgtggtcaaatcaaagctgggcatgcggctgactttattgttcttgataaggatttaacacttgttgcaacctatttaaatgggcaaaaagcttttgatgcctaa

SEQ ID NO: 38506 - DNA, 1632 bp, Streptococcus pyogenes
gtgtcagtaaattggcaagacattgcatttcatttctttggaggcttaggtctctttcttttcagtatcaagtatatgggagatggtctgcaacaagcagcaggagataaactaaggtattacattgataaatacaccagtaatcccttttttggtatcttagtcggaattgccatgtctgccttaattcagtccagttcaggcgtaactgtaattacggttggtttggtttctgcgggtttgctaaatttgcgacaagccattggaattgttatgggggctaatattggaacgactatcacttcgtttttaattggttttaaactaggagattacgccttgcccatgatttttattggtgcagcctgtcttttctttacctctaataaaaagctcaacaattttgggcgtatcatttttggtgtcggaggaattttcttctcgctgaacctaatgggagatgccatggatcctttgaaatctgtgtcagcctttcaaaattatttagcgacattaggtgataaacccttccaaggtgtctttatcggaacggctttgaccatgttgattcagtcatcggcagccattatcgggattttacagggactgttttcaggcggtcttttgaccttacagggggctattcctattttgttaggctcaaatataggaacctgcattacagctgtcttagcagctataggttcaaatattgctgctaaacgtgtggcagcagctcatgtgttatttaatttgatcggtacaattatttttatgattatcctagtcccattcacatcattgatgttatggctacaatcaaagttgagtttaacgcctgagatgactatcgctttttctcacggttcttttaatatcactaataccatcttattaattcctttcattagtctactagctatgattgtgactagactcattccaggagaagatgaagtggtcaaatacgaagccctttatttagatcgcttacttattacccaagccccttctatcgcactaggaaatgcccacaaggaattggttcatttagcctcttatgcgattcaagcttttgaagcttcttacagttatattatgacagctgacggtaaatttggggaaaaggtcaagcgttatgaaagagcagttgataccatcgatgaggagttaaccacttatttggttgatatttctaacgaagccctcagcccaagtgaaaatgaagtcttggctggtattcttgactcttcacgtgatttggaaagaattggagatcattctgagtctttaggcattctaattgaaggcatcatatctaaacaaattggtttttcaatatctgctcgtcaagaattgacagagatgtatcaattgacgcattgtttaacactggatgccattagagctatcgttgatagtgatacagacttggcgcaaactattgtgactcgccataaagaaattgaagaaaaagagcgacgattacgtaaaacccacattaagcgcttgaattgtggagaatgtacggcacaagcaggtattaattttattgatattatttcccactatacccgcatcacagatcatgccttgaatttagcagagaaagtactttcacaccagctttaa

SEQ ID NO: 38507 - DNA, 978 bp, Streptococcus pyogenes
atgacaatcacagcaaataaaagacattacttagaaaaagtgagccatcaaggaatcatatcagctttagcttttgatcaacgaggtgcactgaagcaaatgatggcagcacatcaagaaggagaagcgacagttacacagatagaaacattgaaagttctcgtttctgaggaattgacgccttatgcttcatctattttattagatccagaatatgggttgctggctactaaggtaagagctaatcagacaggcttactgttagcttacgaaaaaacaggttatgatgctacaaccactagccgtttacccgattgcttagtggaatggtcggtcaaacggttgaaagcagcaggtgcagatgctattaaatttttgctctattatgatgttgatggagatgaacaaatcaatttacaaaaacaagcttatattgaacgcattggttcagaatgtacagctgaagacatccctttttttcttgaacttttgagttatgatgagagaatatcagataacaacagtgcggcatacgcaaagcttaagccacataaggttaacggtgctatgtcagtattttcggataagcgttttggcgttgatgtgctaaaagtagaggttcctgttaatatggcttatgtagaaggttttactgaaggggaagtccattacagtcaagctgaggctattaaagcttttcaagaccaagaagctgccagccacctcccttatatctatttgagtgcaggcgtatctgccaaactttttcaagagacattatactttgcagcagcagcaggtgctcaatttagtggtgttttgtgtgggcgtgccacgtgggcaggatccgttccagtttatattactaaaggagaggacgaagcaagaaagtggctatgcactgaaggcttccaaaatattgacgagttaaacagggtactcgaagagaccgctagcccttggacggaaaaaatctaa

SEQ ID NO: 38508 - DNA, 516 bp, Streptococcus pyogenes
atgaaaattgcgattggttgtgaccatattgtcaccaacgaaaaaatggctgtttctgattttttgaaatctaaaggctatgacgttattgactgtggcacttatgaccatacaagaacccattaccctatttttggaaaaaaagtcggcgaagctgtggttaatggtcaagcagacttgggtgtttgtatttgtggaactggagttggcattaataatgccgtgaacaaggtaccaggtattcgttcagcccttgttcgagatatgacaacagcgctttatgccaaggaagaattgaatgccaatgtgattggctttggtggtaaaatcacgggtgaacttcttatgtgtgatattatagatgcttttatcaaggcagaatacaaagaaactgaagagaataagaagctaattgctaaaatagcccacttggaaagtcatcatgccaaccaagaagatcctgatttttttacagaatttttggaaaaatgggatcgtggtgagtatcacgattag

SEQ ID NO: 38509 - DNA, 2202 bp, Streptococcus pyogenes
atgagttgtgcctcttgtgctctaacaattgaaaaaacagtcaatcaattgcctgaagtagaacaggctgttgtgaatttagcgactgagaagctcacggttacttatcaagatgacgatttagaaacggccaaagttattcaagcggtgaaagctgctggttatggtgcacaagtctttgatgaacatgcaaaacacatgcaaacaggtcgtcgtgacgaagacctaaaggttatttggtctcaggtcttgtggtctgccctattcaccattcctatattatacctagctatgggtcacatggtgggcttatggcttcctccatttctgcaaccagatcgctatcctttcgtttacagctttagtcagctactcttgacgattccagtcttagtattaaatcgtcattattaccataatgggtttaaagctttgtttaagggacatcctaatatggactccttggtagctttagcaaccagctttgcttttgcttatagtctttatggagtggttgaaatcagtctgggccgggcgcactttgtgcactccctttattttgaatcggtggtagtgattttgacactcatcggtctaggaaagtattttgaaagtcgttctaagggccgtacttctcaagctattcaaaagctcctatccttgaaggctactgttgtgagggtatggagaaacagccaatggcaattgttaccattagaagaagttagctatgatgaccttgtcctggttcaaccaggtgaaaaagtttctattgacggtattatcgtggaaggacatagcagtttggatgaatcctttttaaccggggaaagtttgcctgttgaaaagggagaaaaagataatgtctttgcgggcagcttgaatgggccaggcgccctcacgattaaaccagataagcttggaaatgataccttgttagcacaaattatccaactagttgagaatgctcaagaaaataaagcacctattgcagctattgctgatagagtctcaggtgtctttgttccggtggttttggtattagctctgttaacaggggtgttttggttggtattcatgcaggaaagtcttcgttttagtttgacaacagccatcgctgttctagtcattgcttgcccttgtgcgcttggtttagcaacgccgacagcgattatggttggaacagggcgtgcagctgaaaatggtattctttttaaaggtggtgacatcttagaacaagcacatcaggtagatacggttgtttttgataaaacggggacgattacggaggggaaaccaagtcttcaaaagctcctaactttttcgggagatgatcaccttatcttgcaagaagctgcttccttggaggcctattctcaacaccccttaggggaggctattgttcgtgctgctcaggaagctggttacgatagtctaccagtggaagagtttgagtctttaaccggcctaggagttactggtcagcttgaagggcgtcgtttggcgattggaaatgctgctttaatgggaattcttggtatcgatttatcttgtgttcagtcggtttgtgctaaggcttctgagaaaggccaaacccttgtatattatgctaaagaggggcagctacgagctcttttcagtattgctgacgctgtcaaagaagatagtcaagctaccgtcgaagctttgcatcaactgggaattcacaccatcatgctaacaggtgaccacgatgctaccgctaaggctattgcctctcaagtggggattacagatgtgatcagtcaagtcttacctgatcaaaaagcaggcgtgatagcagacctccgctctcaagggagaaaagttgcaatggtaggtgatggtattaatgatgctccggcattggctgtagcagacattgggatagctatggggtcagggacagatattgccattgaatcggcggatgtgattctgatgaaacctgatatgctggatttggtgaaagctatgtcattgagtcgagtgactatgagaattgtcaaggaaaatttattttgggcattcatttacaatgtcctcatgattccagtggccatgggcttacttcatctttttggaggtccactattgaacccgatgttagcaggttttgccatgagttttagttcagtatcagttgttttgaatgccctgcgattaaaaggaaaaaccatttaa

SEQ ID NO: 38510 - DNA, 2862 bp, Streptococcus pyogenes
ttgtcaaagaaaagattacatgaaattgccaaggaaattggtaaaagtagtaaagaggtggttgaacacgctaaatacttaggattagatgtgaaaagccatgcatcaagtgttgaagaagcggatgcgaaaaagattatttcaagtttttcaaaggcttctaaacctgatgtgacagcttctcaaacagtcaaacccaaagaagttgctcaaccctctgtaacagtggtcaaagaaacaggttctgagcatgtagagaaaacacaggtctctaagccaaagagtcgtaattttaaagctgaaagagaggctcgtgcaaaggaacaggctgctcgaaaacaagcaaatggctcttctcatcgttctcaagaacgtcgaggaggttatcgccagcccaataatcatcaaactaacgaacaaggagataagaggattacccatcgttctcaaggtgatacaaacgataagcgtattgagcgaaaagcatcgaatgtatcacctagacatgataatcatcagctagttggtgatcgtaaccgttcctttgctaaggagaatcacaagaatggtcgattcacaaaccaaaaaaagcaaggacgacaagagcctcaatcgaaaagtcctaaaattgatttcaaagctcgtgctgctgccttaaaagctgaacaaaatgctgaatactcacgccaaagtgaaacacgttttcgtgcacagcaagaagctaagcgtttagctgagttggcaagacaagaagctaaagaagcggctctaaaagcacaagctgaggagatgagccatcgtgaagcagcattgaaatctattgaagaagcagaaactaaattaaagtcatcaaatattagtgctaaatctactgctgataatcgccgtaaaaaacaagcacgtcctgaaaagaatcgtgagttaactcatcattcacaagaaggacaaaagaaaaataagaagagttggaatagtcaaaaccaagtgagaaatcaaaaaaatagtaactggaataaaaataaaaagaccaaaaaaggcaaaaatgttaagaataccaacaccgctccaaaaccagtaaccgagcgtaaattccatgaattgccaaaagaatttgaatatactgaaggcatgacagttgccgaaatcgcaaaacgtatcaaacgcgaacccgctgaaattgttaaaaagctgtttatgatgggtgttatggcaactcaaaaccaatctttagatggtgacactatcgaattattgatggtagattatggtattgaggctaaggctaaggtagaagtagatgatgctgatatcgagcgcttctttgaggatgaaaattacctcaatcctgaaaatattgtagaacgcgcacctgttgtaactatcatgggacacgtagaccacggtaagacaactttgcttgatactttgcgtaactcacgtgtggcaacaggagaagctggaggaattactcagcatattggtgcttaccagattgaagaagctggcaagaaaattaccttcttggatactcccggacacgcggcctttacaagtatgcgcgcacgtggagcttccgttaccgatatcaccattttgattgttgcagctgatgatggtgttatgccacaaacgattgaagcgatcaatcactcaaaagctgctggtgttccaattattgttgctatcaacaaaattgataaaccaggtgctaatccagaacgtgttatcgcagaattggcagaatatggtatcatctcaactgcttggggcggagagtgcgaatttgtagagatatctgctaaatttaataaaaatattgatgaactattagaaacagtccttttggttgctgaagtggaagaattgaaagctgatccgacggttcgtgctattggtactgtaattgaagcacgcttagataaaggtaaaggtgctatcgctacgcttcttgtccaacaaggaactcttcatgttcaagatccaatcgttgttggtaatacctttggtcgtgtccgtgccatggtaaatgaccttgggcgtcgtgttaaatctgcggagccatcaacaccagtttccattactggtttgaacgaaacaccaatggctggtgatcactttgctgtttacgctgatgaaaaagctgcgcgtgcagctggtgaggagcgatcaaaacgtgccctcctcaaacaacgtcaaaatacacagcgtgttagccttgataatctctttgatacccttaaagcaggagaaatcaagactgttaatgtcatcatcaaagcagacgttcaaggttctgttgaagcccttgcagcatctcttgtaaagattgaagtggaaggtgtccgtgtcaatgtcgttcactctgctgtaggtgctatcaatgagtctgatgtgacccttgctgaagcatcaaatgctgttattatcggtttcaacgttcgccctaccccacaagctcgtcaacaagcagatacggatgatgtggaaattcgtcttcatagtattatctataaagtcattgaagaagtagaagaagccatgaaagggaaacttgaccctgtttaccaagaaaaaattcttggtgaagccattatccgtgaaaccttcaaagtttctaaagtgggaacaattggtggctttatggtaatcaacggtaaggtgacacgtgattcgagtgttcgtgttatccgtgatagtgtcgttatttttgatggtaaactggccagcttgaaacattacaaagatgacgttaaagaagtcggtaatgctcaagaaggtgggttgatgattgaaaactttaacgatcttaaagttgacgatactattgaagcctatattatggaagaaattgtgagaaaatag

SEQ ID NO: 38511 - DNA, 1158 bp, Streptococcus pyogenes
atgagcaaagaaatgctagaagccttccgtattttggaagaagaaaaacacattgataaagcagatattattgacgcagtgacagaatcattaaagtctgcctataaacgtcgctatggtcaatcagaatcatgtgttattgaatttaatgaaaaaacagctgattttcaagtatttacggttcgtgaggttgttgaagaagtttttgacagccggcttgagattagtttgaaagatgctcttgctatcagttctgcctatgaattgggtgataagattcgctttgaagaatctgtcaatgaatttggacgtgtcgcagctcaatcagctaaacagactattatggaaaagatgcgccgccaaatgcgtgaagtgatgttcaatgaatacaaagagcatgaaggtgaaattatgacaggaacagttgaacggtttgatcaacgttttatttatgtcaatcttggttccttagaagcacaattgtctcaccaagaccagattccaggtgaaactttcaaatcacatgaccgtattgacgtttatgtctacaaagttgaaaataatcctaaaggagttaacgtctttgttagtcgtagccatccagaattcatcaaacgtattatggagcaagaaattcctgaagtctttgatggtactgttgaaatcatgagtgtttctcgtgaagcaggtgaccgcaccaaggttgctgtgcgcagtcataatcctaacgttgatgccatcggaacaattgttggacgtggtggaagtaatattaaaaaggtcatcagcaagttccatccaaaacgtgtagatgctaagacggggcttgaaattccagttgaagaaaatattgacgtgattcaatgggtagatgatccagctgagttcatctacaatgccattgctccggctgaagtagacatggtactttttgacgatgaagatcttaaacgtgctacggtagtagttcctgatagcaaattatcattagctatcgggcgtcgcggccaaaatgttcgtttagcggcacatttgactggctaccgtattgatatcaaatcagctagcgaatatgatcgtcttgaggcggaaaaagaagcagcaacagctgtggaagagccagttgttgacgatgttatgactgccgaggaagtataa

SEQ ID NO: 38512 - DNA, 792 bp, Streptococcus pyogenes
gtgacaacgacggaacaagaacttaccttgactcccttacgtgggaaaagtggcaaagcttataaaggcacttatccaaatggggaatgtgtctttataaaattaaatacgacccctattctacctgccttagcaaaagaacagattgcgccacagttactttgggccaaacgcatgggcaatggtgatatgatgagtgcccaagaatggcttaacggccgtacattgaccaaagaagatatgaacagtaagcaaatcattcatattctattgcgccttcacaaatctaaaaaattagtcaatcaactgcttcagctcaattataagattgaaaacccatacgatttattggttgattttgagcaaaatgcacccttgcaaattcagcaaaattcatacttacaagctatcgttaaagaattaaaacggagcttaccagagttcaaatcagaagtagcaacgattgtgcatggagatattaaacatagcaattgggtgattactactagtggtatgatttttttagtagattgggattctgttcgtctaactgatcggatgtatgatgttgcttacctgttgagccactatattccacggtctcgttggtcagaatggctgtcttattatggctataaaaataatgacaaggttatgcaaaaaattatttggtatggtcaattttctcacctgacacaaattctcaagtgttttgacaagcgtgacatggagcatgtgaatcaggagatttatgccctcagaaaatttagagaaatatttagaaagaaataa

SEQ ID NO: 38513 - DNA, 726 bp, Streptococcus pyogenes
atgttaaacattaaaaatctaacaggaggatatcacaatatccctgttttaaacgatgtctcattttctgtagacaatggagagttagtcggtttgatcgggctaaatggtgctggaaagtcaacaactatcaacgaaattattggctttttgaagccttatcaaggaagtatttctattgatggtttaactctagcagaaaatgcagttgcctaccgtcaaaaaataggttttatcccagaaactcctagtctctatgaagaattgaccttatcagagcatatcaacaccgtagctatggcttatgatatcgacttagaagtggcacaaaaacgagcacaacctttcttggaaatgtttcgtttaactgacaaacttgaatggtttcctgtcaatttttctaaagggatgaaacaaaaagtcatgattatttgtgcctttgtcattgatccaagtctatttattcttgatgaaccattcttagggttagaccctttagctatttcagacttaatccaaacgctagaagtcgaaaaagcaaaaggaaaatctattttgatgagtacacatgttttggactctgctgaaagaatgtgtgatcgttttgtgattttgcatcatggacaagttcgtgcccaaggaactcttgctgacttgcaagaagcttttggtgaccgttcagcgagcttaaatgatatctatcttgcattaacaaaagaggattaa

SEQ ID NO: 38514 - DNA, 1275 bp, Streptococcus pyogenes
atgaaaattggaaaaaaaatagttttaatgttcacagctattgtgttaacaactgtcttggcattaggtgtctatctaactagtgcttataccttctcaacaggagaattatcaaagacctttaaagatttttcgacatcttcaaacaaaagtgatgccattaaacaaacaagagctttttctatcttgttgatgggtgttgatacaggctcttcagagcgtgcctccaagtgggaaggaaacagtgattcgatgattttggttacggttaatccaaagaccaagaaaacaactatgactagtttagaacgagataccttaaccacgttatctggacccaaaaataatgaaatgaatggtgttgaagctaagcttaacgctgcttatgcagcaggtggcgctcagatggctattatgaccgtgcaagatcttttgaatatcaccattgataactatgttcaaattaatatgcaaggccttattgatcttgtgaatgcagttggagggattacagttacaaatgagtttgattttcctatctcgattgctgaaaacgaacctgaatatcaagctactgttgcgcctggaacacacaaaattaacggtgaacaagctttggtttatgctcgtatgcgttatgatgatcctgagggagattatggtcgacaaaagcgtcaacgtgaagtcattcaaaaggtattgaaaaaaatccttgctcttgatagcattagctcttatcggaagattttatctgctgtaagtagtaatatgcaaacgaatatcgaaatctcttctcgcactatccctagtctattaggttatcgtgacgcacttagaactattaagacttatcaactaaaaggagaagatgccactttatcagatggtggatcataccaaattgttacctctaatcatttgttagaaatccaaaatcgtatccgaacagaattaggacttcataaggttaatcaattaaaaacaaatgctactgtttatgaaaatttgtatgggtcaactaagtctcagacagtaaacaacaactatgactcttcaggccaggctccatcttattctgatagtcatagctcttacgctaattattcaagtggagtagataccggccagagtgctagtacagaccaggactctactgcttcaagccataggccagctacgccgtcttcttcatcagatgctttagcagctgatgagtctagctcatcagggtctggatcattagttcctcctgctaatatcaaccctcagacctaa

SEQ ID NO: 38515 - DNA, 813 bp, Streptococcus pyogenes
atgactaaaaaattgattgccattgatttggatggaaccttattacatcatgacaacaccatctctacctatactcaaaaaaccatcaaagctgtccaagacaagggccaccacgtcattatttcaacaggccgtccttaccgcatggcactgggctactatctgcagctcaatttaaagaccccaatcatcacttttaatggggccttgacccacatgcctgaacaaaaatgggcctatgaacataatgtcactttggacaaaggctacctactaaggttactaaaatatcaggatgatttccagatggattttattgccagtgagtatcgaaaaaatgtctacatcaccatgaccaatccagaaagtatcgacccgcaactctttggtgttgatgaaattactcaggacatggcattagagattaccaaaatcactcgaaatccaaacgccttattgatgcaaacgcatcacgaagacaagtatgccttagctaaaaacatgcgtgcttgcttcaaagatgaaattgaaattgattcttggggaggccctctcaacattcttgaaatttcgtctaagaatgtcaataaagcttacgctctgaactatctccttggaatttacaatatggataaaaaggatttaatcgcctttggtgatgaacacaatgacactgagatgctagcttttgctggaactggttatgctatgaaaaatgctagccctgtgctactgccttatgctgatcagcagcttaatttttccaacgaagaagacggtgttgccaaaaaattggaagaacttttcttgtag

SEQ ID NO: 38516 - DNA, 993 bp, Streptococcus pyogenes
atgggtatcggtattattattgccagccatggtaaatttgctgaaggtattcatcaatctggttctatgatttttggtgaacaagagaaagttcaagttgttactttcatgccaaacgaaggaccagatgatttgtatggacacttcaacaatgctatccaacaatttgatgctgatgatgaaatccttgtgctagctgacctttggagtggttctccatttaaccaagctagtcgtgtggcaggtgaaaatcctgaccgcaaaatggcgatcatcactggtctcaacttgcctatgcttattcaagcttacactgaacgtcttatggatgctggtgcaggtgttgaacaagttgctgcaaacatcattaaggaatctaaggacggtatcaaagcccttcctgaagaccttaacccagttgaagaaactgctgcaactgaaaaagttgttaacgcacttcaaggagctattcctgctggaactgtcatcggagatggtaaattaaagatcaatcttgctcgtgttgacactcgtcttttacacggtcaagttgcaacagcatggactccagcttctaaggctgaccgtatcattgttgcttctgatgaggttgctcaagatgaccttcgcaaacaattgatcaaacaggctgcacctggtggtgtcaaagctaacgttgttccaattagcaaattgattgaagcttctaaagatcctcgttttggtaacacacacgcacttattcttttccaaacccctcaagatgcccttcgagcggttgaaggtggtgttgaaatcaacgaattgaacgttggttcaatggctcactcaactggtaaaacaatggttaacaacgttttatcaatggacaaagaagacgttgctacttttgaaaaattacgcgacctaggtgttacattcgacgtccgtaaagttcctaacgattctaagaaaaacttatttgagcttatccaaaaaactaacattaaataa

SEQ ID NO: 38517 - DNA, 1278 bp, Streptococcus pyogenes
atgctagatcttaaacgtatccgtaccgattttgacactgtcgctgccaaattaaaaaaccgcggtgtttctgaagacaccctgacccatcttaaagaacttgatgaaaaacgtcgtgctctattagtgcaatcagaagaattaaaagcagagcgtaatattgcttctgcagccatcgcccaagcaaaacgtcaaaaagaagatgccactcaacaaattgccgatatgcaaaaagtctctgcagatatcaaaactattgacaatcaactagtagctatcgaccagcaagttactgacatcatcactgttttacctaatactcctcacgattctgtccctgttggagctgacgaagaagacaatgtcgaaattcgccgttggggaacgcctcgtgactttgacttcgaagttaaggctcattgggatctaggcgaagatcttgatattttagactgggaacgtggggcaaaggtaactggtgctcgtttcttattctataaaaatcttggtgctcgtttggagcgtgctctttataacttcatgctggatgaacatatcaaagaaggttatcaagaaatcatcacaccttacatggttaaccacgattccatgtttggtacaggacaatatccaaaattcaaagaggacacctttgaattagctgataccaactttgtcctgattccaactgctgaagtgcctttgaccaattattaccgtggggaaatcctagacggcaaagaattgccaatttactttactgcaatgagcccatcttttcgttctgaagcgggttctgcgggtcgtgacacacgtggccttatccgcctacaccaattccacaaagttgaaatggttaaatttgctaaaccagaagaatcttaccaagaactagaaaaaatgactgctaatgctgaaaatattcttcaaaaacttggtttgccatatcgcgtcatttccctttgtactggagacatgggcttctcagctgctaaaacctatgaccttgaagtctggattccagctcaaaatacctatcgtgaaatttcatcatgttcaaatacagaagatttccaagcacgtcgtgctcaaatccgttaccgtgatgaggctgacggtaaggtcaaacttctccacacccttaatgggtcaggacttgctgtcggtcgtaccgtagcagccattttagaaaactaccaaaatgaagatggttctgttaccatccctgaagtactccgcccttacatgggtggcgaaaccgtcatttcacctaaataa

SEQ ID NO: 38518 - DNA, 771 bp, Streptococcus pyogenes
atgacagatgtatcaagaattttaaaagaagcgcgtgatcaagggcgtttaacaactttggattacgccaaccttattttcgatgactttatggaactgcatggcgatcgccatttttcagatgatggtgccattgtaggtggcctagcttatttggcgggacaacctgttacggtcattggtattcaaaaaggtaagaatttacaggataatttggcaaggaattttggccagcccaatccagaaggttatcgtaaagctttgcgccttatgaaacaggcagaaaaatttggacgaccagttgttacgtttatcaatactgcaggagcctatccaggtgtcggtgcggaagaacgaggacagggtgaggccattgctaaaaatttgatggaaatgagtgatctcaaggttcccattatcgccatcattattggtgaaggaggctctggtggtgcattagccttagcggttgccgatcaggtctggatgcttgaaaatactatgtatgcggttcttagcccagaaggctttgcttctattttatggaaggatggttcaagggcgaccgaggccgctgaattgatgaaaatcacagcgggtgaactctacaaaatgggaatagtagaccgtattattccagaacatggttatttttcaagtgaaatcgttgacatcatcaaagctaacctcatcgaacaaataaccagtttgcaagctaagccattagaccaattattagatgagcgctaccaacgctttcgtaaatattaa

SEQ ID NO: 38519 - DNA, 867 bp, Streptococcus pyogenes
atggctttatttcgtaaaaaagataaatacatccgtattactcccaataattccctcaaaggatctgtcagccataatgtcccagaagttccagatgaactctttgcgaaatgcccagcttgtaagcacatgatttataagaaagatttgggattggcaaagatttgcccaacctgttcttacaattttaggatttctgcccaagagcggctgaccttaacagttgatgaaggctctttccaagaattatttacaagtattgaaaccaaggatccgttacgttttccaggttatcaggaaaaattacaaaaagccaaggaaacgacaggtctgcatgaagctgttttgacagggaaagctatggttaaggagcaaaagattgctcttgctattatggattctcactttattatggctagtatgggaactgttgttggggaaaaaattacccgattgtttgaattggctatcgaagaaaacctgccggtggtgatttttacggcttcaggaggcgcccgtatgcaagagggtatcatgagcctcatgcaaatggccaaggtctctgcagctgtgaaaagacattctaatgcaggcctcttttacctcactattttgacagatccaactactggtggggtaacagctagttttgccatggaaggggatattattttggcagaacctcaatccttggttggctttgcaggtcgtcgtgtcattgagaccacagttcgtgaaaacttgccagatgatttccaaaaagcagaatttttacaagaccatggttttgtggatgctattgtgaaacgaacagagttgcgagacaagattgcccacttagtagcatttcatggaggtggccaatga

SEQ ID NO: 38520 - DNA, 1365 bp, Streptococcus pyogenes
atgtttaaaaaaatcttaattgctaatcgtggtgaaattgcagtgcgtatcattcgtgctgcacgagaattagggatttccacagttgcagtttattcggaagcggataaggaagctctgcacacgatcttggcggacgaggctatctgtattggtcctgcccgttccaaggaatcctatcttaatatgaattccgtcttgtcagcagctattgtgacaggagcccaagcgattcacccagggtttggctttttaagtgaaaactcaaagtttgcgaccatgtgtgaagagatgaatattaaatttatcggtccatccgcatcggttatggataaaatgggtgataaaatcaatgctcgttctgaaatgattaaggcaggagtgcccgttattccagggtcagatggtgaagtttataacgctcaagaagccttagctattgccaataagattggttatcctgtcatgctaaaagcatcggcaggtggtggaggtaaagggattcgtaaagtggagacagaagcagatttggaggcggctttcaatgctgccagtcaagaagctttgggagctttcggaaatggcgccatgtatttggaaaaagtaatttatccagctagacatattgaggtgcaaattttaggagacgcttacggtaacatcattcacttgggagaacgggattgctccttgcaacggaataatcaaaaagtcttggaagaaagtccatccattgctattggcaataccctcagacacgaaatggggcaagcagcggttagagcagctgaagctgtagcctatgaaaatgcgggaaccattgagtttttgttggacgaagacagcgagaaattctatttcatggaaatgaatacccgtatccaagttgagcatcctgtcaccgaatttgtgacaggagtggatattgtcaaagagcaaatcaaaattgcagcaggtcagcctttggcgattaatcaagaagacatcactatcacgggacatgctattgaatgtcgtatcaatgctgaaaatactgcttttaactttgcaccgagtccaggaaagattacagacttgtatatgccaagtggtggtgtaggactacgagttgattcagcagtttacaatggctatgccattcctccttattatgacagcatgattgctaaaatcatcgttcatggaagcaatcgatttgacgctttgatgaaaatgcaacgtgccttagttgaattggaaattgaaggcattatcaccaatacagacttccagctcgatttgatttcagataagcgagtgattgcaggagattatgatacctctttcttgatggaaacgttcctgccacattacaataaagattag

SEQ ID NO: 38521 - DNA, 420 bp, Streptococcus pyogenes
atggatattagagaaattcaagcggctttgcctcatcgctacccaatgttattggttgatcgtgtgttagaagtgtcagacgaccatatcgttgccattaaaaatgtgactattaatgagcctttctttaacgggcattttcctcactatcctgtgatgccaggtgttctgattatggaagctttggctcaaacagctggtgtcttagaattgtcaaaagaagaaaataaaggcaagttggtcttttacgctggaatggataaagtgaagttcaaaaaacaagtcgtccctggtgatcaacttgtgatgacagcaacctttatcaagcgtcgcggtaccattgctgtcgttgaagccagggcagaagttgatggcaagctagcagcaagtggaacattaacctttgcctgtgggcaatga

SEQ ID NO: 38522 - DNA, 501 bp, Streptococcus pyogenes
ttgaatattcaagaaatcaaagatttgatggctcagtttgatacctcaagcctacgtgaatttttattcaaaacaaatgaaggtgagctaatctttagtaaaaacgaacaacacctcaatgcatcgacatcaaatcaagaacatgctgtgcctgtaccacaggtacaacttgttccgaatccaactgcttcggaagcgtccagtccagcatcagttaaggatgttcctgtagaggagcaaccacaagcagaatcttttgtagcagaaggtgatattgttgaaagtcctttagtcggtgtagcctatcttgcagctagccctgacaagccaccatttgtggcagtcggagatactgtaaaaaaaggacaaacccttgtgattatcgaagccatgaaggtgatgaacgaagtgccagcgccatgtgatggtgtgattacagaaattttggtatcaaatgaagatgtcattgaatttggacaaggattggtgcggatcaaatga

SEQ ID NO: 38523 - DNA, 1233 bp, Streptococcus pyogenes
atgacatttaaaagagtagtggtaacaggttatggtctaacatctccaatcgggcatgatcctgaaacgttttggaacaatctgaaagctggccaaattggtattggtcctattactaaatttgacacgactgattatgcagtcaagaatgctgctgaaattcaggattttccatttgacaaatactttgtgaaaaaagatttgaaccgtttcgatagatattctctttatgctctttacgcagcgaaagaggctattaatcatgctgatttaaatattgagatggttgattccgatcgatttggcgttattgttgcttcaggtattggtggaattgcggagattgaagagcaagtgattcgcttacatgaaaaagggccaaaacgtgtgaagccaatgacgttgccaaaagcgctaccaaatatggctgcaggaaatgtcgccatgtctttaaaagctcaaggagtatgtaaatcaattaatactgcctgcgcttcttcaaatgatgcgattggggatgcctttcgtgccattaaatttgggactcaagatgtgatgatagttggtgggtcagaggcggccataaccaagtttgccattgctggcttccaaagtttaacagctctctcaacaactgaagatccaagcagaagctctattccatttgataaagaccgcaatggttttatcatgggagaaggatcaggaatgcttgttttagaaagcctagaacatgcgcaagaacgcggggcgacaatcttagcagaaattgtgggttatggaaatacctgcgatgcctaccatatgacatctccaaatcctgagggattaggagctcgtaaagccatccacttagccttacaagaagctggtattgaagccagtgctattaattatgtcaatgcgcacggaacttcaaccccagctaatgaaaaaggagagagtcaagcaattgtagccgttcttggtaaggatgttccggtgtcttcaacaaaatcgtttacgggtcaccttcttggagcagcaggcgctattgaagctattgccactatcgaggctatgcgtcataactatgttccgatgacggctgggacacaagctttatcagaggatatcgaagcaaatgtcatctttggagaaggaaaagaaacagctatcaactatgccatttcaaatacttttggatttggtggtcataatgctgtattagctttcaaatgttgggaggagtag

SEQ ID NO: 38524 - DNA, 735 bp, Streptococcus pyogenes
atggaaattaaaggaaaaaatatatttatcacaggctcaacgagaggtatcggtttagcaatggctcatcaattcgccagtttagaagctaatattgtcttaaatggtcgctctgctatctctgaggagcttgttgctagttttactgactacggcgttacagttgttaccatctctggggatgtttcagaagcatcagaagctaaacgtatggtcaatgaagctatcgaaagtttaggttcgattgatgttttagttaacaatgctggcattactaatgataaattgatgcttaaaatgacggaagaggattttgagcgcgtcttgaaaatcaatttgaccggtgcttttaacatgactcaatcagtgttaaaaccaatgatcaaggcccgccaaggagcaattattaatgtctctagtgtggttggtttaacaggcaatattgggcaagcaaactatgctgcttctaaggcaggaatgattggttttaccaagtctgttgcccgtgaagttgctgctcgtaacatttgcgtgaatgctattgctccaggatttatcgagtccgacatgacaggtgtccttcctgaaaaaatgcaagagcaaatcttaagtcaaatcccaatgaaacgtattggaaaagctcaagaagttgctcacttagcaagcttcttggtggaacaagattatattacgggacaagttatcgctattgatggcggtatgacaatgcaataa

SEQ ID NO: 38525 - DNA, 939 bp, Streptococcus pyogenes
atgacaaagacagcctttttatttgccggtcaaggtgctcaaaaattagggatggcaagggatttttatgataactttgctattgtaagaaaaacctttgatcaagctagtcaagtattgggatacgatttgcgccgtttgattgatagtgacgagttaaaacttaatcaaactagctatacgcaaccagctattttgacatcatcaattgctatttaccgtgttttgggcttacatcacgttaaaccggatatggtagctggtctttccttaggagaatactcagctttggtagcatcaggggcactctcttttgaagataccctatccttagtagctaagagaggccgcttgatggaggaagcagcaccacaaggatctggaaagatggttgccgttatgaatacagacgtgcaagtcatcgaagaagtctgtcaaatagctgctaaacatggagtggttgctccagcaaactataatactcctagtcaaattgtaattggtggtcagacagatgctgtgaacgtggcagttgaacttttaaaggaaaggggagttaagcgtttaatccctttaaacgtgtcaggtcctttccacactgctttgttagaaccagctagccgcttgttggctaaagagttggaaagatacaacttcagtgacttcaagattcctttggttggtaataccgaagctaatattatggaaaaagaccgtatcccagaactattagcccgtcaagtcatggagcctgttcgtttttatgacagtgttgcgactttagtagaaagtggcataacacaattcattgaggtaggaccaggtaaggttttgacaggttttgtgaagaaaattgataaaaatttactatgtactagtgttgaaaacatggtaagcttacgtttatttttagatagagaggacattcatggaaattaa

SEQ ID NO: 38526 - DNA, 972 bp, Streptococcus pyogenes
atgaaaacacgtattacagaattacttaatattgattaccccatttttcaaggaggaatggcttgggttgctgatggtgatttagcaggtgcagtttctaatgctggtggtttaggcattataggtggtggcaatgctcccaaagaagtcgttaaagctaatattgatcgtgtcaaagctattactgatagaccttttggggttaatatcatgcttttatctccttttgctgatgatatcgttgatctggtcattgaagaaggtgttaaagtagtaacaacaggcgcaggaaatccaggaaagtatatggaaagactgcaccaggcgggtataatcgttgttcctgttgtcccaagcgttgcgctagccaaacgtatggaaaagcttggggtagatgctgttattgctgagggtatggaagctggaggacatattggcaagttaacgactatgtctttagtaagacaagttgttgaagcggtttcgattcctgtcattgcggcaggtggtatagctgatggtcatggtgcagcagcagcatttatgttaggagcagaggctgttcaaattggaactcgctttgttgttgctaaagaatccaatgctcaccaaaattttaaagataaaatcttagcagcaaaagatattgatacggtgatttctgcgcaggttgtgggccaccctgtccgttctattaaaaataaattgacctcagcttacgctaaagcagaaaaagcatttttaattggtcaaaaaacagctactgatattgaagaaatgggagcaggatcgcttcgacacgctgttattgaaggcgatgtagtcaatggatctgttatggctggccaaattgcagggcttgtgagaaaagaagaaagctgtgaaacgattttaaaagatatttattatggtgcagctcgtgttattcaaaatgaagctaagcgctggcaatctgtttcaatagaaaagtag

SEQ ID NO: 38527 - DNA, 225 bp, Streptococcus pyogenes
atggcagtatttgaaaaagtacaagaaattattgttgaagaacttggtaaggagacagaagaagtaacactagaaactacatttgatgatttagatgcagattcacttgatgttttccaagttatttcagaaattgaagatgcttttgatattcaaattgaaacagaagaaggattaaatactgttggtgaccttgttgcttacgttgaagaaaagtcaaaataa

SEQ ID NO: 38528 - DNA, 975 bp, Streptococcus pyogenes
atgattttttctaaaatcagtcaggtagcccactatgttccacagcagttagtgactaataatgatttagctagcataatggacactagtcatgagtggatcttttctcgaacaggaatagcagaacgccatatttctagagatgaaatgactagtgacctagctattcaggttgctgatcagcttttaactcagtctgggttaaaagctgatgctattgattttattattgttgcaactatcagccctgatgccactatgccatcaacagctgcgaaagttcaagcagctattgcggctacaagtgcttttgcttttgatatgactgctgcttgtagtggctttgtctttgccttggctatggcagataagcttattgcatcaggtgcctaccaaaacggaatggtaataggtgcagagactttatctaagttagtaaactggcaggatcgagcgacagccgttctttttggagacggagctggtggcgtgctactggaagccagtaaagataagcatgttttagcggaaacattacacacagatggtgcgagatgtcagagtttgatttcaggagaaactagtctttcatctccttactcaattggcaaaaaagccatagcgactattcagatggatggacgtgccatatttgattttgcgattagggatgtgtcaaaaagcatcctcacactaatggcgcaatcagatattacaaaagatgacatagactattgtttattgcatcaagctaatcgtcgtatacttgataaaatagcacgcaagattgatgttcctcgggaaaaattccttgaaaacatgatgcgttatggtaatactagtgctgctagtatcccaatcctcttgtcagaggctgttcaaaagggacagattaggttagatggtacccaaaaaatcttactttccggttttggtggaggtttgacatggggaagtctaattgttagaatctag

SEQ ID NO: 38529 - DNA, 792 bp, Streptococcus pyogenes
atgcagtttaaacacatcatctttgatgttgtagatgatcttgcgacattgactttaaaccgtccagaggtttcaaacggttttaatattccaatttgtcaagagattctggtagcattagcagaagttaaacgcgatacatctgtgcgttttttattaattaaagccgttggaaaagtgttttcagttggtggtgacctagttgaaatgcaagaagctgttgcaaaagataatgtgcagtcgctagtcaagattgctgaactggtacaagaaatttcttttgcaataaagcatttgccaaaaccagtcatcctttgcgccgatggagctgtagctggagcggcttttaatatagctttagctgttgacttttgtatcgctagtactcaaacaaaatttatccaagcttttgtaaatgttggactagcaccggatgccggtggtttatttctattgactcgtgcagtaggacttaatcgtgcaactcaccttgtgatgacaggtgaaggaattactgctgataaaggtctcgattatgggtttgtctaccgtacggcagaatctgataaactagacaaagtttgtcttcaacttttaaagcgattgagacgtggctcttcaaattcttatgctggaatgaaatcattggtctggcaaagttttttcacaggatgggaagattatgctaaggcagagcttgctattcaagaggagctagctttcaaggaagattttaaagaaggtgtcatagcttttggagaaaggcgccgaccaaattttcaaggtaagtaa

SEQ ID NO: 38530 - DNA, 1827 bp, Streptococcus pyogenes
atgtctaaaattattggtattgacttaggtacaacaaactcagcagtagcagttcttgaagggactgaatcaaaaatcattgctaacccagaaggcaatcgtacaactccttcagtagtatcattcaaaaatggtgaaattatcgtgggtgatgctgcaaaacgtcaagcagtgacaaacccagaaacagtaatctctattaaatctaaaatgggaacttctgaaaaagtttctgcaaatggtaaagaatatactcctcaagaaatttcagcaatgattcttcaataccttaaaggttatgctgaagactatcttggagaaaaagtagaaaaagcagttattactgttccagcttacttcaacgatgcacaacgtcaggcaactaaagacgctggtaaaattgcaggtcttgaagtagaacgtatcgttaacgaaccaacagcagccgcacttgcttatggtatggataagactgacaaggatgaaaaaatcttagtttttgaccttggtggtggtacatttgacgtatcaatccttgaattaggtgatggtgtcttcgacgttcttgcaacagcaggtgataacaaacttggtggtgacgactttgaccaaaaaattattgatttcttagtggctgaatttaagaaagaaaatggcattgacttatcacaagataagatggcacttcaacgcttgaaagatgctgctgaaaaagctaaaaaagatctttcaggtgtgacacaaacacaaatttcattaccgttcatcactgctggttctgccggtcctcttcacttggagatgagcttatctcgtgctaaatttgacgatctcactcgcgaccttgtagaacgtacgaaaactccagttcgtcaagccctttcagatgcaggattgtcattgtcagaaattgatgaagttatccttgttggtggatcaactcgtatcccagcagttgtcgaagctgtaaaagctgaaactggtaaagaaccaaataaatctgtaaaccctgatgaagtggttgctatgggtgctgctatccaaggtggtgttatcactggggatgtgaaagacgttgtccttcttgacgtaacaccattgtcacttggtattgaaacaatgggtggtgtcttcactaaattgatcgaccgcaatacaactatcccaacatctaaatcacaagtcttctcaacagcagcagacaaccaaccagctgttgatatccatgttcttcaaggtgaacgcccaatggcagcagataacaagactcttggtcgcttccaattgactgatatcccagctgcacctcgtggaatcccacaaattgaagtaacatttgatatcgataaaaacggtattgtttctgtaaaagctaaagaccttggtacgcaaaaggaacaacacatcgttatcaaatcaaacgacggactttctgaagaagaaattgatcgcatgatgaaagacgctgaagctaatgccgaagccgatgcgaaacgtaaagaagaagttgaccttaaaaacgaagttgaccaagctatctttgctactgaaaaaacaatcaaagaaactgaaggtaaaggctttgatacagaacgcgatgcagcgcaatcagctcttgacgagttaaaagctgcgcaagaatctggcaaccttgacgacatgaaagctaaacttgaagcattaaatgaaaaagcgcaagctttggctgttaaaatgtacgagcaagctgcagcagctcaacaagcagcacaaggtgcagaaggtgcacaagctaatgattcagcaaataatgatgatgttgtagatggcgaatttacagaaaagtaa

SEQ ID NO: 38531 - DNA, 708 bp, Streptococcus pyogenes
atgacaaaaacaaggttgtatattgccagacatggaaaaacgatgtttaataccattggtcgcgctcagggttggagtgacacacctcttacaaaaaaaggagaagaaggtattcgagaacttggcctaggtttaaaagatgcaactataccatttaaggctgcgttttcaagtgattcaggtcgaaccatgcagacaatagaaattattttaagagaatcagaaaacgaatttttgccttatactaaagataatcgtattcgtgagtggtgttttgggagtctagaagggacttatgattcagaattatttctaggtgtccttccaagaacaaaagcctttgaaaatcgtgataacctacgtgatgttccctattctgaactggcagaaagcatcgtggaagtagataccgctaattgggcagaaccatgggaagttcttcgtaagcgcatttgggaggggtttgaagctattgccttgtctattcaaaatgctggcggcggaaatgctcttgtggttagccatggtatgacaattggaacgtttctgtggttgattgatccagatcgagacaaacagtatattgataatgggagcgttacagttgttgaatttgatgatggccaatttacgataaagactattggagatatgagttaccgctaccgcggtcgtgaaataatagaagaacggtcagatgaaatataa

SEQ ID NO: 38532 - DNA, 1440 bp, Streptococcus pyogenes
atgaattttgaaaccattattgggcttgaagtccatgtggaattaaataccaattccaaaattttctcaccttcgtcagctcactttggtgaggacccaaatgccaacacgaatgtgattgattggtctttcccaggggtcttaccagtcatgaacaaaggggtgattgatgcgggcataaaagcagcgcttgcccttaatatggacatccataaagagatgcactttgaccgcaaaaattatttctacccagataatcctaaagcttatcaaatttcacagtttgatgagccgattggctacaacggctggattgatatcaaactagaagacggttcaaccaagaaaattcgtattgaacgcgcacacttggaagaagatgctggtaaaaacactcatggcacagatggttattcttatgtggaccttaaccgccaaggagttcctttgattgagattgtgtcagaagccgacatgcgttctcctgaagaagcctatgcttatttgacagctctgaaagaaatcatccagtatacgggtatttctgatgtcaagatggaagaaggctccatgcgtgtggatgccaatatttctcttcgtccttacgggcaagaacaatttggaacaaagaccgaattgaaaaacttgaactccttctcaaatgtccgtaaagggcttgaatttgaggtggaacgtcaagccaaactcttgcgttcaggtggtgtgatacgccaagaaacgcgccgctatgacgaagcgaataaggggactattttgatgcgggtcaaagaaggggcagcggactatcgttatttcccagaaccagacctgccattatatgagattgatgatgcttggattgacgagatgcgtgctcaattacctcaattcccagctcagcgtcgtgctaaatacgaagaggaacttggcctctcagcttatgatgctagccagctaacagctaccaaagtcttgtcagatttctttgaaactgcagtaagtcttggtggcgatgccaagcaagtctctaactggttgcaaggagaagttgcccaattcttaaatgcagaaggcaaaaccattgaagaaatcgctctgacaccagaaaatttggtggagatgattgctatcattgctgatggtacaatctcttctaaaatggctaagaaggtctttgtgcatttggctaaaaacggtggctcagcacgtgcctacgtcgaaaaggcaggacttgttcagatttctgatcccgctgttttggtaccaattattcaccaagtctttgctgataatgaagctgcagtagctgatttcaaatcaggcaaacgtaatgctgataaggctttcacaggcttcttgatgaaggcaaccaaaggtcaagctaatccacaagtcgctcaacaattattggcacaagaattgcaaaaattgcgagattga

SEQ ID NO: 38533 - DNA, 1467 bp, Streptococcus pyogenes
atgtcttttaatcataaaaccattgaagagttgcatgacctccttgtagctaaggagatttcagcaacagaattgacccaagcaacacttgaagacatcaagtctcgtgaggaggctgtcggatcgtttatcactgtttcagaagaagttgctcttaaacaagctgcggcaattgatgccaaaggtattgatgctgataacctcatgtcaggtattccgttagctgttaaggataatatttcaaccaaggaaatcctaaccacagccgcttcaaaaatgttgtataactacgagccgatttttaatgccacatcagtagcaaatgcctacgctaaagacatgattgttattggaaaaaccaacatggacgaatttgccatgggtggttcaacagaaacctcttatttcaagaaaacgaaaaatgcttgggaccacacaaaagtacctggaggctcatcaggtggttcggcaacagcagtcgcttcaggacaagtccgtttatctcttggttcagacactggtggttctattcggcagccagctgcatttaatagtgttgtcggtttgaaaccaacctatggcactgtttctcgctatggtctcattgcttttggaagttcacttgatcagattggaccttttgctccgacagttaaagaaaacgcccaattattaaatgtgattgcaagtagcgatgtcaaggatgccacttcagcgcctgtccgcattgcagactacacatctaagattggtcgtgacattaaaggcatgaagattgcccttcctaaagagtatcttggcgaagggattgatcctgagattaaggaaacggttcttgcgtcagttaaacaatttgaagccttaggagctactgttgaggaagtcagccttccacatagcaagtacggtgtggctgtttattatattatcgcttcgtcagaagcgtcttcaaacttacaacgttttgatggcattcgctatggtttccgtgctgacgatgctaaaaacttggatgaaatctatgttaacactcgtagccaaggctttggtgatgaggtgaaacgtcgtatcatgcttggaacctttagtttgtcatcgggttattatgacgcttatttcaaaaaggccggtcaagtgcgcactttgattattcaagattttgacaaggtttttgcggattatgatcttattctaggcccaacaacaccgacggttgcttttggcttagacacactcaaccacgatcctgttgccatgtatttggccgacttattgaccattccggttaacttggctggtctgccaggtatttctattccagcaggattcgtcgatggcttgccagtagggcttcaattaattggtccgaaatacgctgaagaaaccatctatcaagcagcagcagcctttgaagcggtgacagattatcacaagcaacaaccgattatttttggaggtgacaagtaa

SEQ ID NO: 38534 - DNA, 303 bp, Streptococcus pyogenes
atgaaaatttctgaagaagaagttcgccatgtcgcgaagctatcaaaattatcattttcagaaagtgagacaacaacctttgcaacgaccttatccaaaatcgttgatatggttgaattgctgaacgaagttgataccgaaggtgtcgccattacaacaaccatggcagataagaaaaatgtgatgcgtcaagatgtcgctgaagaaggaacagaccgtgccttgctctttaaaaatgttcctgaaaaagaaaatcactttatcaaggtacctgctattttggatgacggaggagatgcctaa

SEQ ID NO: 38535 - DNA, 1023 bp, Streptococcus pyogenes
atgacagcatcagatttacaaagggatcaatccctactggctaaaaaacgtttcagaagtggtctttatctagttcttttaattctcagcctcctatttttggcggttattgccttatcccttggtggtttggcggtttcttatggggcaattgtcaagggactgtttgtggcttatgacccccaagtggctttgatttatgatttgcgttttccaagaattgtcattgctttattagcaggagcagggatagctgtttcgggagttctttttcaagcagtgttgaaaaatcctatttcagaccctgctattatagggatttgtagtggtgctagttttatggttttagtctctagtttacttctgccgcagttgctgctgtatggtccaatcgtatcctttttaggaggcggagtgtctttcctgctgatttatggtttagcatggaagaaagggcttaatcctattcggcttattctaacagggattgctattaatgctttatttatggggttatcaactgctttaaccagctttttcacctcagctagtcccatggtcaatgctcttttagcaggtcatattagtcaaaaaacatgggctgatgtaggggttttattcccttatacattcattggcttgttactagctttgttattgtcaaaaacttgtaaccttcttcttttagatgatcaggtgattcgtcatttaggaatcgatgctacagcgttacggttgggaatttccttggttgctgttttattggcttcggtagccacttcgatcgttggagtggtttctttcctaggcttgattgtccctcatatgagccgcttgctggttggaagtaagcaccaaatcttaattcctttttcagctttgcttggagcctttgtctttttgctagccgatactttaggaagaagtcttgcttacccattggaaattagccctgcgattataatgagtattgtaggcgggccttactttatttacctgctaaggaggtctgatattatatga

SEQ ID NO: 38536 - DNA, 885 bp, Streptococcus pyogenes
atgataaaacgatgtaaaggaattggtctagccttaatggccttctttttggtagcttgtgtgaatcagcaccctaaaacggctaaagagactgaacagcagagaattgtagccacttcggttgctgtggttgatatctgtgaccgtttaaatttagacctcgttggggtttgtgatagtaaattatatacccttcctaaacgctatgatgctgttaagcgtgtgggtttacccatgaatcctgatatagagttgattgcttctttgaaaccaacttggattttgagtcccaattctttacaagaagatttggaacccaagtatcaaaaattggatactgagtatggttttttgaacttacgaagtgttgagggcatgtaccagtccattgatgatttagggaaccttttccaacgtcaacaagaagcaaaagaattgcgccagcaataccaggactattatcgtgctttccaagctaaacgtaaggggaagaaaaagcctaaagtgcttattcttatgggcttgccaggtagttatttggtggcgacgaaccaatcttatgtagggaatcttttggacttggcaggtggtgagaatgtttatcagtcagatgagaaagaatttctatcagctaatcctgaagacatgctggctaaggagcctgacttgattttacgaacagctcatgccattccagacaaggtaaaagtgatgtttgacaaagaatttgctgaaaatgatatttggaaacattttacggcagtcaaggaagggaaagtctatgatttggacaataccctgtttggcatgagtgctaaattgaactacccagaagccttggacaccttaacacagctttttgaccacgtgggagatcatccgtaa

SEQ ID NO: 38537 - DNA, 1101 bp, Streptococcus pyogenes
atgatttcaagtttccatcgcccaacagttgcaagggtcaacttacaagctattaaggagaatgttgccagtgttcaaaagcatattccactaggggtaaaaacgtatgcagttgtcaaggctgatgcttatggtcatggtgctgtccaggtgtcaaaagcactcctacctcaagtggatgggtactgtgtgtcaaatcttgatgaggctttgcaattacgtcaagcaggtattgataaagagattttaattcttggggttttgctgccaaatgaattagagttagcagttgctaatgctattactgttacaatcgctagtttagactggatagctttagctagactggagaaaaaagaatgtcaaggcttaaaagttcatgtaaaagttgattctggtatggggcggatcgggcttcgttcttcaaaagaagtcaatttattgattgatagtctaaaagagttgggtgctgatgtagaaggtattttcactcattttgccacagctgatgaggcagatgatactaaatttaaccagcagttacagttttttaaaaagctgatagctggacttgaggataagcctcgtttagtacatgctagtaattcagccacaagtatctggcatagtgataccatttttaatgctgttcgtttaggaattgtcagttatggtttgaatccaagtggttctgatctaagcttaccgtttccactgcaagaggctttatctctagaatctagcttagtgcatgtcaagatgatttcagctggtgatacagtcggttatggagctacttatactgccaaaaagtctgaatatgtagggactgtcccaatcggttatgcagatggctggaccaggaacatgcaaggcttttcggtgttagttgatggacaattctgcgaaattatagggcgtgtatcgatggatcaactgaccatacgacttcccaaagcatatcctttaggaacaaaagtcactttgattggcagcaatcagcaaaaaaatatttctacaacagatatcgcaaattaccgtaatacaatcaattatgaagttctatgccttttaagtgaccgtattcctcggatatattaa

SEQ ID NO: 38538 - DNA, 357 bp, Streptococcus pyogenes
atgattgttggacatggaatagacttacaagagatttcagctattgaaaaagtttatcaaagaaatcctcgctttgctcaaaaaattttaactgagcaggaattggctatttttgagagttttccttacaaacgtcgactcaactatttggcaggacgctggtcaggtaaggaagcttttgctaaggctatagggacaggtattgggcggttaacctttcaagatattgagattttaaatgatgttagaggatgtcccattctgacaaaatctccgtttaaaggaaatagttttattagcatctcacatagtggcaattatgtacaggctagtgttattttggaggataaaaaatga

SEQ ID NO: 38539 - DNA, 2520 bp, Streptococcus pyogenes
atggccaatattctacgcaaagttatcgaaaatgacaaaggcgaactaagaaaattagaaaaaattgcaaaaaaagtagaatcctacgcagaccaaatggcgtcattgtcggatagagatctacaaggaaaaacacttgaatttaaagaacgctatcaaaaaggtgagaccctcgaacaactattacctgaagctttcgcagttgttcgtgaagcagcaaaacgtgtgttgggcttgttcccttatcgtgttcaaattatgggaggaattgttcttcataacggggatgtccctgaaatgcgtactggtgaaggaaaaactcttacagccaccatgccagtttatctcaatgctattgctggtgagggtgttcacgttattactgttaatgagtatctttcaacgcgtgacgctaccgaaatgggtgaagtgtatagctggttaggtctttcagttgggatcaacctagctgctaagtctcctgctgaaaaacgtgaagcttataattgtgatattacttattcaaccaactctgaagtcggttttgattaccttcgtgacaacatggttgttcgccaggaagacatggtacaacgcccactcaattttgccttggttgatgaagtggactcagtcttaattgacgaggcaaggacacctttaattgtttctggtgctgttagctctgaaaccaatcaattgtatattcgtgctgacatgtttgtaaaaactctgacgtcagtggattatgttattgatgtgcccactaaaacgattggattaagcgattcaggtattgataaagctgagagttactttaacttgagcaatctttacgatattgaaaatgtagccttgactcactttatagacaacgcccttcgtgcaaactatattatgttgttagatatcgattatgtggtcagcgaagatggtgagattcttattgttgaccaatttacaggtcgtacgatggaagggcgtcgcttctcagacggcttgcaccaagctattgaggcaaaagaaggcgttcgtattcaggaagaatcaaaaaccagcgcctcaatcacttaccaaaatatgtttcgtatgtacaaaaaattggcaggtatgactggtactgcgaagaccgaggaagaagaatttcgcgaagtttataacatgcgtattattccaattccaaccaatcgtccaattgcccgtattgatcacactgatttgctttacccgaccttagaatcaaagtttagagcagttgtggaagacgttaaaacgcgtcatgcaaaaggacaacctatccttgtaggtacggttgctgttgaaactagtgatttgatttcacgcaagctggttgaagcagggattcctcatgaggttttgaatgctaaaaatcactttaaagaagctcaaatcattatgaatgctgggcaacgtggtgctgttacaatcgcaactaacatggctggtcgtggtactgatatcaagcttggtgaaggtgttcgtgaacttggtgggttatgtgtcattggtacagagcgtcatgaaagccgtcgtatcgataaccagcttcgtggacgttcaggtcgtcaaggagatccaggtgaatcccaattctatctttcattagaagatgatttgatgagacgtttcggctctgatcgtataaaagcctttttggatcggatgaaattagatgaagaagacactgttattaaatcaggtatgttagggcgtcaagtggaatctgctcaaaaacgggttgaaggaaataactatgatacccgtaaacaggtcttacaatatgatgatgtgatgcgtgaacagcgtgaaattatctatgctaaccgtcgtgatgtcataactgctaatcgagatcttggcccagaaattaaagctatgatcaagcgtactatcgaccgtgctgtagatgctcatgcacgtagcaatcgtaaagatgctatagatgctattgtaacttttgctaggacctcgctggtaccagaagagtttattagtgctaaagagttacgtggtttaaaagatgatcaaatcaaagagaagctttatcaaagagcgcttgctatctacgaccagcaactatcaaaacttcgtgatcaagaagctattattgaattccaaaaagtactcattttgatgattgtggataacaaatggactgaacacattgatgccttagatcaacttcgtaatgctgttggacttcgggggtatgctcaaaataaccctgtggtggaataccaagcagaaggtttcaagatgttccaagatatgattggtgctatcgagtttgatgtaacacgtaccatgatgaaagcacaaattcacgaacaagaacgtgaacgtgcaagtcaacgtgccacaacagcagcacctcaaaacatccaatcgcagcagtcagctaacaccgatgatttacccaaagtggagcgtaacgaagcttgtccatgtggttcaggcaaaaaattcaaaaattgtcacggtcgtaaatccttctcataa

SEQ ID NO: 38540 - DNA, 954 bp, Streptococcus pyogenes
atgtcagaaccattatttctaaaatcaaccatgcacgacaggatttggggtggcaccaagttgagagatgtctttgcttacaacatcccaagtgacaccacaggtgagtattgggctatttctgctcatcctaatggtgtttcgacagttactaatggacgttatcaaggacaacctttaaacacattatatgcgcaagagccggccttgtttgggaatccaaaggaagaagtttttccactgttaactaagattttagatgctaatgactggctaagtgtccaagttcatcctgatgatgcttatggacgtgaacatgaaggagaattaggcaagacagaatgctggtatattatttctgccgaagagggttctgaaattgtatacggccatcaggccaagtccaaagaagaccttcgtgccatgattgaagcaggcgcttgggatgatttgctgactcgtgtcccagtcaaagcaggcgattttttctatgttccaagtggcaccatgcatgcgatcggcaagggaattcttattttagaaacccagcagtcatctgataccacttatcgggtttatgattttgaccgtaaggacgttaatggtaatcttcgtgaccttcatattgaaaagtctattgatgtcttaacgattggtaagccagaaaatagcgtgccagccactatggttttggataatatggtagcaacaactttagtctcaacaccatttttcactgtttacaaatgggtaactagtcaaatggttgacatgaaacaagctgcgccttatcttttagtgagtgttttaaaaggtcaaggaaaactctatgtggaccagaaggcttatgagctagaaaaaggcatgcactttatcttgcctaacgatgttaaatcgtggtcatttgatggtcaattagaaatgattgtgagtcaccccaatcaactcgtttaa

SEQ ID NO: 38541 - DNA, 453 bp, Streptococcus pyogenes
atgactaacagctttcaaaattcaagaagagatttgcgtgaacgtgcctttcaggctttatttaacatagagatgggagctgagttattggcagcttctcagtttgcctatggttatgataaagtaacaggggaggacgctcaagtattggagctgccgatttttttattaagtcttgtgacgggtgtcaataatcataaagaagagttggataacttgatatcaactcatttgaaaaaaggttggtcgttagaacgcttgacactaacagacaaaacgttattacgactaggtctttttgaaatcaagtattttgacaaaacaccagatcgtgttgcactaaacgaaatcattgaagtagttaaaaaatattctgatgaaacctctgctaaatttattaatggcttacttagccaatatgtctcgggagctccttcagcaaataaatcataa

SEQ ID NO: 38542 - DNA, 2829 bp, Streptococcus pyogenes
atgcaaaataaaataataattcatggggcaagagcccacaatttaaaaaatattgacgtggaaattccacgagacaaattagttgtcgtgacagggttatcagggtcaggaaaatctagtctagcctttgatactatttatgcggaagggcaacgtcgttacgtagaaagtttatcagcttatgctagacagttcttgggtaatatggaaaaaccagatgtggattccattgacggtcttagccctgctatttccattgaccaaaaaaccaccagtaagaaccctcgctcaacggttggtacggttacggaaatcaatgattatttacgtctactatatgcgcgtgtgggcacaccttactgtatcaatgggcatggtgctatcacggcgtcttctgcagaacaaattgtagagcaggtcttagccctccctgaacggacacgcatgcagattttagctcctgttgttcgtcggaagaaggggcaacacaaaacagtttttgagaaaattcaaaaagacggctatgtccgtgtgcgcgttgacggggatatttttgacgtgacagaagtgccagagttgtccaaaagtaagatgcacaacattgaggtggttattgaccgtctggttaataaggatggtattcgtagccgtttatttgattcggttgaagcagctttaaggctgggagatggctaccttatgattgacactatggatggcaatgaactgctcttttctgagcattattcctgtcctgtctgtggatttacggttcctgaattagaaccaagactcttctcttttaatgcgccgttcggctcttgtccgacctgtgatgggctaggcattaagttggaagtggatttggacttggttgttcctgacccaagtaagtctttgagagagggagctttggcgccttggaatcctatttcctccaattattacccaaccatgcttgagcaagctatggcaagttttggggtggatatggatacaccttttgaggccttgactgaggaagaaagagatttagtgctttatggttcaggtgatagagaatttcattttcactatgtgaatgattttggtggtgagcgtaacattgacattccttttgaaggtgttgtaactaatgttaatcgccgttatcacgaaactaatagtgattatacgcgcaatgtgatgcgtggttatatgaacgaattgacctgtgcgacttgtcatggttaccgtttgaatgaccaagctttgtgtgtgcatgtgggtggcgaagaaggaactcatattggtcaaatttcagaattatcgattgccgaccacttgcagttattggaagaattggaactcacagaaaatgaaagtaccattgctaaaccgattgtcaaagaaatccatgaccgtctgacattcttaaataatgtgggactgaattatctgaccttgtcacgggctgctgggactttatcaggtggtgaaagtcaacgaatcaggttagcaacacaaattggttctaacctatcaggggtgctctatatcttggatgagccttctattggattgcatcaaagagacaatgaccgtttgatcgagagcctgaaaaaaatgcgtgatttgggtaatacgttaattgtggtagaacacgatgaagacaccatgatgcaggcagactggctgattgatgtgggaccgggggcaggtgagttcggtggagaaattactgcctctggaacgccgaaacaagtggctaagaataaaaaatccatcacgggtcaatatttgtctggtaaaaaattcattccagtgcctttagagcgccgttctggtaatggccgattcattgaaataaaaggagcagcgcagaataatcttcaaagcctcgacgtgagattcccactgggtaaatttattgcggtcacaggggtatcaggctcagggaaatcaaccttggttaatagtattttgaaaaaggctgtcgcccaaaaattaaaccgtaatgctgataagcctggtaaatatcactctatttctggtattgaacatattgaacgcttgattgacattgaccaaagtccgattggaaggacgccacggtcaaatccagccacctatacgggtgtctttgatgatattcgagacttgtttgcccaaaccaacgaagctaagattcgtggttacaaaaaaggccgtttctcttttaatgtcaaaggtgggcgttgtgaggcttgttcaggtgatgggattatcaaaatcgaaatgcactttttgccagatgtttatgtgccttgtgaggtttgccacggcagacggtataattctgagacgcttgaggtgcattacaaaggaaaaaatatcgcagaagtccttgatatgactgtcgatgatgccttggtatttttctctgctattcctaaaatcgctcgaaaaattcaaacgattaaggatgttggacttggttatgtgaccttaggtcaaccagctaccaccctctctgggggagaagctcaacggatgaagttggctagtgaattgcacaaacgctcgacaggtaagagcttgtatatcctagatgagccaacgactggtttacacacagatgatattgcaaggctattaaaagttttggaacgctttgtagacgatggtaatacggttcttgtgattgagcataatttggacgttatcaaatctgctgaccatattattgacttaggaccagaaggtggtgacggaggtggtcagattgttgccacggggacaccagaagaggtagctcaagttaaagaaagctatactggtcattatttgaaagtaaaactacaacaatag

SEQ ID NO: 38543 - DNA, 240 bp, Streptococcus pyogenes
atggctcaacaacgtcgtggcggattcaaacgccgtaaaaaagttgacttcatcgcagctaacaaaattgaatatgttgattacaaagatactgagcttcttagccgtttcgtttcagaacgtggaaaaattcttcctcgtcgtgtaacaggaacttcagctaaaaaccaacgtaaagtaacaacagcaatcaaacgtgctcgcgttatggctcttatgccttacgtaaacgaagactaa

SEQ ID NO: 38544 - DNA, 492 bp, Streptococcus pyogenes
atgattaataatgtagtactagttggtcgtatgaccaaggatgcagaacttcgttacacaccaagtcaagtagctgtggctaccttcacacttgctgttaaccgtacctttaaaagccaaaatggtgaacgcgaggcagatttcattaactgtgtgatctggcgtcaaccggctgaaaatttagcgaactgggctaaaaaaggtgctttgatcggagttacgggtcgtattcagacacgtaactacgaaaaccaacaaggacaacgtgtctatgtaacagaagttgttgcagataatttccaaatgttggaaagtcgtgctacacgtgaaggtggctcaactggctcatttaatggtggttttaacaataacacttcatcatcaaacagttactcagcgcctgcacaacaaacgcctaactttggaagagatgatagcccatttgggaactcaaacccgatggatatctcagatgacgatcttccattctag

SEQ ID NO: 38545 - DNA, 291 bp, Streptococcus pyogenes
atggctaaatacgaaattctttatatcattcgtccaaacattgaagaagaagctaaaaacgctttggtagcacgctttgactctatcttgactgacaacggtgcaactgttgttgaatcaaaagattgggaaaaacgtcgtcttgcatacgaaatcaacgatttccgtgaaggactttaccacatcgttaaccttgaagcgactgacgcagcagctcttaacgagtttgaccgtctttcaaaaatcaatggtgacattcttcgtcacatgatcgttaaacttgacgcttaa

SEQ ID NO: 38546 - DNA, 2340 bp, Streptococcus pyogenes
atgaataacaagattttagagcagttagaatttaacaaagttaaggaattgctattaccttatctcaagacagaacaatcacaagaagaattattagagctggagccgatgacggaggctcctaaaatagaaaaaagttttaatgaaatttctgacatggaacagatttttgttgaacatcactcatttggcatagtcagcctaagttcaatctctgagagtttaaaacgcttagagctttcaactgatcttaatattcaagaacttttggctatcaaaaaagttttacagagttcttcggatatgattcacttttattctgatttggataatgtttctttccaatctttggatcgtttgtttgaaaatttggaacaattccctaatctgcaagggtcttttcaagctatcaatgatggtggttttttagaacattttgcgagtccagaattagagcgtatccgtcgtcaattaacaaatagtgaacgacgggttcgtcagattttacaggatatgcttaaggaaaaagcagagcttttatcagagaatctaatcgctagtcgtagtggacgaagtgtcctaccagtaaaaaatacttatcggaatcgtatttctggtgtggttcatgacatctcttcttcaggaagtactgtttatattgagcctcgtgctgtagttacactaaacgaagagataacgcagcttagagctgacgaacgccacgaagaaggtcgtattttacacgcattttcagacttgttaagacctcatgtcgccactattagaaataatgcatggattcttgggcatcttgattttgtaagggctaaatatctttttatgtctgataataaggcgacgatacctaagatttctaatgacagcacgttagcattaatcaatgttcgtcatcctctgttaagtaatcctgtggctaatgacttacattttgatcacgatttaactgcaattgtcatcactggtcccaatactggtggtaagacgattatgctaaaaacactcggtttagcacaattaatgggacagtctggtttgccagtattagcggataaaggtagtaaaattgcagtatttaacaatatctttgcagatattggcgatgagcaatctattgaacaaagtctatcaactttttctagtcatatgacgcacatagtcagtattttaaacgaggctgaccacaatagtttagttctctttgatgaactaggagcaggaacggatcctcaagaaggtgctagtttggccatggctattttagaacaccttaggttaagtcatatcaaaacgatggcgaccacgcactatccagaattaaaagcttatgggattgagacaaattttgtagagaatgcgagcatggaatttgatgcagaaacgcttagccccacatatcgctttatgcaaggagttcctggacgctcaaatgcatttgaaattgcttctcgccttggtttagctccatttattgttaaacaagctaagcagatgacagattctgactcagatgttaaccgtattattgaacagttagaggcacagacacttgagacacgtagaagactggatcatattaaagaagttgaacaagaaaacctcaaattcaatcgtgcggttaagaaactctataatgaattttcacatgaacgcgataaagagttagaaaaaatctatcaagaagctcaagaaattgtagatatggctttgaatgagagtgatactatcttaaaaaaactcaatgataagagccaattaaaacctcacgaaattatagatgctaaggcacaaataaaaaaattagcacctcaagttgatttatcaaaaaataaagtcttaaataaggctaaaaaaatcaaagcagctcgtgcccctagaattggtgatgatattatagtgactagttatggacagcgaggtaccttaactagtcaattaaaagatggccgttgggaagcacaagtgggaattatcaaaatgacattaacacaagatgaatttagcctcgttagagtccaagaagaacagaaagtcaaaaataaacagattaatgtggttaaaaaggctgatggttctggaccaagagctcgacttgatcttagaggtaaaagatacgaagaagcaatgcaagagttagatcattttattgatcaagcattgcttaacaatatgggacaagttgatatcattcatggtattggtacaggcgttattcgtgagggagtgacaaaatatcttcgtcgtaataagcatgttaagcattttgcttatgccccacaaaatgcagggggatctggtgccacaattgtaacgttagggtaa

SEQ ID NO: 38547 - DNA, 594 bp, Streptococcus pyogenes
atgaaacagtttattaaagaatggggcccattcactctctttttaattctctttggtctatctcgtctttttttgtggcaggctgttaaagtagacggccattctatggacccaactctagctcatggcgaacgccttatcgtttttaatcaagctagaattgatcgctttgatattgtagttgctcaggaagaagaaaacggacaaaagaaagaaatcgtaaaaagagttattggattgccaggcgataccatttcttataatgatgacacactttatattaatggtaaaaaaacagttgagccgtatttggctgagtatctaaaacaatttaaaaacgataaactccaaaaaacttacgcctataataccctattccaacagttagcagaaacatctgatgcttttacaactaattctgagggacaaacacgctttgagatgagtgttccaaaaggagaataccttcttcttggtgatgatcgtattgtttccagggatagtcgcgaagttggtagtttcaaaaaagaaaaccttatcggtgaagtgaaagctcgtttttggccactcaataaaatgaccgtttttaattag

SEQ ID NO: 38548 - DNA, 2454 bp, Streptococcus pyogenes
atggaatacgtttttacaggtactgttgatcgtatcatttttgaaaaccaggctaatttctttaaaattctcctccttgccattgaggatacagacagtgacattgacgactttgaaatcattatcacaggaacgatggctgacattattgaaggagatgactacaccttttggggggaattgacccagcaccctaaatatggacagcaactcaaactaagccgttaccaaaaaatcaaacctagttcatctggtttggttaattatttctctagcgaccattttaaggggattggtaaaaaaacagcggagaaaatcattgcgctatatggtcataataccattgaccatattttagaagacccaagcaaattagaaactatctctggcctatctaaggctaatcgtcaagcctttgtcgctaaactaaaattgaattacggcacagagcaactgattgctggtctcgtcgaacttggccttagcaaccgttttgcccttcaagcgtttgaaaagtataaagaagaggctcttgaccttgttaaagaaaatccctatcagttagtcgaagatctacaaggttttgggtttaaaatggcagatgctctcgctgaaaacttagggattgaaagcgactctccgaaacgttttcgtgcagccctccttcactgtctcttggaagaatccatcaatcgaggagatacttatgtccaagcacgacaattattagactttgccatcacactccttgaagatgcacgtcaagtagaatgtgatcctgctgctgtggctgaacaactaagcgagttaatcatagagggcaaaatcaaaaacagtgacaccaaactgtttgatgctagcctttattttgctgaagaagggattgctaacaacatctctcgtctcttagatactcctttaagtcagtcatttagtcatgataccattcaaacaaccatccaagccgttcaaaaagactttgccatcacctatgaccaagtgcagcaagaagccattactaaggctttaaccagcaaggtctttctcctaacaggtggtcccggaacaggaaaaacaactgttattcgaggcattttgcaggcttacgcgaacctgcatcagattgatttggataaaaaagaccttcctatcttgttagcagctccaacaggtcgggctgcacgtcgcatgaatgagttgactggacttcctagcgcaaccatccacaggcacttaggcctcaatggcgacaacgattaccaagccatggaggattatctagactgcgacctgctgattgtcgatgaattttcaatggtggatacctggcttgccaaccagttgttaggagctattaactcaacaactcaagtgattattgtcggagatagtgaccagcttccttcggttggacccggtcaagtcctgtcagatcttttaaaagtcaatagcctgccccaaatcgccttgcaaaagatatttcgtcaatcccaagaatctactattgtcaatttggcagaccagatgcgtcgaggaatcttagctgctgactttcgtgataaaaaagctgaccgttcttattttgaagcccaagcagcctttatccctgacatgattcaaaaaattgtcctatctgctattaaaagtggcatccctgctgaggaaattcaaattttagcacctatgtacaaaggacaagctggcatcaatcatcttaatcaactcatgcaagaacttctcaatcccttgcaaggacaaacagaatttctgttcaatgatacgcattttcgtaaaggtgataaagtcctccacttagtcaacgatgctcagttgaatgtctttaacggagatattggttatattacagatttgattcctgctaaatacaccgaatctaagcaagacgaattaatcttagattttgacggtagcgaagtcacgtaccctagaaatgaatggctaaaattaaccctggcctatgccatgagcattcataaatcgcaagggagtgagtttcaagtggtgattttacctatcacacgccaaagcggccgactcttgcaacgaaatgtgatttacacggccattactcggtctaaaagtaagttaattctgttgggagaatatactgcctttgagtatgctattaaacacgaaggcgataaacgccaaacctacttgatcgaacgcttccaagaacaatccgacttagcctcctctcaacctaaccaagagctaaaatcaaaagagcagacctcccttttttctaatacggcaacccttgaggacgactctcaaaaatcttcctctcaatcaacaaactctaaccccactgagaactctcagtcagataatgatgattttaggttaacacctgagaattattcgactatcgattcgatgatagggcttacagaatcagatattgccctctttttccagaaaaaatcctag

SEQ ID NO: 38549 - DNA, 300 bp, Streptococcus pyogenes
atgatgaacatgcaaaacatgatgaagcaagcacaaaagcttcagaaacaaatggagcaaaagcaggcggatttggctgctatgcaatttactggaaaatcagctcaagaccttgtcactgccactttcacgggtgataaaaaattggttgggattgacttcaaagaagctgttgtagatcctgaagatgtagaaacgcttcaagacatgaccactcaagccattaatgatgcccttacgcaaattgatgaaacaactaagaaaacattaggcgcttttgctggtaaattaccattctaa

SEQ ID NO: 38550 - DNA, 1170 bp, Streptococcus pyogenes
atgactcaatacgatacgattattattggaggtggccctgctggcatgatggccgccatctccagcagctactatggctataaaactctcttaattgaaaaaaatcgccgcttaggcaaaaaattagcgggaaccggtggtggacgctgtaatgtcactaatagtggtaaccttgatgtccttatggctggcattcctggaaatggccgctttttatatagtgttttttcccagtttgacaaccatgacatcattgcctttttcgaggaaaacggcgtcaaactcaaagaagaagaccatggacggatgttccccacaacagataaatcaaggacaatcattgatgctctggagaaaaaaatcaaggctcttgggggtcaggtgctaaccagcactgaagtggtttccgttaaaaaacaagatgacctcttctacctcaaatctgcagaccagactttcacctgccaaaaattgattgtgaccacaggaggcaagtcctacccttcaacgggttcaacaggttttggacatgatattgcacggcattttaaactgaccgtgactgatttagaagctgctgagagccctctgttaactgattttcctcacaaagtcttgcaaggtatttccctagacgacgttactcttagttatgacaaacacgtcatcacacacgacttactcttcacccactttggcctttcaggacctgcagctcttcgtctgtcctcttttgtgaaaggtggagaaattgcagagctggactttttgccacacttatcaacagatgacttaaccgcttatctgagtgatcaacgtgataaaaacatcaaaaatgctcttaaaggcctactgcctgaacgagtagctgattttttatcagaagattaccccgaaaaggtcaaacaactctctccaaaacaagaaaaggaattgcttgataaactcaaacacctccagatacccattacaggaaaaatgtctttggctaaatcatttgtgaccaaaggaggcgtagatttaaaagaaatcaaccctaaaaccttggaaagcaagaaagttcctggcctgtatttcgctggagaggtcttagatattaatgctcataccggagggtttaatattacctcagctctttgttcaggatggatcgcagggaagtcttcatag

SEQ ID NO: 38551 - DNA, 672 bp, Streptococcus pyogenes
gtggaagtaaaagatattttaaaaacggtagaccatactttgctagcaacaacagcaacgtggccagaaatccaaacaattttagatgatgccatggcttatgaaacagcttcagcatgtattccagcttcttacgtcaaaaaagcagcagaatacgtttcaggtaaattagctatttgtactgttattgggttcccaaatggctatagtacaactgcggcgaaggtttttgaatgtcaagatgctattcaaaatggtgctgatgaaattgacatggtcattaatttgacagacgttaaaaatggggattttgatactgttgaagaagaaattcgtcaaatcaaagctaaatgtcaagaccatatcttaaaagttatcgttgagacatgtcaattaactaaagaagaacttatcgaactttgtggagttgtcacacgttcaggtgcagactttattaaaacctctactggtttttcgacagcaggtgctacatttgaagatgttgaagtgatggcaaaatatgtcggcgaaggtgttaaaattaaggcagcaggtggaatctcatcattggaagatgctaaaacatttattgctttaggagcttcacgcttgggtactagccgtatcatcaagattgttaagaacgaagctacaaaaaccgatagctattaa

SEQ ID NO: 38552 - DNA, 270 bp, Streptococcus pyogenes
atggcaaaaaagtcaaaaattgctaaataccaaaagcagctccaactgattgaacagtacgctgaccttcgtcgtgacttaaaagcgaagggcgattatgaatcactgcgcaaattgcctcgtgattcaaatccaaaccgcttgaagaaccgcgacaaaattgacggccgtcctcatgcttacatgcgtaagtttggtgttagccgtatcaatttccgtgacttagctcacaaaggacagcttcctggcgtcactaaagctagctggtaa

SEQ ID NO: 38553 - DNA, 1029 bp, Streptococcus pyogenes
atgacagataggtatattttagcagttgagagttcttgtgatgagaccagtgtagcgattttaaaaaacgaaagtaccctcttaagtaatgtcattgcaagtcaggttgagagccacaaacgctttggtggtgtggtgccagaagtagctagtagacaccatgtcgaagtgattacgacttgctttgaggatgctttgcaagaagctggcatcagtgcttcagatttatcagcagttgcggtaacttatggccctggacttgttggagccttgttagttggattagcagctgcgaaggcttttgcttgggcaaatcatttacctttgattccggttaatcatatggcaggtcacttaatggcagcgcgtgaacaaaagcctttagtttatcctttaatagcactgttggtttcaggaggacacacagaattggtttatgtcccagagccaggggattatcatattattggcgagacgcgtgacgacgctgttggtgaggcttatgataaagttgggcgtgtgatgggcttaacctatccggcaggacgtgaaattgaccagttggctcataaaggtcaagatacttatcatttccctcgtgctatgataacagaagaccacttagaattttccttttcaggactcaagtccgcttttatcaatcttcatcataatgctaagcaaaaaggcgatgaactgattctagaagatttgtgtgcatcttttcaagcagctgttctagatattttattggccaaaacaaaaaaagctctgagcagataccctgcaaagatgcttgtagtggctggtggtgtagcggcaaatcaaggattacgagatagattagcacaagaaattacacatatagaagttgtgattcctaaactaagactctgtggagataacgcgggtatgattgctttagcagcagctattgagtatgacaaacagcattttgctaatatgagcctaaacgcgaagcctagtttagcttttgaccagtttccagacagttttgtaataaactag

SEQ ID NO: 38554 - DNA, 1683 bp, Streptococcus pyogenes
atgacaaatatcagtttaaaacctaatgaagttggggtgtttgccattggtggtctgggagagattgggaagaatacttatggtattgagtatcaagacgaaatcattatcgttgatgccggtatcaaattcccagaagatgatcttttgggaattgattacgttattccagactattcttacattgtcgataacttagaccgggtcaaagctcttgttattacacatggtcacgaagaccacattggtggtattccatttcttctcaaacaggctaatatccctatctacgcaggacctttagcacttgctcttatccgtggtaaattggaagaacatggtctttggcgtgaagcaactgtttacgaaatcaatcacaacaccgagttaacttttaaaaacatgagcgtcactttcttcaagactactcattccattccagaaccggtcggtattgttatccacacccctcaaggtaagattatctgtactggtgattttaaatttgacttcacgccagtaggagatcctgcagatttacaacgtatggcagcgcttggtgaagaaggtgtcctttgcttattatcagactcaactaatgctgaaatcccaacctttactaactctgaaaaagttgttggccaatccattttaaaaattatcgaaggtattcatggtcgtattatttttgcttccttcgcttcaaacatctaccgtttgcaacaggctgcagaagctgctgttaaaacgggacgtaaaattgccgtttttggtcgttctatggaaaaagcaattgttaacggtattgaacttggctatattaaagttccaaaaggtaccttcattgagccaagcgaacttaaaaatcttcatgctagtgaagttttaattatgtgtacaggtagtcaaggtgagtctatggcagcacttgctcgtatcgctaatggcactcatcgtcaagtaactttacagcctggtgatactgtgattttctcatcaagtccaatccctggtaataccacaagtgtcaataaattaatcaataccatccaagaagctggtgttgatgttattcatggaaaagtcaataatattcatacttctggtcatggaggacagcaagaacaaaagctcatgcttagtttgattaaaccaaaatatttcatgccagtacatggtgagtatcgcatgcaaaaagttcatgcaggactggcgatggatattggtattccaaaagaaaatatctttattatggaaaatggagacgttctagctttaaccagtgacagtgcgcgtattgctggtcactttaatgcccaagacatctacgtggatggtaatggcatcggggatattggagcagccgttttacgggaccgccgtgatttgtcagaagatggtgttgtcttagctgttgcaactgttgattttaacacacaaatgattttagctggaccagatattctgagccgtggtttcatttatatgcgtgagtcaggtgacttgatccgcgaaagccaacgtgtgctctttaacgctatccgtattgctttaaaaaataaggatgctagcatccaatcagttaacggtgctatcgtcaatgctcttcgtccattcttgtatgaaaagactgagcgtgaaccaattatcattccgatggtcttaacacctgataagcactaa

SEQ ID NO: 38555 - DNA, 1347 bp, Streptococcus pyogenes
atggcaataacagtagctgacattcgtcgtgaagtcaaagaaaaaaatgtaacgtttcttcgcttgatgttcactgatatcatgggcgttatgaaaaatgtggagattcctgcaactaaagaacagttagacaaagtattgtctaacaaggttatgtttgatggttcatctatcgaaggttttgtacggatcaatgagtcagatatgtacctttaccccgatttagacacttggattgtttttccctggggagatgaaaatggagcagttgcaggtttaatttgtgatatttatacagcagaaggaaagccttttgcaggagatcctagaggaaatttaaaaagagccctgaaacacatgaacgagatcggctacaaatcatttaatcttggaccagaaccagaatttttcctttttaagatggatgataaaggtaatccgacacttgaagttaacgataatggtggttattttgatttagcgccaattgacttagcagacaacacgcgccgtgaaattgtgaatattttaacgaaaatgggttttgaagtggaagctagtcatcatgaagtggctgttggtcaacatgagattgattttaaatatgcagatgttttgaaagcttgtgataatattcaaatttttaagctagttgtaaaaacgattgcccgtgaacatggactttatgctactttcatggctaaaccaaaatttggaatagctggatcagggatgcactgtaacatgtctttgtttgataaccaaggtaataatgctttttatgatgaagctgataagcgagggatgcagttatcagaagatgcttattatttcttgggaggactaatgaagcatgcttataactacactgctatcactaaccctacagtgaattcttataaacgattagttccaggttatgaggcacctgtttatgtcgcttgggctggaagtaatcgttcaccgcttatccgtgttccagcatcacgtggtatgggaacgcgtttggagttacgttcggttgatccgacagctaatccttatttagccttggctgttctcttggaagctggattagatggtatcattaacaaaattgaagctccagaacccgttgaagctaacatttataccatgacaatggaagaacgaaatgaagcaggcattattgatttgccatcaacgcttcataatgccttaaaagctcttcaaaaagatgatgtggtacaaaaggcactaggttaccatatctacactaatttcttagaagcaaaacgaattgaatggtcttcctatgcaacttttgtttctcaatgggaaattgaccattatattcataattattag

SEQ ID NO: 38556 - DNA, 1197 bp, Streptococcus pyogenes
atggctaaattgactgttaaagacgttgatttgaaaggtaaaaaagtcctcgttcgtgttgactttaatgtgcctttgaaagacggcgttatcactaacgacaaccgtatcactgcggctcttccaacaatcaagtatatcatcgaacaaggtggtcgtgctatcctcttctctcaccttggacgtgttaaagaagaagctgacaaagaaggaaaatcacttgcaccggtagctgctgatttagctgctaaacttggtcaagatgttgtattcccaggtgttactcgtggttcaaaattagaagaagcaatcaatgctttggaagatggacaagttcttttggttgaaaacactcgttttgaagatgttgacggtaagaaagaatctaagaatgacgaagaacttggtaaatactgggcttcacttggagatggaatcttcgttaacgatgcatttggtacagcacaccgtgctcacgcatcaaacgtaggtatttcagcaaacgttgaaaaagctgtagctggtttccttcttgaaaacgaaattgcttacatccaagaagcagttgaaactccagaacgtccattcgtagctattcttggtggatcaaaagtttctgataagattggtgttatcgaaaatcttcttgaaaaagctgataaagttcttatcggtggtggtatgacttacacattctacaaagctcaaggtatcgaaatcggtaactcacttgtagaagaagacaaattggatgttgctaaagacctccttgaaaaatcaaatggtaaattgatcttgccagttgactcgaaagaagcaaacgcatttgctggttacactgaagttcgcgacactgaaggtgaagcagtttcagaaggcttccttggtcttgacatcggtcctaaatcaatcgctgagtttgaccaagcacttactggtgctaaaacagttgtttggaatggtccaatgggtgtctttgaaaaccctgacttccaagctggtacaatcggtgtcatggacgctatcgttaaacaaccaggcgttaaatccatcatcggtggtggtgattcagcagctgctgctatcaaccttggccgtgctgacaaattctcatggatcagtactggcggaggcgctagcatggaacttctcgagggtaaagtattaccaggtttggcagcattgactgaaaaataa

SEQ ID NO: 38557 - DNA, 891 bp, Streptococcus pyogenes
atgttaggaccatttatctttattgcttttggggttattgtaatcctagctattgttgccagtaccctttatgttgttcgtcaacaatctgttgccatcgtggaacgttttggtagataccaaaaaacagccacgagtggtattcatatccgacttccgtttgggattgacaaaattgctgcgcgtgtgcagctgcgtcttttacagtcagaaatcatcgttgaaaccaaaaccaaggacaatgtgtttgtaactttgaatgttgccactcagtatcgtgttaacgaacaaaatgtaacagatgcttactacaaattaatgaaacctgaatctcaaatcaagtcttatattgaagatgccttgcggtcatccgtgccgaagttgaccttagacgaattgtttgagaaaaaagatgaaattgccttggaagtacaacatcaagtggcagaagaaatgtcaacctatggatatattattgtcaaaaccttgattaccaaggtggagcctgatgctgaagtcaaacagtcaatgaatgaaatcaatgcggctcaacgcaaacgtgtagctgctcaagagttggcaaacgcagataaaattaaaattgtgacagcagcagaagcagaggctgaaaaagatcgattgcacggggtagggattgcccaacagcgtaaggccattgtggatggtttggcggagtctattcaagagcttaaagaagcgaatatttccttaaacgaagaacaaatcatgtccattttgttgaccaaccaatacctggataccctcaatacctttgcggcaaaaggaaaccaaaccctttttctaccaaatacaccaagtggggtagaggatatccgtacacaagttttatctgcccttaaaacaaaataa

SEQ ID NO: 38558 - DNA, 189 bp, Streptococcus pyogenes
atggctaaagtatgttattttacaggacgtaaaaccgtttctggaaacaaccgttcacacgcgatgaaccaaacaaaacgtacagttaaaccaaaccttcaaaaagttactatccttgttgatggtaaacctaaaaaagtttgggcttctgctcgtgcgcttaaatctggtaaagtagaacgcatctaa

SEQ ID NO: 38559 - DNA, 882 bp, Streptococcus pyogenes
atggcaatcgtttcagcagaaaaatttgtccaagcagctcgtgaaaacggatatgctgttggtggatttaacacaaacaacttagagtggactcaagcaatcttgcgtgcagcagaagctaaacaagctccagttcttatccaaacatcaatgggtgcagcaaaatacatgggtggttataaagtatgtcaatctcttattactaaccttgttgagtcaatgggtatcactgttcctgttgctatccaccttgatcatggtcactacgaagatgctcttgagtgtatcgaagtaggttacacttcaatcatgtttgacggttcacaccttccagttgaagaaaaccttgctaaaactgcagaagttgttaaaattgcacatgctaaaggcgtttcagttgaagctgaagttggtacaatcggtggtgaagaagacggtatcatcggtaaaggtgagctcgctccaatcgaagatgctaaagcaatggttgaaactggaattgacttcttggcagctggtatcggtaacatccacggtccatacccagaaaactgggaaggtcttgctcttgaccacttagaaaaattaacagcagctgtaccaggtttcccaatcgtattgcacggtggttctggtattcctgacgatcaaatcaaagaagcaatccgtcttggtgttgctaaagttaatgttaacactgaaagtcaaatcgctttctctaacgcaactcgtgaatttgctcgtaactacgaagctaacgaagcagaatatgatggtaaaaaattatttgacccacgtaaattcttggctccaggtatgaaagctgttcaaggtgctgttgaagaacgtatcgatgttttcggatcagctaacaaagcataa

SEQ ID NO: 38560 - DNA, 1605 bp, Streptococcus pyogenes
atgacgaaatacatttttgtaactggtggtgttgtatcatcaattggcaaaggaattgttgcggcaagtcttggccgattgttaaaaaatcgtggacttaaggtgacgattcaaaaatttgatccttatattaatattgatccagggacgatgagcccctatcagcatggagaagtatatgtgacagatgacggtgctgaaaccgacttggatttgggtcactatgaacgttttattgatatcaatcttaataaatattccaatgttacaacaggtaaaatttatagtgaagtccttcgtaaagaacgtaaaggcgagtaccttggagcgactgttcaggtgattcctcatatcacagatgcccttaaagaaaaaatcaaacgcgcagcttcaacaacggactctgatgtaattattactgaggtcggggggactgttggcgatattgaaagtttaccgttcttagaagctcttcgtcagatgaaagctgatgttggttctgaaaatgtgatgtatattcacaccaccttgttgccatatttaaaggcagcgggtgaaatgaaaactaagccaacgcaacattccgttaaagaattgcgtggtttagggattcaaccgaatatgttggttattcgtacggaagagccagttgagcaggggattaaaaataaattggctcagttctgtgatgtgaattcagaagctgttatcgagtcacgtgatgtagaacacttgtatcaaattccattgaacttgcaagctcaatcaatggatcagattgtttgtgatcatttgaaattgaatgcgccacaagctgatatgaccgagtggtcagctatggttgacaaggtgatgaatttaagaaaaacaacaaaaattgccttggttggtaaatatgtggaattgccagatgcctacttatctgttgtggaagccttgaaacattctggttatgccaatgataccgcaattgacctaaaatgggtcaatgctaacgatgtgacggtggataatgcagctgacttgttgggagatgcggatgggattattgtaccaggtggttttggtcaacgtggtacagaaggcaagatccaagcgattcgctatgcccgcgaaaatgatgtgccaatgcttggtatttgtcttggcatgcagttgacttgtgttgaatttgcccgccatgtcctcaatatggaaggtgcaaactcttttgaattagagccaagtactaaataccccatcattgatatcatgcgtgatcaaattgatattgaagatatgggaggtacgcttcgtctgggattgtacccatgtaaattgaaaccaggttcaaaagcagcaatggcttacaataatcaagaggtggtgcaacgtcgtcatcgtcaccgttatgagttcaacaacaaattccgtccagaatttgaagcagctggttttgttttctcaggggtatcacctgacaaccgcttagttgaaattgtagaattgaaagagaaaaaattctttgtagcagctcaataccacccagaattgcaaagccgtccaaatcgtcctgaggagctatacaccgcttttgttacagctgctattaaaaatagcaattag

SEQ ID NO: 38561 - DNA, 846 bp, Streptococcus pyogenes
atgacatttatattacattacctagagcagtctcatatcgaaaatattggcttaacgatttttaaaaagctagtgtctctcattattctattactcttttttgctattttaaaacgtgttactaactatctttttgaaaaaaccattaacaaatcgtttgcttattcaagacaaagtgaagctcgcaaaaaaacactctctaagctcactcacaacattttaaattacttattatattttcttctcatttattggatacttagcttatttggcatacctgtctctagtcttctagcaggagctggaattgctggagtagcaatcgggttaggtgcacaaggatttttatctgacgttgtcaatggcttttttatcttatttgagaatcaatttgaagtaggagataacgttactatctctgacatagaaggcagtgtctttggtgttggaattagaactactcaaattcgtggattcgatggaacactacatttcatcccaaaccgtagcatcaccgttgtcagcaacaaatctcgtggtaatatgcgtgccttaattgaaattcctctttattccactgttaatttgagccaagtcactcgaatcattgatgaagtgaatcaaaaggaattgccaaaccatcctcaaatcgttggcaaaccaaatattttagggcctcaaaataactctaatggacagttcacttttagaattgctattttcacagaaaatggagaacaatttaagatttaccatactttttatagactttatcaagaagctttactcaaagaaggcattcaattaccgactgcaatcagctattctatcacctcaaaatcttaa

SEQ ID NO: 38562 - DNA, 750 bp, Streptococcus pyogenes
atggtaagatacaaagcaacgatttcctatgatgggactcttttttcgggttttcaaagacaaagacatttacgtacggttcaagaagagattgaaaaaacactctataaattaaataacggtacaaaaattataattcatggtgcaggacgtacggatgcaggagtacatgcttatggacaggtgatccattttgatttgcctcaagaacaagaagttgaaaaattgcgatttgctcttgatacacagactcctgaagatattgatgttgttaatatagaaaaagtggctgatgattttcattgtcgttatcagaagcatttaaaaacttatgaatttttagttgataatggtcgacctaaaaatccgatgatgcgacactataccactcattacccttatactcttaatattaaacttatgcaagaagctattaacggtctggtaggtacacacgattttactggttttacagcagcaggaacttcggtacaaaataaggtgcgaacgattaccaaagcaacggtatctcgggatgaaaaaactgattttttggtgtttactttttcaggaaatggttttctctataagcaggtgaggaatatggtgggaactttgctgaaaattggtaatggtcaaatgccagttgaacaagttaaagtgattttgagctccaaaaatcgtcagctagctggaccaacgatatctggaaatgggctttacttgaaggagatttgttatgaaaactga

SEQ ID NO: 38563 - DNA, 2979 bp, Streptococcus pyogenes
atgggaaatcaaactaaaacggaacttgaacttgaaaaagagttgatccatctcttagaaacaggtgaaagtcaatggacatatcgtaaagaattaaaaactgaagatgctttatgggataatttctttaagatcttagcgcaaaataacacgcaatatctgaacgaggagcctttaacagctagtgaaaaagagcagattaagaatcaacttaactttgtcaattactatgaagcggctaaatggttagctggtgaaaacggcattgctaaagtacaagtgcaacgcgaagatgcaaaactaggaacgattcgtttagaagtcgttaaagcagacaatgtggctggtggaacttctgtttatgagattgccaatcaagttgctttctctggttctcgtgatagacgaggtgatgtgacacttctcatcaatggcttacctatgatccaaattgaattaaaatctcagaatcatcaatgcattgaagcttttaaccaagtcaaaaagtatgataaagaaggccagtttagaggtatcttttcaaccttacaaatgtttgtggtctcaaataaaacagatacaaggtatatcgctgcagctaaagaaaataaattaaaccctaacttcttgacccaatgggtagatcaaaacaacaaaccacaaaaagatctctttgcctttgccaaagaagtcctatctatccctcgtgctcaccaaatggtcatgacttactctgtcattgatgatgataaaaaagcactaattctccttcgtccttatcagattcatgcaatcgaagccgtcgctgaagcgagtcgtcaccgcaagtctggctatatctggcacacaacaggttctggaaaaaccttaacttcctataaagtggctcgcaatatccttcaaataccggccgttgaaaaatccatctttgtcattgaccgaaaggatttagataatcagaccgcttctgcttttcaatcctatgcgcaaaatgatatctttgatgtcgatgagacagaagatacgagacaactcatcaaaaatttagaatccagcgatcgtcgtgttgtggtcaccaccattcaaaaactcaatgccatgatcagtcagatggaaagttatgacactccaaaattcaagaaactaaaagagcgtcttgcacacttaaatgttgtctttgttgtggacgaatgccaccgtgctgtcacgccagaacgtcaacgttatctcacgaatacttttcgtaacagtcgctggtatggctttaccggcactcctatctttgtggaaaataagcgtgctcaattaggtgatttagcccaaacaacggaacagcaatacggcaaatgtctccatcaatacaccgttaaagaagccattcatgataaagcggttctaggctttcaagttgagtataagacaaccattcctgatatgcctgaagacagtattccggaagaagcttatgatcatgaagaacatatgttagctgtcttagatagtatcattaatcaatcacgcaagaaacttggttttaataatggaattggtcagacattcgaaggtttactaaccgttaagagtattgctcgtgcccaagcctattatgatctgatgaagaaagttaaggctggtgaaacggatttagtcatttctaagaaggtcaaagaaaaactaccagactttccaaaggtagctattacttattctatcactgaaaatgacaatgcgtctatcagccgacaagataaaatgaccaaaaatctagaagactataatcacctctttggcactaactttaccatcgataacttacaaggctataacagagatttaaatgatcgcttagcccgtaaaaaagataaattcaaagaccgtcatgaacaattagacctcgtgattgtggttgaccgtctcttaacaggttttgatgcgccttgtttatcaacgatctttattgatcgccagcctatgaaacctcagcacattattcaagctttctcacgaaccaaccgtatctttgaaagtagaaaacattacggtcaggttgtgactttccaaacaccacttcgttttaaagaagctgtcgacaaagcgcttagcctctactctaatgggggtgaaaacgacgttttggccccttcttgggaagaagaaaaagcaagattctttgaaaaagtaacagtattaaaaaatatagttcctgatccagacgctttcccaactattgagagcgcacagacagcttttctcaaacaatacgccaaagcctttcaagcgtttgataaactctttgcatctgtacaggtctatagtgattttaatgaaacactgttgagtgaggttgggttatcagatgaagtgattgatacttataaaggcacttaccaaaatgtcattgcagaaatacgaaagcgaagagaagatgacgaagccatcccagagatcaatatcgactatgagctagaaagtgttcagatggatgatatcaactatcactatatcttgaccttaattcaagcctttgtcgatcaagaacaagaagctcttcaagaaaggctcaatgacaatcctatggatcaatacatccaagatttggcaaaatcaaaccctgctatggctgactcactagctgagttatggcaagatatccaaaaagaacccaaagcctatgaagggaaaagcattgtttatgagttagataacctcattggtgataagatccaaagggccatcaaacactttgcggaccaatggaaggcagatcctgacaaattagcctttgtggcgactaattatcatagtgctaactctaccaaacaagtgggcatgtcaaccttaaaagaatccctagactaccaagcctataaagaaaaacaaggtgattctgccatgaataaactcaaatacaagagccaatttgaacgggagttagttcaattcattagagatcaaatccaacccttaaaagggcactag

SEQ ID NO: 38564 - DNA, 1200 bp, Streptococcus pyogenes
atgacaaaatctaaacagcctcaatatcgctttgacggttttgaaggggagtgggaagaaaaagaactaggggatattgttcaaattacaatgggccaatctccatcaagtcaaaattatactacaaacccttctgattatattctagtacaaggaaatgccgatataaaaaatggatatgtttttccgcgtgtctggacaacacaaattacaaaacaagctgacaaaggtgatattattcttagtgttagggctccagttggtgatgttggaaagacaaattatcatgttattattgggcgtggagttgctgctataaaaggtaatgaatttatctttcaaatattaaaatacttgaaagaaattggttattggaaaagaattagtacaggttcaacttttgatagcattagctctagtgatatcaaatatgctaaaattcaaattccctccctccctgaacaagaagccattggcgaacttttccaaatggttgatcaattgattcagttgcaggatcaaaagctagcaacccttaaagaacaaaagcaaaccttcctcaggaaaatgttcccagctcaaggacaaaaagtccctgaaatccgtttacaaggttttaaaggagagtgggaagagaagaaattgagggaagtatctactcatagaagtggaacggcaattgaaaaatattttgattcggaaggtgaatttaaagtcatttcaataggtagttatggaactaataacctctatgtagaccaaaatattagagcagtctcaaatgaacttactaattctaaattagttgcctccggtgaattaacaatggtactcaatgataagacagcgaatggggcaataatcggaagatgtctacttattacagaaaataataaatacgttgttaatcaaagaacagaaattattagaccagatattaatatttcctcttactatcttttccattatttaaatggcgaatttcgtaatggtatcattaaaattgctcaaggtggcactcaaatctatgtaaattattcatctgttgaacaattaaagataaatatacctacattaaaagaacaagaagccattggtaatttcttccaaactttagaccaacaaattgctcaatctgaagaaaaactaacagaactcaaagcactcaaacaaacattactcaatcgtttattcgtataa

SEQ ID NO: 38565 - DNA, 1581 bp, Streptococcus pyogenes
atggcagagaaaacaacttcactccgtcaagcactatggcattcggccgaccaattacgtggccaaatggatgccaatgactataaaaactatcttcttggacttattttttacaaacacttatctgataaattactcttggctgtttgtgataatctagaaaaacacttcaatacctttacagaggctcaaaaaatctttgaagatgcttatcaagatgaaggcctaaaagatgacctcatttctgttgttactggtgatttaggttactttatcgaaccgacactgacctttgaaaaactcatccaagatgtttatcacaatactttccaattagaatcattagctcaaggttttcgcgatattgaacaaagtggtgaagactttgaaaacttatttgaagatattgacctctactctaaaaaattaggctctactcctcaaaaacaaaatcaaaccatttctaatgtcatgaaaacattaaatgaaattgactttgaggcagtagatggggatactttaggtgatgcttatgagtacttgattggtgaatttgccagtgaatcaggaaaaaaagcaggtgagttctataccccacaagctgtctctcacttaatgactcagattgtctttttaggtcgtgaagatcaaaaaggaatgaccctctatgaccctgctatgggatctggatcactccttttaaatgctaagaaatatagtaaccaatccgataccgtttcttactatggtcaagaaatcaatacttctacttataacttggctcgtatgaacatgatgcttcatggcgttgccatcgagaaccaacacttaagtaacgctgataccttggatgcagactggccaacagatgaaccaatcaactttgatggggtgttgatgaacccaccttattctttgaaatggtcagcgactgctggtttcttaacggatccacggttttcaagttatggtgtattagcaccaaaatcaaaagccgattttgcctttttacttcatggtttctatcatttaaaaaatacaggaactatggcgattgtcttaccacacggtgtccttttccgtggagctgcagaaggcaagattcgccaaaaactactcgaacaaggggctatcgataccattatcggactcccatcaaatatcttttataatacaagcatccctacgactattatcatattaaagaagaacagaaccaacaaagatgtcttctttatcgatgcttcaaaagagtttgataagggtaaaaatcaaaacacaatgacagataaccatatcaaaaagatccttgatgcttataagagtcgtgataattctgataagttttcatatttagcctcatttgatgaaatcattgaaaatgactataacttaaatatcccacgctatgttgatacctttgaggaagtcccagttaaaccactgccagaattagctaaacagctcagtgacattgatcaagaaattgccaaaacaaatgccaaactagatcaactcatgaaacaactagtcggaacaaccaaagaagcacaagacgaattggatacttttagaaactaa

SEQ ID NO: 38566 - DNA, 738 bp, Streptococcus pyogenes
atgaaacaattagtattaaaagatgtttgcaaaaaatatcccaatcaactgaattatgctctagaccatatcaatttgattgtggaaaaaggagaatttgtagctgtcatggggcgtagcggtagtgggaaaacgacgcttttaaatgttacttcaattattgataaaattgatagtgggaatatttattgtgcggataaagagattagcacattctctgataaggaggcaactaattttagaaaaaatgatattggttttgtttttcaagattatatgctgttagatagtctaaccattagggagaatatttctgttgctttgtctctaaaaaatattgattcttcaaagattgatgatttgataaatagctatgcaaaaagatttaatttatatgaacagttgaagaaatatccgtatcaactttctggaggtcaaagacagagggtcagtattatcagagcaatcattaaagaaccagagattatttttgctgacgaaccaactggagcacttgacttgaaatcttctgaggaaacaatgatgattttgagtgaaatcaataaaacagaaaaggtaactattttaatggttactcatgacgttttatcagcttcttatgctgacagagttatactcctcaaagatgggaaacttcacatggagattgataaaaaagattgtggagagtcgttttacgatgtaattagtcaagctttatccgatagaggagagtaa

SEQ ID NO: 38567 - DNA, 1407 bp, Streptococcus pyogenes
atgactaaaacattacctaaagattttatttttggtggtgctacagctgcttaccaggctgaaggcgctacccacacagatggtaaaggaccagtagcttgggataaatacttagaagacaactattggtacacagctgagccagcaagtgatttttataatcgttaccctgtcgatttgaaacttagtgaagaatttggtgtcaacggcatccgtatctctattgcctggtctcgtatttttccaacaggaaaaggagaagttaaccctaaaggagtagaatactaccacaatctttttgcagagtgtcataagcgtcatgttgagccttttgttacacttcaccattttgataccccagaagctctccactcggatggtgacttcctcaatcgtgagaacattgaacattttgtaaattatgcagaattttgttttaaagaattctcagaagttaactattggacaacatttaacgaaattgggcctattggtgatggccaatacttagttggtaaattccctccaggtatccaatatgatcttgctaaagttttccaatcacaccataacatgatggtctctcatgctcgtgcagtcaaactctttaaagatagtggttattcaggtgaaattggtgttgtccatgcacttccaactaagtatccatttgacgctaacaatcctgatgatgttagagcagctgaacttgaagatatcatccataataaatttatccttgatgctacttatcttggtaagtattcagataaaacaatggaaggtgttaaccatatccttgaggtgaatggcggtgaacttgatcttcgcgaagaagattttgccgcactagacgccgcaaaagatttgaatgatttccttggtattaactactatatgagtgattggatgcaagcttttgatggtgagactgaaatcattcacaatggcaagggtgaaaaaggcagctctaaataccaaatcaagggtgttggtcgaagaaaagcacccgttgatgttccaaaaacggactgggactggattatcttcccacaaggcttatatgatcaaatcatgcgtgtcaaagccgattatcctaattacaagaaaatttacattacagagaatggtcttggctacaaagatgagtttgtagataatactgtctatgatggtggacgtatcgattatgtgaaaaaacacttagaagttatttctgatgctatttctgatggtgcaaatgttaaaggatactttatgtggtcactgatggatgtcttttcatggtcaaatggctatgaaaaacgttacggtctcttctatgttgattttgaaactcaagaacgttatcctaagaagagtgcctactggtataaaaaagtagcagaaactcaagtgattgaatga

SEQ ID NO: 38568 - DNA, 1698 bp, Streptococcus pyogenes
atgaatggattaattgctcagattgagaaagggaaacctttcttcgagaaaatttctcgaaacatctatcttcgcgctattcgtgatggttttatcgctggtatgcctgttatcttgttttcaagtatctttatcttgattgcctatgttccaaatgcatggggcttccattggagtaaggatattgagaatctcttgatgacgccatacaactactcaatgggtattttaggtttgtttgtggctggtacgactgcaaaagcattaaccgattcaatgaaccgctcattgcctagcactaaccaaatcaactttatttcaaccatgcttgctgctattgtaggttttttacttatggcagcaaatccagcaaaagacggtggtttcttaactggatttatgggaacaaaaggtttgttaacggccttcatcgcagcttttattaccgtaaatgtctataaagcctgtgtgaaaaacaatgttactattcgcatgccagaagaggtgccaccaaatatatctcaagtttttaaagatttgattccatttacattatcagttgtacttctttatgtgattgaattgattgttcatactactttaggcgttaacgttgccgagtcaattggtaaacttcttgcaccattgttccaagcagcagatggttatgttggaatcactattatcttcggtgcatttgctttcttctggtttgttggtattcatggaccatctattgttgaaccagccattgcagcgattacttacgcaaatgctgaaaccaaccttcaattacttcaagctggtgaacatgctgacaagattttgacttcagggactcaaatgttcatcgttaccatgggtggtactggtgcaactctcgtcgttccattcatgttcatgtggttaacaaaatcaaaacgtaacaaagccattggacgtgcatcagttgttccaacattctttggtgttaacgaacccattttgtttggtgctccacttgttttgaacccaattttctttattccatttatcttggcaccgattgtcaacgtatggattttcaaattcttcattgacacacttggaatgaacagtttcactgcaaacttaccttggactacaccagctccattaggtctcattcttggtacaaacttccaagttctagcattcattttggcagctttgttaattgtcgttgatgtgatcatctactacccattcttgaaagtatatgatgagcaaattcttgctgaagaagcagcaggtacgaattcatcagatgccctcaaagaaaaagtagcagcaaactttgatactaaaaaagctgatgctattcttgaaaaatcagcagctaaagaaaccaaagaaatcactgatcaaactaatgttctcgttctttgtgccggtggtggtacaagtggtttgcttgcaaatgctttgaataaagcagctaaagaatatggtgcacctgtcactgcagcagcaggaagttatggtgctcaccgtgagattttaccacaatatcaacttgttatccttgcacctcaagtagcttctaactatgaagatatgaaagtggaaactgataaacttgatattaaattagctaaaacagaaggggctcaatacatcaaattgacccgtgatggtcaaggagctcttgattttgtaaaagcacagtttgaaaattaa

SEQ ID NO: 38569 - DNA, 318 bp, Streptococcus pyogenes
atgaatagagaagaaactactcttttaggttttgaaatcgtagcctatgctggtgatgcccgttcaaaatttttggaagcgcttaaagcagcgcaagaaggagattatgctaaagcagaagaattaatcgctgcaggtagtgactgcttgaatgatgctcacaatgctcagacaagtctactacaaaaagaagcagctggagatgacttagcttatagtgtcactttaatgcatggtcaagatcatttaatgacgaccattttattacaagatttaatgaaacacatgattgaactttataagagaggagcaaaataa

SEQ ID NO: 38570 - DNA, 984 bp, Streptococcus pyogenes
atgacaattactttaactgaaaacaaacgcaaaagcatggaaaaactaagtgtagatggtgttatttctgccttagcttttgaccaacgtggagctctcaaacgtatgatggctcaacatcaaacaaaagagccaacagtagaacaaattgaagagcttaaaagtttagtttctgaagaactaacaccatttgcatcctcaattctacttgatcctgaatatggcttgccagcaagtcgtgttcgttcagaagaagcaggcttgttgttggcatatgagaaaacaggatacgatgcaacaacaactagtcgcttacctgattgtttagatgtttggtctgcaaaacgtattaaagaagctggagcagaagcagttaaattccttctttactatgatattgatggagatcaagatgttaacgagcagaaaaaagcttacattgaacgtattggttctgaatgccgtgcagaagatattccattctacttagaaattctaacttatgatgagaaaattgctgacaatgcaagccctgagtttgcaaaagttaaagctcataaagttaacgaagcaatgaaagttttctcaaaagagcgctttggagttgacgtgttgaaagttgaagttccagtaaatatgaaatttgtagaaggctttgcagatggtgaggttctctttacaaaagaagaagcagctcaagctttccgtgaccaagaagcttctactgatttaccatacatttatttgagtgctggtgtttctgccaaattgttccaagatactttggtgtttgcagcagaatcaggtgctaaattcaacggtgtcttatgtggacgtgctacctgggcaggatctgtaaaagtctatatcgaagaaggaccacaagcagctcgtgaatggttgcgtacagaaggttttaaaaatattgacgaattaaacaaagtactagataaaactgcaagtccttggactgaaaaaatgtaa

SEQ ID NO: 38571 - DNA, 429 bp, Streptococcus pyogenes
atggcaattattatcggtgctgacaaagcaggtcaagaacttaaagaagttatcaaagattaccttaaagaaggtaaatacgaagtcgttgatgttagtgaaaacgaagtacgtgactttgtagatacaactttagctgttgtaaaagaagttaatgcatccgatgataacttaggtattgtcattgatgcatatggtgttggttctttcatggtagctactaaaatcaaaggaatggtggcagctgaagtatcagatgagcgctcagcatacatgacaagaggacacaacaatgctcgaatcatcacgcttggttctgaaattagtgctccaggaattgcaaagaacattatcaaaggctttgtcgaaggtaaatatgatggtggacgtcatcaagttcgtgtcgacatgcttaataaaatgtgctaa

SEQ ID NO: 38572 - DNA, 393 bp, Streptococcus pyogenes
atggcacaagcacaatatgcaggtactggccgtcgtaaaaacgctgttgcacgcgttcgtttggttccaggtactggtaaaatcactgttaacaaaaaagatgtagaagaatacatcccacatgctgacttacgtttgatcatcaaccaaccttttgcagttacatcaactgaaggttcatacgacgttttcgttaacgttgttggtggtggttacggtggacaatcaggtgcgatccgtcatggtatcgctcgtgcgcttcttcaagtagacccagacttccgcgattcattgaaacgcgctggccttcttacacgtgacgcacgtatggttgaacgtaaaaaaccaggtcttaagaaagctcgtaaagcttcacaattctcaaaacgttaa

SEQ ID NO: 38573 - DNA, 447 bp, Streptococcus pyogenes
atgaacaaaacaactttcatggctaaaccaggccaagttgaacgcaaatggtacgttgttgacgcagctgatgtgccacttggacgtctttctgcagtagttgctagcgtacttcgcggaaaaaacaaaccaactttcacaccacatactgatacaggtgattttgttatcgttatcaacgctgaaaaagttaaattaactggtaaaaaagcaactgataaagtttactacactcactcaatgtacccaggtggtttgaaatcaatcactgctggtgaacttcgctctaaaaacgcagttcgcttgattgaaaaatcagttaaaggcatgcttccacataacactcttggacgtgcacaaggtatgaaattgaaagtcttcgttggcggtgagcatactcacgcagcacaacaaccagaagtacttgacatctcaggacttatctaa

SEQ ID NO: 38574 - DNA, 519 bp, Streptococcus pyogenes
atgaaaaaacggatattattagtagatgggtataatatgattgccttttggcaatcaacccgtcagttgtttaagacaaatcagcttgatcaggcacgtaacacacttttaacaaaacttaatcattatgcccattttgagaatattaatattatttgtgtttttgatgcccaatatgtaccggggttaaggcaacgatatgaccagtattatatctcagtggtatttacagaggaagacgaaacagcagatagctacattgagcgcatggcagcagagttaaatacggctatacatatggtagaagtagctacgagtgatttaaatgaacaatggacgattttttctcaaggagctcttcgtgtcactgcaagagaattagagcaaagagttcatactgtcaaagctgatttagataaaatgtctagagatattgatctcaaaacgcctaaactgcggccttttgaccaaggacagcttattcaattgaaggattttatgtctcagttagatcgataa

SEQ ID NO: 38575 - DNA, 1344 bp, Streptococcus pyogenes
atgattaaaatttatgataccatgacccgttcgctccgcaagtttgtacctttgactgaaaatacagtcaatatatacgtttgtggaccgacggtctataattatattcatattggaaatgctagatcagcggtcgcttttgacaccattcgacgttattttgagtatactggctatcaggtcaattacatttccaattttaccgatgtcgatgataaaattatcaaggctgctactcaagcaggtgtttctcctaaagaattgtcagatcgctttattgcagcttttatagaagataccaaggcacttggtgttaagccagccacacaaaatcctcgtgttatggattatatagcagaaatcatttcatttgttgaaagtctcattgaaaaagattttgcttacgaagcagatggagatgtgtatttccgcgtggaaaagtcagagcattatgccaagctagctaataaaaccctgtcagaacttgaagttggagccagtggtcgaacagatgctgagacagctttaaaagaaaatccactggactttgctctttggaaatcagctaaggcaggtgaggtttcttgggatagcccctgggggtttggtcgtccaggctggcacattgaatgttctgtgatggctactgaaattcttggtgataccattgatattcatggtggcggagctgatttggaatttcctcatcataccaatgaaattgcccaatctgaggccaaaacaggcaagacttttgctaactattggatgcacaatgggtttgtcactgttgataacgaaaaaatgtccaagtcactaggtaattttgtgaccgttcatgacatgttacaaaccgttgatggtcaggttttgcgattctttcttgcgacacaacagtaccgaaaaccaattaacttcactgaaaagactattcatgatgcggaaatcaatctgaagtatcttaaaaacaccttgcaacaaccgctgacagaaactgcagatgagcaagagctaaaacagtttgtaatagctttccaagacgctatggacgatgatttcaatacagcaaatgggattaccgtcgtatttgacatggccaagtggattaattctggctcctatacagaacctgttaaaagcgcttttgagaaaatgttagctgtttttggcattatctttgaagaagaggtgcttgaggttgacattgaagccttgattgccaagcgacaagaagcacgcgcgaatcgtgattttgccacagctgatgccattcgagatcagttagcagttcaaggcatcaagctgctagataccaaagatggtgtgaggtggctgcgtgactaa

SEQ ID NO: 38576 - DNA, 582 bp, Streptococcus pyogenes
atgggttggtggaaagaaagtatagctattgttaaagctctagacccagctgctcgtaatagtcttgaggttatcctaacttatccaggcatcaaagccctagctgctcatcgtttgtctcattttctttggcgacatcattttaaattactagccagaatgcatagccaattttggcgattttggacacaaattgaaatccatcctggagcacaaatcgctcctggagtcttcattgaccatggtgctggtcttgttattggagagacagcaattgttgaaaaaggtgtgatgctttatcatggggtgaccctaggtggaaccggaaaagattgtggcaagcgtcatccaacggttcgacaaggtgccttaatttcggcacatgcccaagtgattggacctattgacatcggagcaaatgctaaagtaggggcagcagctgttgtgttatcagatgttcctgaagacgtgacagttgtaggtgtgccagctaagatagtacgagtgcatgggcaaaaagataatcgtcaaattcaaagtttacaaaaacaacgagaggtctcttatcagttgtcaaaatga

SEQ ID NO: 38577 - DNA, 2133 bp, Streptococcus pyogenes
atgtcaaaacaaacctttacaacaacatttgcagggaaaccccttgttgttgaagttggtcaagtcgctaagcaagccaatggggcaaccgttgttcgttatggcgactcaactgtcctgaccgcagctgttatgtctaagaaaatggcaacgggtgatttcttcccccttcaagttaattacgaagaaaaaatgtatgccgctggtaaattcccaggaggtttcatgaaacgtgagggacgcccttcaacagatgcgaccttgacagctcgcttgattgaccgcccgattcgtcccatgtttgccgaaggttttcgtaacgaagtacaagtgattaacactgtcctttcttatgatgaaaatgctagcgctccaatggcagcgatgtttggctcatctctggccttgtcaatctcagatattccatttaatggaccgattgcaggtgttcaagttggctatattgatggcgagttcatcattaacccagataaagaacagatggaagcatcactcttagaattaactgttgctggtagcaaagaagccatcaatatggttgagtctggtgccaaagaattatcagaagacatcatgcttgaggctcttttaaaaggtcaccaagctattcaagaattaattgccttccaagaacaaatcgtagcagttgttggtaaagaaaaagctgaggttgaactgttacaggttgatgtagacttacaagctgatattgtggctaagtacaatgctcaactgcaaaaagctgttcaagttgaagagaaaaaagcgcgtgaagcagccacagaagccgttaaagaaatggttaaggctgaatacgaagagcgttacgcagaagacgaaaacctagcaaccattatgcgtgacgtggcagaaatccttgaacaaatggagcatgctgaggtgcgccgcctcattacagaagacaagattcgtcctgatggtcgtaagattgacgaaattcgtccgcttgatgctgtggttgacttcttgccaaaagtacatggatcaggtctttttacgcgcggtcaaacgcaggccttgtcagttttgactttggcaccaatgggagaaactcaaatcattgatggtctggccccagagtacaaaaaacgctttttgcatcactacaatttcccgcaatattcagttggtgaaacgggtcgttacggagctgctggtcgtcgtgaaattggacacggtgccttaggtgaacgcgctcttgaacaagtcttgccaagcttagaagagtttccttatgctattcgtttagttgccgaagttctagaatctaacggttcgtcttctcaggcttctatctgtgctgggacccttgccctaatggctggtggtgtgccgattaaagcgcctgtggcagggattgccatgggtctcatttccgatgggacgaattatacagtcttgaccgatatccaaggtcttgaagaccactttggagatatggactttaaagtggcaggaactcgtgaagggattacagcccttcaaatggatattaagattgcaggaattacccctcaaatcctagaagaagctcttgcacaagctaaaaaagctcgctttgaaatccttgatgtgattgaagcaactatcgctgaaccacgtcctgagttagccccaactgcaccgaaaattgacaccatcaagattgacgtagacaaaatcaaagtggttatcggtaaaggtggcgaaactattgacaagattattgccgaaacgggtgtcaaaattgatattgatgacgaaggaaatgtctctatctactcaagtgaccaagctgccattgaccgcactaaagaaattattgcaggtcttgttcgtgaagctaaggtaggcgaagtttaccatgctaaggttgtccgtattgagaaatttggtgcctttgtcaacctctttgacaagacagatgctcttgttcacatttctgaaattgcctggacgagaacgaccaacgtgtcagatgtccttgaagtgggtgaagacgttgatgttaaggtcattaagattgatgagaagggtcgtgtggatgcctcaatgaaagctttgattccacgcccaccaaaaccagagaaaaaagaagaaaaacatgactaa

SEQ ID NO: 38578 - DNA, 732 bp, Streptococcus pyogenes
atgatgacaaaaaaactaaacgttaaagtcttttcagacggtgcggtcttagagaccatgttaaaggatttacaaacaggtttggtcacaggctttacaaccaatccaagtttgatgaaaaaagcaggcatcagttcttatattggctttgccaaagaagtgcttgccaaaattacagactacccagtgtcctttgaagtctttgcggatgatctcgcaagcatggaaaaggaagctgagaaaattgccagtctaggtgacaatgtctatgtgaaaattccagtcaccacttcaacaggagaatcaacctgtcccctcattcaaaagttgtcagccaaaggcattaagttaaacgtcacagccatttttacaattgagcagactcaagctgtggttgatcatttaaccgctcgagttccagctattgtgtctgtttttgctggtcgtattgcagataccggcgttgacccaatgccaatcatggaagaagctctacgcatttgtcgtcaaaaagaaggggtcgaattgttgtgggctagtcctcgtgaaacttataatatctatcaagctgatcagctaggcgtggacattatcacttgtaccactgatttgattgccaagttgcctcttcaaggaaaagatttagaagactattcccttgaaaccgtgcaaatgtttctgaaagacagtaccagcctcggctttaaaattttagaggattacaatcattaa

SEQ ID NO: 38579 - DNA, 1236 bp, Streptococcus pyogenes
atggaagcattattatcatttattcgagatattttaaaagaacctgcatttttaatgggcttgattgcctttgcagggttggtggctttgaaaacacctgctcataaggtgttgacaggaaccttggggccgattttgggataccttatgcttgttgcaggggcgggtgttattgtgaccaatttggaccctcttgccaaactcattgagcacggttttagcatcactggcgtagtgccaaataacgaagccgtcacttctgtcgctcaaaagattctgggtgtggaaactatgtccatcttggtggttgggttattgctcaatttggcttttgctcgttttacccgcttcaaatacattttcttaacaggacatcacagcttctttatggcttgtctcttgtccgccgtgcttggagctgttggtttcaaaggaagtcttttgattatcttagatgggttcctcttgggagcttggtcagctatttcgccagccattggtcaacagtatactctgaaagtgactgacggagatgaaatcgctatgggacactttggtagtttgggctattacctttctgcctgggttggtagcaaggttggcaaagacagtaaagataccgaagaccttcagatttctgaaaaatggagtttcttgcgcaacaccaccatttcaacaggacttatcatggtgattttctacttggtggcaacagtggcttctgttttgaggaatgcttcagtagcagaagaattagcagcaggtcaaaacccatttatttttgccattaagagtggtcttacctttgcggttggtgtggcaattgtctacgccggtgttcgcatgattttggctgacttgattccagccttccaaggtattgctaacaaattaattccaaatgctattccagccgtggattgtgcggtattcttcccttatgcgccaaccgctgttatcatcggttttgcgtcaagtttcgttggtggcttacttgggatgttgattttaggagttgcaggtggtgtcctgattatcccaggtatggtgcctcatttcttctgcggtgcaacagcagagatttttggaaattcaacaggtggtcgtcgcggtgcgatgattggtgcttcgctaatggcttattactcgccttcttgccagccatgcttctacctgtacttggtaaacttggtttttcaaacacgacctttggagatgtggatttcggtgttttag

SEQ ID NO: 38580 - DNA, 2061 bp, Streptococcus pyogenes
atgctatctcatgagctcatcagaaactatcaactcttttctaaatataaaggacattcactggaggcatttgaatccattttaaaggcaagcaaacgtcatatactggcagatattgctaaaatcaatgacacgttgtcactctatcagttaccccttattgctctggacaggcagctggtttatccgccagaccttactgaaaaggacttgttgaatcgcatgctacctaccttagacgactatctctttcaagatgagcgtctggatatgattatcatttacatcatgatggctaaagaatttatctccattaaccacttggaaagcttgttacggctcagcagaaattctgttattgctgatttaaacttggtgcgtgatcgggtacaagcttttcaggtaactttagcttacaatcgccaggatggttatttttttgaaggagaacccttagccttgcggcgtctcttagaatcagcggtcagttctcttttgcaagtcacatctggaccttgggtgttcagttacttattgcatgaacttggtttgcccgaccagaaaaaggtgatggcagcaacgttggaggaactgagcagggagaaccacttaacttttatttcggagaaattgagggatttgatttattttttctgccttctcgctcatcgaccattttcacggaacgtaagggctgaagcagtggatacttttcctttagcttcgccagctgttgaaacgatggtggaccagttattggtcaacttccccagtctaaccgaagaaaaatatttggttcaatctaggttacttggttgtatccaaggtgacttagagttagtctttcagcaacctatttatgacattatggaggaaatcatcaattcggtggcggttaacacgggattgtctatcaccgataccccagaacttcgtcagaacctatacagtcaccttttgccagcttattaccgactttactacgacattaacttgaccaatcctttgaaggaacaaatcaaacaagattatgaatctctcttttacttggtcaagcgcagcctttctcctctagaaaaacaattggggaaatcagttaatgaagatgaggttgcttattttaccattcattttgggagatggttgcaggcccctaagaagaggccaagcaatcagctggtagccttatctgtttgccctaatggcattagttcgtctctgatgttggaggcaaccttgaaggaactttttccacagctacagtttattaggattcaccagctggacaaaataaagttgttggatccagcatcctttgatttgattttttcaacagtagcttttgactgtgctaaacctgtttatgtgacgcaagctttgatgggacctgttgaaaaaatgatgttgaaaaagatggtctgtgatgactttcatcttcccttgtcagagcaattcgctttggatgatctgttgagtattattcataaacataccacgattactaataaagaaggacttgttagtgatttatcccgttacctgattggtaaccatttaacgattgaaaaaggaggtctaggactattggacttgttaacagcagattttattaggcaggctgatgctgtttcggattggcaggaagcgattcgtttggctgctcagcctttactagaacaccagatgattgaaacatcttatatcgatggcatgattgattcggtcaatgagcttggggcctatattgttttagcccctaaggtggctgttcctcatgcggcgcctgaaaaaggaacgcggcagttaggcatgtctctcttacaactaaaagaacctgtcagctttgatttgaagcaagaaggtgatccagacaagcaagtgcaattgatttttgttttgtctgctgtggattctagttcacatttgaaggctttgcaggaactgtcgttgattttagatgatgatgaacatattgagcaattaattgaggctaagaatactgaggaaataatgagtctgattagccatatgattgaaaaaggagacgaatcacatgattaa

SEQ ID NO: 38581 - DNA, 270 bp, Streptococcus pyogenes
atggcaatctcaaaagagaaaaaaaatgaaatcattgctcaatatgcacgtcatgaaggcgatacaggttcagttgaagttcaagtagcagttcttacttgggaaatcaaccacttgaacagccacatcaaacaacacaaaaaagaccacgctacttaccgtggattgatgaaaaaaattggtcaccgtcgtaacttgttggcatacctacgtcgtacagatgttaaccgttaccgtgagttgatccaatctcttggacttcgtcgttaa

SEQ ID NO: 38582 - DNA, 429 bp, Streptococcus pyogenes
atgagtcatttagataagaacaccgctttgaaagccatggtggtgtttcgtaaagctcagcgaacgctagatgcttttggggctgatatttttaaaaaggcagatttaacagccacgcagttcagtgtgcttgaagtactatatactaaaggctgtatgcgaatcaatcacttgattgattctttgttagcgacttcggggaatatgactgttgtactaaataatatggaacgcaatggctggattagcaagtgcaaagacaaaacggataaaagagcctatgtggttaccttaacagataagggtactcgcttgattgaagctgttttgcctaaacacgtcgcacgggtggaagaagcctttgctgttttgactgaaaaagaacaactttgtctgattgaacttctcaaaaagttcaaacaattataa

SEQ ID NO: 38583 - DNA, 4398 bp, Streptococcus pyogenes
atgtcagatttattcgctaaattgatggaccagatagaaatgccacttgacatgagacgttcaagtgccttttcatctgctgatattatcgaggtaaaggtacattcggtgtcacgcttgtgggaatttcattttgcctttgcagcggttttaccgattgcaacttatcgtgaattgcatgatcgtttgataagaacttttgaggcggctgacattaaggtaacctttgacatccaagctgctcaggtggattattcagatgatctgcttcaagcttattaccaagaagcttttgagcatgcaccgtgtaatagtgctagttttaaatcttctttctcaaagctcaaagtgacttatgaggatgacaaactcattattgcagcgccaggttttgtgaataacgatcattttagaaacaatcatctgcctaatctggtcaagcaattagaagcctttggctttggcatcttgaccatagatatggtgtcagatcaggaaatgactgagcatttgaccaagaattttgtttccagtcgtcaggctcttgtgaaaaaggctgtgcaggataatttggaagcccaaaaatctcttgaagccatgatgccaccagttgaggaagccacacctgctcctaagtttgactacaaggaacgagcagctaagcgtcaggcagggtttgaaaaagcaaccatcacaccaatgattgagattgagaccgaagaaaaccggattgtctttgagggtatggtttttgacgtggagcgtaaaacgactaggacaggtcgccatatcatcaactttaaaatgacagactatacctcctcgtttgctctccaaaaatgggctaaagacgatgaggagctccgtaaatttgatatgattgctaagggagcttggttacgggtacaagggaatattgagaccaatccttttacgaagagtctcaccatgaatgtccagcaggtcaaagaaattgtccgtcatgagcgcaaagacctgatgccagaagggcaaaagcgggtcgaacttcatgcccacaccaatatgtctaccatggatgccttaccgacagtagaaagcttgattgatacggcagccaagtggggacacaaggcgattgctatcaccgaccatgctaatgtgcaaagttttcctcatggctaccatagggctcgcaaagctgggattaaggctatttttggcctagaagccaatattgttgaggacaaggtgcctatttcttatgaacctgttgatatggatttgcacgaagctacctatgtggtctttgacgtggaaaccacaggtctatctgctatgaataatgacctgattcagattgcggcttccaaaatgtttaaaggaaatattgtagagcagtttgatgaattcattgatcctgggcatcctctttcagcctttaccaccgaattgacaggaattaccgataagcatttgcagggcgccaagccattggttactgtcctaaaagcttttcaggacttttgcaaagatagtatcttggttgcccacaacgccagttttgacgtgggctttatgaacgccaattatgaacgccacgacttgcccaaaatcacacagcctgtgattgataccttagaatttgctagaaacttgtatcctgagtacaagcgtcacggtttgggaccgctcaccaagcgtttccaagtgagtctagaccaccatcatatggccaattacgacgcggaagccacaggacgtcttttgtttatttttctaaaagatgccagagaaaagcatggcatcaaaaatcttttgcaactcaatacagatttggtggctgaggattcttacaaaaaagcgcggattaagcatgcgactatctatgtgcaaaatcaggttggtcttaaaaatatgtttaagttggtcagcctttccaatatcaaatattttgaaggggtgccgcgtattccaagaaccgtcttagatgctcacagagagggtttgttacttggtacagcttgttctgacggcgaggtttttgatgccgttctgactaaaggaattgatgcagcggttgatttggctaggtattatgattttatcgaaatcatgccaccagccatttaccagccattggttgtccgtgaattaatcaaagatcaagcaggtattgagcaggtgattcgtgacctcattgaagtagggaaacgagctaagaaacctgtgcttgccactgggaatgtgcattatctagagcctgaagaagagatttaccgtgaaattattgtgcgtagtcttggtcagggtgccatgattaatagaacaatcggccgtggggaaggggcacagcctgctcctctacctaaagcgcactttagaacaaccaatgaaatgctggatgagtttgcctttcttggaaaagacctcgcttatcaagtagttgtgcaaaatactcaggattttgcggaccgtattgaggaagtggaagtggttaagggcgatctttacaccccgtatattgataaggccgaagagacggttgccgaattaacctatcaaaaagcctttgaaatttatggtaatcctctcccagatattattgatttacgcattgaaaaagagttaacctctatcttggggaacggttttgctgtgatttatctcgcttcccaaatgcttgttaaccggtcaaatgagcgaggctacctagttggttctaggggatctgtagggtctagctttgtcgccaccatgattgggattactgaggttaatcctatgccgcctcactacgtttgcccgtcctgccaacattctgaatttatcacagatgggtcagttggatctggctatgatttgcctaataaaccctgtccgaaatgtggcaccccttatcaaaaagatgggcaagacattccctttgagacctttcttgggtttgatggggataaggtgcccgatattgatttgaacttctctggtgatgaccagcccagtgcccatttggatgtccgagatatttttggtgacgaatacgcctttcgtgctggaacagttggtaccgtagcagaaaaaacagcttatggatttgtcaaaggctatgaacgcgactatggcaagttctatcgtgatgctgaggtggatcgtctagcagcaggtgctgctggtgtgaaacgaacgactgggcagcaccctggggggattgttgttattcctaattacatggatgtttatgattttacccccgtgcaatatccagccgatgatgtaacggcttcttggcagacaactcactttaacttccatgatattgatgaaaacgtcttgaaacttgatatcctagggcatgatgatccgaccatgattcgtaaacttcaggatttatcgggcattgatcctattactattcctgctgatgatccgggagttatggctctcttttctgggacagaggttttgggcgttaccccggaacaaattgggacaccgactggtatgctaggcattccagaatttggaaccaactttgttcgcggcatggttaatgagacgcatccgaccacttttgcggagcttttgcagttgtctggactatctcatggaaccgatgtttggcttggtaatgcacaagatttgattaaagaaggcattgcaaccctaaaaaccgttatcggttgtcgtgacgacatcatggtttacctcatgcacgcaggcttagaaccaaaaatggcctttaccattatggagcgtgtgcgtaagggattatggctaaaaatttctgaggaagaacgtaatggctatattgatgccatgcgagaaaacaatgtgcccgactggtacattgaatcgtgtggaaaaatcaagtacatgttccctaaagcccatgcggcagcttatgttttgatggcccttcgggtggcttatttcaaggtgcaccaccccattatgtattattgtgcttatttctctattcgtgcgaaggcttttgaattaaaaaccatgagtggtggtttagatgctgttaaagcaagaatggaagatattactataaaacgtaaaaataatgaagccaccaatgtggaaaatgacctctttacaaccttggagattgtcaacgaaatgttagaacgcggctttaagtttggcaaattagacctttacaaaagtgatgctatagaattccaaatcaaaggagatacccttatccctccatttatagcgctagaaggtctgggtgaaaacgtggccaagcaaatcgttaaagctcgtcaagaaggcgaattcctctctaaaatggaattgcgtaaacgaggcggggcatcgtcaacgctcgttgagaaaatggatgagatgggtattttaggaaatatgccagaagataatcaattaagtctttttgatgactttttctag

SEQ ID NO: 38584 - DNA, 1857 bp, Streptococcus pyogenes
atgaaacaaagtaaactgcttatcccaaccttgcgcgaaatgccaagtgatgcccaggttatcagccacgcgcttatggtgcgtgccggttatgtgcgccaagtttctgctggtatctatgcttatttaccactggcaaatcgtaccattgagaaattcaagaccatcatgcgtgaagagtttgaaaagatcggtgctgttgaaatgttggcgccagctcttttgacagctgatctctggcgtgaatcaggccgttatgagacctatggagaggacctctataagcttaaaaaccgtgataactcagactttatcttgggtccaactcacgaagaaacctttacgactttggtgcgtgatgcggtcaaatcttacaagcaattgcccttaaacctttatcaaattcagtctaagtatcgtgatgaaaaacgtccgcgtaatggcttgcttcgtacccgtgagtttattatgaaagacggctatagtttccatcacaactatgaagatttagatgtgacctacgaagattatcgtcaagcttacgaagctatttttaccagagctggtttagatttcaaagggattattggagatggcggtgccatgggggggaaagattcccaagaatttatggccattacaccagctcgtacggatcttgatcgctgggtggttcttgacaagtctattgcgtcaatggatgatattccaaaagaggtcttagaagatattaaggcagaattggctgcttggatgatttcaggtgaagatactattgcttattcaacagaatcaagctacgctgccaaccttgagatggcaactaacgaatacaaaccgtcctcaaaagtagctgctgaagatgccttggcagaagttgagacaccacattgcaaaacgattgatgaagtggctgcttttctttcagtagatgaaacacaaaccatcaaaaccttgctttttgtggcagataatgaacctgttgttgctttgctagttggaaatgaccatatcaataccgttaaattaaaaaactatctagctgctgattttttagagccagctagtgaagaagaagcccgtgctttctttggtgcaggttttggctcacttgggcctgtcaacttggcacaaggtagtcgtattgtggctgaccgcaaagtgcaaaaccttaccaatgccgttgcaggagctaacaaggatggtttccatatgacaggagtcaatccaggacgtgacttccaggctgaatatgtagatattcgtgaagtcaaagaaggggaaatgtctccggacggtcatggtgttctccagtttgcgcgtggtatcgaagtcggtcatatcttcaagttgggcactcgttattcagacagcatgggagcaacgattcttgatgaaaatggcagaacagttccaattgtgatgggttgttatggtatcggggttagccgcattttgtctgctgtcattgaacagcatgcccgtctctttgtgaacaagacaccaaaaggcgattaccgttatgcttggggtattaacttccctaaagaattagccccatttgacgtgcatttgattacagttaatgtcaaagatcaagtggcccaagacttgacggcgaagttagaagctgacttgatggctaaagggtatgatgtcttgacagatgaccgtaatgaacgcgtcggttcgaaattctctgatagcgatttgattggtttgccaattcgtgtcactgttggtaaaaaagccgctgaaggtatcgtggaaattaaaatcaaggcaacaggtgacagcattgaagttaatgcagaaaacctcatcgaaacccttgaaattttaacaaaagaacactaa

SEQ ID NO: 38585 - DNA, 795 bp, Streptococcus pyogenes
atgaaagaacgtgttgtttgggggggagtagcagtagctattttcctaccttttctcataataggaaacctaccattccaattatttgtaggcgttttggccatgattggggtatcagaattactgaaaatgaaaagattagaagtcttttcttttgaaggtgtttttgccatgttagccgcctttgtattggcagttccgatggaccattacctcacttttttaccaattgatgcgaatgttgctttttacagcttaatggtttttttcattttggcaggtactgttttaaatagcagagcttattcatttgatgatgcggcctttccgattgcaactagtttttatgttgggattggttttcaacatttgatcaatgctcgcctgtcaggaattgacaaggtctttttggccttatttatcgtttgggccactgatattggagcatatctgattgggcgtcagtttggtagacgcaaactattgcctacagtttctccaaacaaaaccattgaaggtagtttaggagggatcgcttgtgcagtccttgtgtcttttatctttatggtgattgataggtctgtttatgcgccacatcactttttgaccatgttggttttggtcgctcttttttccatttttgcccaatttggtgatttggttgaaagtgctctcaaacgtcactttggtgtcaaagattcaggtaagcttatcccgggacatggtggtattttagaccgctttgattccatgatttttgtttttcccatcatgcatctctttggtttattttaa

SEQ ID NO: 38586 - DNA, 750 bp, Streptococcus pyogenes
atgtttggattaaaagcgaaatcaacaaaaaaagttttggggagtatcccaaagcatattggaattatcatggatggtaatggacgttgggccaaaaaaagactaaaacctagagtgtttgggcataaagctgggatggatgctttacaagaagtaacgattactgcatctgagttgggggttaaagttctgacagtctatgccttttcgacagaaaactggtccagaccccaagatgaggtgtcttttatcatgaatttaccagtaaccttctttgacaaatatgtgcctgtgcttcatgagaacaatgtaaagattcaaatgattggagagactagtcgtttacctgaagataccttggcagcgctaaatgcagccatcgacaaaacaaaacgtaatacgggtttaattttgaattttgctctcaattatggaggacgtgctgagattaccagtgctgttcgctttattgctcaagatgtcttagatgccaaattaaatccaggagatattacggaggatttgattgctaattacttgatgacagaccatctgccatatctctaccgagaccccgatttgattattcgcaccagtggtgagctgcgtttgagcaatttcttgccttggcaatcagcttacagtgaattttatttcacaccagtcttgtggcctgattttaaaaaggcagagctactaaaggccattgcggattataaccgccgccaacgtcgttttggcaaggtctaa

SEQ ID NO: 38587 - DNA, 1614 bp, Streptococcus pyogenes
atgaacaaccactggtggcataaagctacgatttatcagatttacccaaggtcctttaaagacaccagcggcaatggtattggtgatttaaaaggcattaccagtcaactggactacttgcaaaaacttggcattacagccatttggttatctcctgtttaccaaagtccaatggatgacaatggttatgacatctctgactatgaagcgattgctgatgtttttggagacatggcagatatggatgagctcttagcagcagctaatgagcgaggcattaagattatcatggacttggtggtcaaccatacgtctgatgagcatgcttggtttgttgaagctagagaaaatcccaatagtcctgagcgtgattactatatttggcgtgacgagccaaacaacctcatgtctattttttcaggatctgcttgggaattggatgaggcatcaggacaatattacctgcatttgtttagcaagaaacagcctgatttgaactgggaaaatgctcagctgcgccaaaaaatttacgatatgatgaatttctggattgccaaaggcatcggtggttttcgtatggatgtgattgacctgattgggaaggttcctgacttggagatcacgggtaacgggccgcgcttacacgattacctcaaagaaatgaatcaagcaacctttggcaaccatgacgtgatgacagtcggtgagacttggggagcaacgcctgaaattgctcgccagtattctcgccctgaaaacaaagagttatccatggtcttccaatttgagcatgtgggtcttcaacataaacctgacgctcccaagtgggattatgccaaagaattagacgtgcctgctctgaaagctatttttagcaagtggcagacagaattaaagttaggagaaggctggaattcgcttttttggaataaccatgacttgccacgggtcttatccatttggggcaatgacagcacttaccgagaaaaatcagccaaggctttagctattttactgcatttgatgcgaggaaccccttacatttaccaaggagaagagattggcatgaccaattatccttttaaagacttaaccgaggttaatgatattgagtcccttaactatgctaaggaagctatgggaaatggagtgtcagctgcgcgtgtgatggatagcatccgtaaggtaggacgagacaatgctagaacgccgatgcagtggtctaaggacacacatgctggcttttctgaagcaaaagagacttggttgccggtcaaccccaactaccaagacatcaatgtggccgatgcccttgctgatccagactctattttttacacctaccaaaaattgattgccttgcgtaaggagcaagactggctagttgaagcggattatcacctcttgccaacagctgataaagtgtttgcttatcagcgtcagcttggagaagagacgtatgtgattgttgtcaatgtgtctgatgaggagcaagtctttgccacagacttagcaggtgcacaagtgatcatcgccaatacagatgtggacacggtattagagaccaagcacttacaaccttgggatgccttttgtctcaaactgaaggcctag

SEQ ID NO: 38588 - DNA, 849 bp, Streptococcus pyogenes
atggagctaaaagactattttccagagatgcaagtaggccctcatccgttaggagataaagattggatgagtatcaaagaaggggaccaatatgtgcattttcccaaatcatgtttatccgaaaaagagcgcttattacttgaggtggggctgggtcagtgtgaggtcttgcagccgctagggtcaccttggcagcggtatttgcttgatcatcagggcaatccccctcagctgtatgagacttctcagttcatttaccttaatcatcagcaggctttaccagatgacttagttgagttgctccaacaaatgattgcagggcttgaagtcattttgcctatcagtgcaacccaaacggcatttttatgccgacaagcaatctcaataaaggtcttgcgctggcttgaagatctcctgccaacgctagaaagtgattttggtttggccttaaccatgtttgttggaaatgcctggtatcaggtagctgcgggtacattgagagagtgttttgaggaggaatgtcagctgttaacggcctatttaaggcaacaatcaggcagaaaattattaacattttcaggactgatgctgtggtctttgctgtcgcaccacacttttttggcattgacgcgtcagtttcaccaattcctaagtcctcaaagtgatatggccgatgtggttcacgcgctatggtcagaacacggcaatctggtgcagacagcgcagcgcttgtatattcaccgtaactccttgcaatacaaacttgataaatttgctcagcaatcaggactccacttgaagcaattggatgatttagcctttgctcatctctttttgttgaaatattag

SEQ ID NO: 38589 - DNA, 2232 bp, Streptococcus pyogenes
atgaggaacgaaatggcaaaaataatgaacgtaacaggagaagaagtcattgccttagcggccacctatatgaccaaggctgatgtggcttttgtggcaaaggctttagcatatgcaacagcggcccatttctaccaagtgagaaagtcaggcgaaccctatatcgtccatccgattcaggtggcggggattctggctgatttgcatctggatgctgtgacagttgcttgtggctttttacatgatgtcgtagaagatacggatattaccttagatgagatcgaagcagactttggccatgatgctcgtgatatcgttgatggtgtcaccaagttaggtgaagttgagtacaaatctcatgaggagcaactcgccgaaaaccatcgcaaaatgctgatggctatgtccaaagatattcgcgtgattttggtgaaattggctgaccgcctgcataatatgcgcaccctcaaacatttgcgcaaggacaaacaagagcgcatttcgcgcgaaaccatggaaatctatgcccccttggcgcatcgtttggggattagtcgcatcaaatgggaactagaagatttggcttttcgttacctcaatgaaaccgaattttacaaaatttcccatatgatgaaagaaaaacgtcgcgagcgtgaagctttggtagaggctattgtcagtaaggtcaaaacctatacgacacaacaagggttgtttggagatgtgtatggccgaccaaaacacatttattcgatttatcggaaaatgcgggacaaaaagaaacgattcgatcagatttttgatctgattgccattcgttgtgtcatggaaacgcaaagcgatgtctatgctatggttggctatattcatgagctttggcgtcccatgccaggccgcttcaaggattatattgcagctcctaaagctaatggctaccagtctattcataccaccgtgtatgggccaaaaggacctattgagattcaaatcagaactaaggacatgcatcaagtggctgagtacggggttgctgctcactgggcttataaaaaaggcgtgcgtggtaaggtcaatcaagctgagcaagccgttggcatgaactggatcaaagagctggtagaattgcaagatgcctcaaatggcgatgcagtggactttgtggattcggtcaaagaagacattttttctgaacggatttatgtctttacaccgacaggggccgttcaggagttaccaaaagaatcaggtcctattgattttgcttatgcgatccatacgcaaatcggtgaaaaagcaacaggtgccaaagtcaatggacgtatggttcctctcactgccaagttaaaaacaggagatgtggttgaaatcatcaccaatgccaattcctttggccctagtcgagactgggtaaaactggtcaaaaccaataaggctcgcaacaaaattcgtcagttctttaaaaatcaagacaaggaattgtcagtgaataaaggccgtgatttgttggtgtcttattttcaagagcagggctacgttgccaataaataccttgacaaaaaacgcattgaagccatccttccaaaagtcagtgtgaagagcgaagaatcactctatgcagccgttgggtttggtgacattagtcctatcagtgtctttaacaagttaaccgaaaaagagcgccgtgaagaagaaagggccaaggctaaagcagaagctgaagaattggttaagggcggtgaggtcaaacacgaaaacaaagatgtgctcaaggttcgcagtgaaaatggagtcattatccaaggagcatcaggcctcttgatgcggattgccaagtgttgtaatcctgtacctggtgatcctattgacggctacattaccaaagggcgtggcattgcgattcacagatcggactgtcataacattaagagtcaagatggctaccaagaacgcttgattgaggtcgagtgggatttggacaattcgagtaaagattatcaggctgaaattgatatctatgggctcaatcgtagtggtctgcttaatgatgtgctccaaattttatcaaactcaaccaagagcatatcgacagtcaatgctcagccgaccaaggacatgaagtttgctaatattcacgtgagctttggcattccaaatctgacgcatctgaccactgttgtcgaaaaaatcaaggcagttccagatgtttatagcgtgaagcggaccaatggctaa

SEQ ID NO: 38590 - DNA, 2187 bp, Streptococcus pyogenes
atgaaaacatcattcaagcaactgtttcgtttcgaattttggcaaaaatttgggaaatgtcttatggtcgttattgctgtcatgccagcggctggtttaatgatcagtatcggaaactctattccaatgattaaccacgactcagcatttttggcatctctaggcaacattatcgctcaaattggttgggctgttattgttaaccttcacttgctatttgccttggccattggtggtagttgggctaaagaaagagctggaggggcctttgcctcagggcttgcttttgtcttgatcaatcggataacaggtgctttttatggcgtgtctagtactatgctagctgatccagaagcaaaaatcacaagcctccttggcactcaaatgatcgttaaagattatttcaccagtgtcttggaatctccagctttaaacacaggggtttttgttgggattattgcagggttcgtaggagcaacggcctataacaaatactataattaccgtaaacttcctgaagttttgaccttctttaatgggaagcgttttgtaccatttgtcgttattttacgttctatttttgtagcccttattttggttgttgtttggccggtgatccagtctgggattaacagttttgggatgtggattgcctcttcacaagattcagctccaatcctagccccattcctatatggtaccttggaacgtctcttgttgccatttggtcttcaccacatgttgacgatcccaatgaactatacagctcttggtggaacttatgaggtcatgacaggtgcagcagcggggacaaaagtatttggtcaagaccctttgtggcttgcttgggtaactgaccttgttcaccttaaaggatcagacgcttcagcctatagtcacttaatggatagtgtgactccagctcgtttcaaagtaggacaaatgattggagctaccggaacattgatgggggttgccttagccatgtaccgtaatgtggatgccgataaaaaacacacatacaaaatgatgttcatctcagcagcggcagcggtctttttgacaggggtaactgagccacttgagtacctatttatgtttgcagcaatgccactttacatcgtctatgcccttgttcaaggagcttcatttgccatggcagaccttgtgaatctccgtgttcactcatttggaaatatagagctactaacccgcacccctatggctcttaaagcaggcctaggcatggatgtgattaactttgtttgggtttctgtcctctttgcagttatcatgtactttattgcagatatgatgatcaagaaaatgcatctcgcaacagctggccgtttaggcaactacgatgccgatatactgggtgaccgtaacactcaaacaagacctacccaagtagcagatagcaactctcaagtcgtgcaaatcgttaatctccttggtggggcaggcaatattgatgatgttgatgcttgtatgacgcgcttacgagtgacggtcaaagaccccgctaaggttggtgctgaggacgattggaaaaaagctggcgctataggcttgatccaaaaaggcaacggcgttcaagcggtctatggccctaaagcagatattttgaaatcagatattcaagatttgctggactcaggtgctcttattccagaagtcaatatgtcacagctcactagcaaaccgactcccgcaaaagattttaaacacgtgacagaagatgtgctatcagtggcagacgggatggttctcccaatcacaggtgtaaaagaccaggtgtttgcggctaagatgatgggagatgggtttgcggttgaaccaacccatggtaatatctatgcacccgtagctggccttgtgaccagtgtctttccgaccaagcatgcctttggtttactgacagataatggtcttgaagtgctggtgcacgtgggacttgataccgtcgccttaaatggtgtgcctttttcagtcaaagtctcagaagggcaacgggttcatgcaggtgacctattagtcgtagcagatcttgctgctattaaatcagcagagcgtgaaacaatcattgttgttgcttttaccaacacaacagagatccaagatgtgaccttgacatctttaggagctcagcctgctaagactaaagtagctaccgtagaactttaa

SEQ ID NO: 38591 - DNA, 750 bp, Streptococcus pyogenes
atgcaacagtattttattaaaggcaaagcagaaaaaaaggtaacgattaccgataaagataccatcaagcacatgtttcaagtgatgcgcttggctgacgaggctgaagttgtcttggtctttgatgatggggtgaagtatttagctaaggtgaccaatagtatggctcatgagttagagattatagaggctttgccagatcaggtggaattgcctgttaaagtgactattgcttctggatttcctaaaggcgataagttagacacgattgcccagaaagtgactgaattgggagccagtgcgctatggggctacccagcagactggtcagtggtcaaatgggatggcaaaaaattagctaaaaaagaagacaaattggctaagattgtattaggagcggctgagcagagcaaacgaaatagggtgcctgaagttcacctttttgaacataaagcagagtttctaaaaagcctttctagctttgatcatatcttcattgcttatgaggaaacagctaaggcaggtcagctagcgaccttggcgcgtgaagtaaaagaagttaagccaggggcaaaaatcctctttatctttggaccagaagggggaatttccccaactgaaatcactcagtttgaggcagcaagtgccattaaggtgggcttaggccctcgcattatgcgagcagagacagcgccgctatatgccttaagtgctcttagttatgctttggaattgcaggcatcaaaataa

SEQ ID NO: 38592 - DNA, 1758 bp, Streptococcus pyogenes
atgcatagaaaaactattattgatttcaaagagctcgggcaacgctatctttttgatgagccattagtagaattggtagccaagtccttagatcaggtcggtccagtcattgaaaaagtacaacactaccaacagctgggctattacgtggtgggctatctcagttatgaagcagctgctttttttgacaatgccctacaaacccataatgacagactaggcaacgagtaccttgcctattttacagtgcacaaaacctgtcaaaaaaaagacctacctcttgattatgacagcattactatccctaaccaatgggtcagcgcaactcaaaaagaagcctatcaaaaagccattgaaaccattcaccgtgagatgcaacagggcaatacttatcaggttaactacacccttcaattaactcaggaactcaatgcagctgatagtttagccatttacaataaactcgtcgttgaacaggctgctggctacaatgcctacatcgcccatgatgagtttgccgttatttcagctagtcctgaattgttctttaaacaagagggcaacaggttaactactaggcctatgaaaggcaccaccaaacgaggggttaatagctggctggatcaacaagaacatgactggctccaagctgacgggaaaaaccgttctgaaaacatgatgattgtggatttgctccgcaatgacatggggaaaatttgccaaacaggcagtgttcgtgttgataggctctgtgaggtcgagcgatactctaccgtctggcaaatgacctcaactattgttggtgacctcaaagcggactgtgacctgatagacattctcaaagctctctttccttgtggctctatcacaggggcaccaaaagtctccaccatggcaattatcacatctctggagccaaaaccaagggggatttattgtggaagtattggcatttgcctacctgatggtcgccgtttcttcaatgttcccattagaaccatccagctcagtcataatcaagctacttatggtgtcggaggcggcatcacttggcaaagcaagtgggaagacgaatacgaggaagtccatcaaaaaacagcttttctctatcggcacaaacaaatctttgacctcaaaacaaccgccaaggtggaacacaaaaaaatagccttccttgagcaacacctcaatcgccttaaagaagcagccacttattttgcttacccttataatgaaaaagctttgcagaaacaactgtcaacctatttggaaaataagaataatgctgcctaccgtttgatgattcgtttatccaaagatggaaagattagcctctctgatcaacccttggaacctttgtcagccgattttctgacagctcaactctctttacagaaaaaggacgtgacagcttcgccttttacctactttaagaccagctaccggcctcatattgagcaaaaatcttatgaacagctattctataaccaagcggggcaattattggaaacgtccattggcaatctctttgttcagctgggtcagaccctctacacaccaccagtggctgtggggattttaccaggactttttcgccaagaactgctagctactggtcaagctcaggaaaaagaggtgacactagctgatttaaaagaggctagcgctatttttggaggaaatgctgtccgtggcctttatcctctcaaccttgagcttactcaccttgatgccctcttagctaagagtcaagcctaa

SEQ ID NO: 38593 - DNA, 1269 bp, Streptococcus pyogenes
atgcctgatcatttagcgctcagaatgcgccccaaaaccatttcagaggtcatcggacaaaaacaccttgttggcgaaggcaaaatcatccgtcgcatggtggaagcaaatagactatcgtccatgatcctctatggccctccaggaatcggtaaaacttccattgcttctgctattgctggtactactagatatgcctttcggacctttaatgccaccattgacagcaaaaaacgtctccaagaaattgcggaagaagctaaattttctggtggcttggtattattactagacgagattcatcgccttgacaagacaaaacaagattttcttttacctttacttgagaatggcaccattatcatgattggcgcaaccactgagaaccccttcttttcagtgacacccgctatcagaagcagggtccaaatttttgaattggaaccactttctaacgaggatattaaaacagccattcagctagcaatttccgacaaagaacggggatttccttttttagtgacaattgatgatgaggcgctagatttcattgttaccgccacaaatggagacctacgatctgcttataattccttggatctagcagtcatgtctacttctcctaatgaagatggtagtcgtcatattagtctagagacaatggaaaatagtctgcagcgtagttatattaccatggataaaaacggggacgggcattatgatgttttatctgccttacaaaaatccattagaggttctgatgtcaatgctagcctgcactatgccgctcgtttagtagaagctggagacttgcctagtttagcaagacgattgaccattattgcttacgaagatattggcttagccaaccctgacgcccaagttcataccgtcaccgcactagatgccgcccaacgcattggttttccagaagctcgtattcctatcgctaacgtggtcattgatttggctctatcacctaaatccaattcagcttatttagctatggatgcagctttagctgatttgagaacatcaggcaacctccccattccaagacatcttagagacgggcattatgctggcagcaaggacctaggcaatgccaaagattacctctacccacacgcctaccctgaaaaatgggtcaaacaacaatacctaccagataaattagtaggacatcattattttgaagccaatgaaaccggtaaatacgaacgcgcacttggttcaaataaagagcgtattgataagctctcagactga

SEQ ID NO: 38594 - DNA, 1629 bp, Streptococcus pyogenes
gtgtcaaaatacctaaaatacttctctattatcacgttatttttgactgggcttattttagttgcatgtcaacaacaaaagcctcaaacaaaagaacgtcagcgcaaacaacgtccaaaagacgaacttgtcgtttctatgggggcaaagctccctcatgaattcgatccaaaggaccgttatggagtccacaatgaagggaatatcactcatagcactctattgaaacgttctcctgaactagatataaaaggagagcttgctaaaacataccatctctctgaagatgggctgacttggtcgtttgacttgcatgatgattttaaattctcaaatggtgagcctgttactgctgatgatgttaagtttacttatgatatgttgaaagcagatggaaaggcttgggatctaaccttcattaagaacgttgaagtagttgggaaaaatcaggtcaatatccatttgactgaggcgcattcgacatttacagcacagttgactgaaatcccaatcgtccctaaaaaacattacaatgataagtataagagcaatcctatcggttcaggaccttacatggtaaaagaatataaggctggagaacaagctatttttgttcgtaacccttattggcatgggaaaaaaccatactttaaaaaatggacttgggtcttacttgatgaaaacacagcactagcagctttagaatctggtgatgttgatatgatctacgcaacgccagaacttgctgataaaaaagtcaaaggcacccgcctccttgatattccatcaaatgatgtgcgcggcttatcattaccttatgtgaaaaagggcgtcatcactgattctcctgatggttatcctgtaggaaatgatgtcactagtgatccagcaatccgaaaagccttgactattggtttaaataggcaaaaagttctcgatacggttttaaatggttatggtaaaccagcttattcaattattgataaaacaccattttggaatccaaaaacagccattaaagataataaagtagctaaagctaagcaattattgacaaaagcgggatggaaagaacaagcagacggtagccgtaaaaaaggtgaccttgatgcagcgtttgatctgtactaccctactaatgatcaattgcgagcgaacttagccgttgaagtagcagagcaagccaaggccctagggattactattaaactcaaagctagtaactgggatgaaatggcaacgaagtcacatgactcagccttactttatgccggaggacgtcatcacgcgcagcaattttatgaatcgcatcatccaagcctagcagggaaaggttggaccaatattacgttttataacaatcctaccgtgactaagtaccttgacaaagcaatgacatcttctgaccttgataaagctaacgaatattggaagttagcgcagtgggatggcaaaacaggtgcttctactcttggagatttgccaaatgtatggttggtgagccttaaccatacttatattggtgataaacgtatcaatgtaggtaaacaaggcgtccacagtcatggtcatgattggtcattattgactaacattgccgagtggacttgggatgaatcaactaagtaa

SEQ ID NO: 38595 - DNA, 822 bp, Streptococcus pyogenes
atgatattgaaacgtcgaacgatggttttatggcaactgggtatcgccatttctctcattcttagtattctagccttaaacctttatttctataggacgcctttggaaaccaatgcagctttacgcaacctcgctccttccttaaaccatctttttgggacagatggtttaggtagggatatgtttgtcagaacgattaaagggctttatttctctttacaagtcggcttattaggcgcccttatgggagtctttcttgcgaccgtttttggagtgcttgcaggtctaggaaatagccttattgataaaataatagcctggttggttgatttgtttattggtatgcctcatttgatttttatgattctcatttcttttgttgttgggaaaggggctcaaggggttatcattgcaacagctgttacccattggccctctctagcaaggcttatccgcaatgaagtctatgatctaaagaataaagcctttgtccagctctctaaaagcatgggaaaaacgccttattatattgtgaggcatcatatcctgcctttgattgcttctcaaattttcattgggtttatcctcttatttccgcacgtcatcttgcatgaagcatccatgactttcttaggatttggcctttctgccgaacaaccttcggttggtatcattttgtcagaggcagctaagcatatctctcttggcaattggtggttggtgatttttccaggcctttatcttattttggttgtcaatgcctttgatactatcggagaatctttaaagaaactcttttaccctcaaacggatcatttttag

SEQ ID NO: 38596 - DNA, 201 bp, Streptococcus pyogenes
atgtcagaagaaaaattaaaatcaaaaattgagcaagcatctggtggcctaaaagaaggtgctggtaagttgacaggtgataaagagctagaagcaaaaggatttgttgaaaaaacaattgctaaaggcaaagaacttgcagacgatgcaaaggaagcggttgaaggtgctgtagatgccgttaaggaaaaattaaaataa

SEQ ID NO: 38597 - DNA, 1140 bp, Streptococcus pyogenes
atgcgtagagcagaaaataacaaacacagccgctattccattcgcaaactgagcgttggggtaacgagtatagcaattgcgagtctctttttaggaaaggttgcctatgccgtagatggcatccctccaatctctcttactcaaaagactacagccactacatcagaaaattggcatcatattgataaggatggccttattcctttaggtataagcttagaagctgccaaagaggaatttaaaaaagaagtagaagaatcacgtttatctgaagcacaaaaagaaacgtataaacaaaaaattaaaactgcaccagacaaagataagctattattcacgtatcatagtgagtatatgacagccgttaaggatcttccagcgtctactgagtctactactcagccagttgaggcacccgtgcaggagacacaggcatcagcttcagattcgatggtgacaggtgattcaacatcagttacgactgattctcctgaggaaaccccatcttcggaaagtccagtggccccagctttatctgaggctccagctcaaccagctgagagtgaggaaccttcagtagcagcatcttctgaggaaaccccatctccatcaactccagcggccccagaaactcctgaagaaccagcagctccatctccatcacctgagagtgaggaaccttcagtagcagctccttctgaggaaaccccatctccagaaactcctgaagaaccagcagctccatctcaaccagctgagagtgaagaatcttcagtagcagctacgacaagcccgtctccatcaactccagctgaatcagagactcagacgccaccagctgttactaaagactctgataagccatcttcagcagctgaaaaaccagcagcctcttcacttgtttcagaacaaaccgttcaacaaccaacttcaaagagatcttctgataaaaaagaagagcaagaacagtcttactctccaaatcgctcattgtcaagacaggttagggcccatgagtcaggtaagtacttgccttcaacaggtgaaaaagcacagccactctttatagctactatgactttgatgtctctatttggcagtcttttagtcacaaaacgccaaaaagaaactaaaaaatag

SEQ ID NO: 38598 - DNA, 2418 bp, Streptococcus pyogenes
atgactgaaacaaaaagcccttattttggacatttaacagacagaatgactcactatcgtgaagctgtgttagacaagaaaccttatattgatgctgagcgtgctattttagccactgaagcctatcaaaaacaccaaaataagccagcaaacctcaaacgcgcttacatgcttcaaactattttggaaaacatgaccatctatattgaggatgaaagcctcattgctggtaaccaagcctcttcaaacaaggatgcaccgattttcccagaatacactctggaatttgtcctcaacgaacttgatctttttgaaaaacgagatggggatgtcttctacattaccgaagaaaccaagcaacagctccgagacattgccccattctgggaaaacaataacctgcgtgctcgctgcggtgtcttgctaccagaagaagtgcaagtgtacatggaaacaggtttctttggcatggaaggcaagatgaactctggggatgctcatttagcggttaattaccaaaaactcttggagcatggcttaaagggatttgaagaacgggcacgagctgccaaagctgcgcttgatttgaccattcctgaaaacattgacaaataccatttttacgactctgtttttattgtcattgatgcagtcaaaacttatgctaaacgctatgccaagttggctagagaactagcaaaaacggctaaaccagaacgtcaagcagaattgttagacatcgcgcgcatttgtgataaagtaccttacgaaccagcgaaaacctttgcagaggctgtgcaatctgtctggttcattcagtgtattttgcaaattgaatcaaatgggcattccctatcttatggccgctttgaccagtacatgtatccttatgtcaaagctgatttggaggctggccgtgaaacagaagacacaattgttgaacgtttgaccaacctctggattaagaccttgaccattaataaagtacggagccaagcccacaccttctcatcagcaggtagtccactttaccaaaacgtgacaatcggcggtcaaacacgcgataaaaaagatgcggtcaacccactgtcttaccttgtcctacggagtgtggctcaaaccaaattgccacaacctaacttgactgttcgttaccacaaaggcctagacaatacctttatgaacgaatgtatcgaggtcatgaaacttggttttggtatgccagccatgaacaacgatgaaatcatcattccatctttcatcaaaaaaggtgtctcagaagaagatgcttatgattactcagccattggctgtgtggaaacagcagttcctggaaaatggggctaccgttgcacggggatgagttacatcaacttccctaaaatcttgctgattaccatgaatgacgggattgacccagcatcaggcaagcgctttgcaaaaggacacggtcacttcaaagacatgacctcttatgaagaattaaaagcagcatgggatgccaccctgcgcgaaattacccgcatgagcgtcattgttgaaaatgccattgacctcggtcttgaacgtgaagtaccagatattctttgctcagccttgacagatgattgtatcggtcgtggcaagaccttaaaagaaggcggagctgtttacgactatatctcaggccttcaagttggtattgccaacctatcagactccctagcagcgctgaaaaaattagtgtttgaagaaggtcgcttgaccccagaggaactctggaaggcccttgaaagtgactttgctggagaacgcggagaagacatccgccaaatgctcatcaatgacgcaccaaaatatggtaatgatgatgactacgcagatagtttagtcgtcgaagcttacgacacctacattgatgaaattgccaaatacccaaatacccggtatggccgtggcccaatcggaggtatccgctattctgggacatcatcaatctcagccaatgtcggacaaggaaaagggaccttggcgacaccagacggtcgccatgcaggcacaccactagcagaaggctgttcaccagaacacagcatggacaaaaaaggcccgacttcagtattgaaatctgttgctaaattaccaacagatgagattgtcggaggagtgctactcaaccaaaaagttaacccacaaaccctggccaaagaagaagacaaactgaaattaatggccttacttcgtaccttctttaatcgcctacacggttatcatatccagtacaatgtcgtgtcacgtgagaccttgattgatgcccaaaaacatcctgaaaagcaccgcgacctcattgtccgtgttgccggctactcagctttcttcaatgtgctctcaaaagcaacccaagatgacattattgaacgtacagaacacacactttag

SEQ ID NO: 38599 - DNA, 981 bp, Streptococcus pyogenes
atgaaagaagaacgcagacggctccttgccaaggtggcttacttgcattatgttcaaggcaagagccaaaccttgatttcaaaggaaatgaatatctaccgaacaacggtttgtcggatgttagcaaaagccaaggaagaaggcattgttcggattgaaattgccgactatgatgctgatttatttgctttagaagaatacgtgcgacagcagtatggcttggaaaaactagaccttgtgcccaaccaggttgaagataccccaatggataccttgacaaatgttgctaaaacagcagctgaggtttttagacatgttgttaaagatggcgataagatcggtctgtcctggggagcgactctttcttgcttgatggatgagttaaatccaaaagcgatgaaagatgtgtttatttatcctttggcaggaggacctagccatattaatgccaaataccatgtcaataccctggtttaccgcttggctcgcatctttcatggtaatagcgcttttatgaacgctatggtcattcaagaagacaaacacttggctaagggaatcttacaatctaaatactttaacgacattttaacaagctgggaccagttagatcttgccttagtaggaattggtggggagcctaatagccttgagcagagccaatggcgtgatttattaaccagctcagatcatgaccaactcaaatatgaaaaagccgttggtgaagtttgttgccgtttctttgatcaggcaggtcagccagtttacactggcctacaggatcgaactattggtatttcactagaacagttgaggcgtgtccccaaaacaatggctgttgcaacaggtaaacacaaggctaaggcaatattggcagccttaaaagcaggttttatcaattatctagtgacggataaagagaccatgctagctgttttagcgttagatgaagatattgatcttaataacgttcttctttaa

SEQ ID NO: 38600 - DNA, 177 bp, Streptococcus pyogenes
atgggattcattagcgggacttttaaagtcttaaaagacacaacatggccaaatcgtaaacaacgttggaaagattttatctcagttcttgagtacacagctttctttacggtgattatctacatctttgatcagctcttagcaaagagtgtattagcactgattaatttattctag

SEQ ID NO: 38601 - DNA, 1632 bp, Streptococcus pyogenes
atggcaaaagatattaaattttcagcagatgcgcgtgctgccatggtgcgcggagttgatatgttagcagataccgtcaaagtaacgcttggtcctaaagggcgcaatgttgttcttgaaaaagcttttggttctcccttaattactaatgacggggtaaccattgctaaagagatcgaattagaagatcattttgaaaacatgggagcaaaattggtgtctgaagtggcttctaaaaccaatgatattgctggtgatgggacgactactgcaacagttttgacacaagccattgttcatgaaggactaaaaaatgtgacagcaggtgctaatccaattggtatccgtcgaggcattgaaacagcaacagcaacagctgttgaagccttgaaagccattgctcaacctgtatctggcaaggaagctattgctcaggtcgctgcagtatcatcacgctctgaaaaagttggagagtatatctcagaagctatggagcgtgtgggcaacgatggtgtgattaccatcgaagaatctcgaggtatggaaacagaacttgaagtggttgaaggcatgcaatttgaccgtggttacctgtctcaatacatggtcacagacaatgaaaaaatggttgcagaccttgaaaacccatttatcttaatcacggataaaaaagtgtcaaacatccaagacattttgccactacttgaggaagttcttaaaaccaaccgtccattactcattattgcagatgatgtggatggtgaagcacttccaacccttgtcttgaacaagattcgtggtactttcaatgtggttgctgtcaaagcgccaggatttggtgatcgtcgtaaagctatgcttgaagacattgctatcttgacaggtggtacagtgattacagaggatctaggacttgaattaaaagatgctacaatgacagcccttggacaggctgctaagattacagttgataaagatagcacagtaattgttgaaggttcaggaagttcagaagctattgctaaccgtattgcactgattaaatcgcaattagaaacaacaacttctgactttgaccgtgaaaaactacaagaacgtttggcgaaattagctggtggtgtagctgttatcaaagtaggagctccaacagagacagctttaaaagaaatgaaacttcgcattgaggatgctctaaatgctacacgtgcagccgttgaagaaggtatcgttgctggtggtggaacagcacttattacggttattgaaaaagtagcagctcttgagcttgagggcgatgatgctactggacgtaacattgtgcttcgtgctctagaagagcctgtacgtcaaattgctttaaatgctgggtacgaaggctccgtagttattgacaagttgaaaaacagccctgcaggaacaggatttaatgctgcaacaggtgagtgggttgatatgattaaaacaggaatcattgaccctgtcaaagtaacacgatcagcgcttcaaaatgcagcttctgtagctagtcttattttgacaacagaagcagttgttgctaataaacctgaaccagctacgccagcgccagcaatgccagcaggtatggatccaggaatgatgggcggcttctaa

SEQ ID NO: 38602 - DNA, 2445 bp, Streptococcus pyogenes
atgattatgtattcaacgaagatgcaagacatttttagacaggcgcagttccaagctgctcgctttgatagccattgcctggaaacttggcatgttttgttagctatggtagctgtagataattctttagcaaatatgattttaagtgaatatgatgcccaagtcgccatagaagaatatgaagctgcagctattttagccatgggcaaaacccctaaagaacagttgtctcgtgtagacttcagacctcaatctaaaactttgactaacttgttagcttttgcgcaggctattagccaaatcactagggatcaagaagtcggctctgagcatgtcttatttgctattttattgaatccagatattatggcgagtcgtttgttagaaatagctggctatcagataaaagataacggcaatgggcagccgcgattagctgacttgcgaaaagcaatagaacgtcatgcaggttacagtaaggaaatgatcaaggctattcacgaactacgtaagcctaaaaaaacgaaaacacaagggaccttttcagatatgatgaagccaccaagtacagctggtgagttgagtgatttcacaagagatttgactgaaatggcaagacaaggtttgttagaatcggtgattggacgtgaccaagaagtatctcgtatgattcaggtactaagtcgtaaaacgaaaaacaatcctgtcttggtaggtgatgcaggtgttggtaaaactgcgcttgcttatggccttgctcaacggattgcaaatggcgctattccttatgaacttaaggagatgcgtgtcctagaattagacatgatgagtgtggtagcaggaacccgttttcgtggggattttgaagagcgcatgaatcaaatcattgatgatattgaagctgatggtcagattattctttttgttgatgaactacatactattatgggttctggcagtggtattgacagtacacttgatgcggctaacattttaaaaccagcattatcgcgcggcactcttcatatggttggagcaacaactcaagaagaataccaaaaacatattgaaaaagatgcagctctttcgcgtcgttttgctaaaatattaattgaagaacctaatacagaagatgcttatcagattttgatgggcctaaaattatcttatgagacctaccataatgtctcgatatcaaatgaggcagttaaaacagctgtaaaaatggcacaccgttatttaaccagtaaaaatctccctgattcagctatcgatttactagatgaagctagtgctgctgtgcaaaacatggtgaaaaaatcagcacctgagactttaacaccaatagaccaagctcttatcaatggtgatatgaaaaaagtatctcgcctcttagctaaagaagcaaaaggtcagatgagaaaaccaacaccggtgacagaagatgatattttggcaaccttgagtaagttatcgggaattccacttgaaaaactgacgcaagctgatagtaaaaaatacctcaatttagaaaaagaactgcataagcgtgtgattggtcaggatgctgctgttacggctatttcaagagccattcgtcgtaatcagtcaggtattcgaacaggaaaacgtcctattggatcatttatgtttcttggcccaacaggagtaggtaagacagaactagcaaaggcccttgcagaagttctctttgatgatgaagcagcgcttattcgttttgatatgtctgagtacatggaaaaattcgcagcgtctaggcttaatggagcacctcctggttatgtcggctatgatgaaggaggtgaactgacacagaaagttagaaataaaccttattcagtcttgctttttgatgaagtggaaaaagcacatcctgatatttttaacgttctccttcaagtattagatgatggtatattgactgatagtcgtgggcgtaaggtcgatttttcaaatactattattatcatgaccagcaatcttggcgcaacagccctgcgcgatgataaaacggtcggttttggggtcaaagacattcaccaagaccatcaagctatggagaaacgtattttagaagaattaagaaaaacttaccgcccagaatttatcaatcgtattgatgaaaaagtggtctttcatagtctgacccaagataacatgcgcgatgtggttaaaatcatggtacagcccctgattactacattggcagaaaaaggtattacccttaaaattcagcctttggccttgaaacatttgtccgaggtcggctatgatgagcatatgggggcaagaccattacgtcgaacgctgcaaactgagatagaagataagctatcagagcttattctttctcgagaattgacaagtgggcatacgctaaaaattggattatcacatggcaaattaacgtttcacatagcttaa

SEQ ID NO: 38603 - DNA, 561 bp, Streptococcus pyogenes
atgtctctaattggaaaagaaattgctgaattttcagctcaagcttatcacgatggaaaattcatcactgttacaaatgaagacgttaaaggaaaatgggcagttttttgtttctacccagcagacttttcatttgtttgcccaactgaactcggtgaccttcaagagcaatacgaaacactgaaatctcttggtgtagaagtttattctgtctctactgatactcattttgttcataaagcttggcatgatgattcagatgtggttggcactatcacataccctatgattggtgacccttcacaccttatttcacaagcctttgaagtgcttggcgaagacggacttgctcaacgtggaacatttatcgttgatccagatggtattatccaaatgatggaaattaatgctgatggtattggacgtgacgctagcaccttgattgataaaattcacgctgcccaatacgtccgtaaacatccaggtgaagtttgtccagctaaatggaaagaaggcgctgaaactttgacaccaagtcttgatttagttggtaaaatttaa

SEQ ID NO: 38604 - DNA, 1287 bp, Streptococcus pyogenes
atgttaaaaaaggaggtttttatggttgctgatgtcttattaacacattttaatcaactattttgtctaaatgatccaggtcatcctttaactggtcaagaaatgaaaaaagccactatcgttgaagatggctatatagccatcaaagacggcctcattgtggctcttggttctggtgaaccagatgctgagcttgtcggtacacagactattatgcgttcttataaaggtaaaattgcaacgcctggtattattgactgtcatacccatttggtctatggtggcagtcgtgaacatgaatttgccaagaaattagcaggggtgtcttacttggatattttagctcaaggtggtggtattttaagcacggtgagggccactcggtcagccagctttgacaacctttatcaaaaatccaagagattgctagactacatgttgcttcatggagtgactactgtcgaagcgaaaagtggctacggccttgattgggaaacagaaaaacgccaactggatgttgttgctgctttagaaaaagaccatcccattgatttggtgtctacgtttatggcagcccatgcgattcctgaagaatacaaagggaatcctaaggcttatctcgatgtgattatcaaggatatgcttcctgttgttaaagaggaaaatctggcagaattttgtgatattttctgtgaaaaaaatgtttttacagctgatgagtctcgctatctgttaagcaaagccaaagaaatgggcttcaagcttcgtattcacgcagatgaaattgcgtctataggcggagttgatgtcgcagcagagctcagcgcagttagtgcagagcatttgatgatgataacagatgatggtatcgctaagttgattggtgctggtgttattggtaatttgcttccagccaccacctttagtttgatggaagacacttatgcccctgctcgcaaaatgatcgatgctggcatggccatcaccctctcaacagatagtaatccaggcagttgcccgactgctaacatgcagtttgtgatgcaattaggttgttttatgttacgtttaacaccgattgaagtcttaaatgctgttaccattaacgcggcctactctgtcaatcgtcaggagagagttggtagtttgacagttggtaaagaagcagatattgccatttttgatgccccaaatattgattacccattttatttctttgccaccaacttgattcaccaagtctataaaaaaggacaactcacagttgaccgaggtcgtattctttaa

SEQ ID NO: 38605 - DNA, 2031 bp, Streptococcus pyogenes
atgtcattttacagtgaaactgacatagctgccgctatgactgttaagttagacgatgttttaccggaaaagactgtgtttgaagaaggtatccgaagagcaccagacagaggttttcgattgacccaggctcagaccgaaatcgccttgaaaaatgccctacgctatgtacctacgaagttccacgaagaagtcattccagaatttttggaagaactcaaaacccgtggccgtatttatggctaccgctttagaccaaaagaccgcatttacggcaaacccattgacgagtacaagggaaattgtacagctgccaaggccatgcaggtcatgattgacaataacttgagttttgaaattgccttgtacccttacgaactagtcacatatggagaaactggttctgtttgtgccaactggatgcaatattgtttgattaaaaaatacctagaagtcatgactgatgaacaaaccttggtggttgagtctggtcatccagttggtcttttcaaatccaaacctgaagcgcctcgtgtgattattactaatggccttttggtgggtgaatacgacaacatgaaagactgggaaatcgctgaagagatgggtgtcaccaactatggtcaaatgaccgcaggtggttggatgtatattggcccacaaggaatcgttcatggaacgtttaataccctcttaaatgctggtcgtctcaaacttggagtggctgatgacggtgatttgaccggtaaactcttcatctcatctggtctaggaggcatgagtggggcacaaggtaaggctgctgaaattgctaaagcagttgccattattgctgaagttgaccaatctcggattaaaacccgtcattctcaaggctggatcagtcaaattgccgaaagccctgaagaagctctgcaattagcccaaaaagccatagatgctaaggagtccacttcgattgcttaccatggtaatatcgttgatcttttagagtacgtcaatgacaagcagattcatgttgatcttttgtctgaccaaacctcttgtcacaacgtttatgacggtggctactgcccagtaggtattagctttgacgaaagaacccggctcttggcagaagataaagataccttccaccaaatggttgatgataccttggcacggcattttgaagctattaagacgttaactgaaaatggcacctatttctttgactacggcaatgcctttatgaagtctgtttacgactctggtattacagaaatttctaagaatggtcgtaacgacaaagacggatttatctggccatcctatgtggaagatatcatgggacctatgctttttgactatggctatggacctttccgttgggtctgcttgagtggtaatcacgatgacttggtggccactgacaaagctgccatggaagctatcgatcctgaccgccgctatcaagaccgtgataactacaactggattcgtgatgctgagaaaaatcaactcgtagttggtacccaagcccggatcctttaccaagactgtatcggtcgtgtgactatcgcccttaaatttaatgaattggtccgcaaaggcaagattggtcctgtcatgattggtcgtgaccaccatgacgtgtctggtaccgactcaccatttcgtgaaacctcaaacattaaagacggttccaatgtgacctgtgatatggcggtgcaatgttacgctggtaacgctgcgcgtggtatgagtttagtggctcttcataacggtggcggaactggtattggtaaagccatcaatggtggtttcggacttgttttagatggcagcgaacgcattgatgagattattaaatctgctattgcttgggacaccatgggtggtgttgctcgtcgcaattgggctcgcaatgagcacgctattgaaaccgctattgagtataatcgtctccatgcaggtactgatcacatcactatcccatacttggctgatgatgaccttgtgacttcagcagtagatcaattatttcactaa

SEQ ID NO: 38606 - DNA, 1674 bp, Streptococcus pyogenes
atggttttatcagatattgaaatagccaactctgtcactatggaacctatcagtaaggttgccgatcaattagggattgacaaggaggcgctctgtctctatggtaagtacaaggcaaaaattgatgcccgtcaactggtcgccttaaaaaacaaacctgatggcaaactcattcttgtcactgctatctcaccaacaccagctggtgaaggcaaaaccaccacttctgttggattggtagatgctctttctgccattggaaaaaaagcagttattgcccttcgtgaaccttctcttggtcctgtttttggggttaagggaggagctgctggcggtggccacgcgcaagttgtcccaatggaagacatcaaccttcactttacaggggactttcatgccatcggtgtcgccaacaacttattagctgccttgattgataaccacattcaccatggcaatagcctaggcattgattccagacgtatcacttggaaacgtgtggtggatatgaatgaccgccagcttcgtcatattgttgacggcttgcaaggcaaggtcaacgggattcctcgtgaagatggttatgacattaccgtcgcctctgaaatcatggcaatcctgtgcctatccgaaaatatttctgacctcaaagcccgccttgaaaaaatcatcatcggttacaactaccaaggtgaacctgtaacagctaaagacttgaaagctggtggtgccctagccgctctgctcaaggatgcgattcatcctaatctcgtgcaaaccctggaacacacaccagccctcattcacggtggcccatttgctaatatcgcccatggctgtaatagtgtcctcgccaccaaactagccttgaaatatggtgattatgccgttaccgaagctggatttggcgctgaccttggagctgaaaaattcattgacatcaaatgccgcatgtcaggccttcgcccagcagccgttgtcctagtagccactatacgtgcccttaaaatgcatgggggtgtgccaaaagcagacctggctactgaaaatgttcaggccgttgtggatggtttacctaaccttgacaaacatttggctaatatccaagacgtctatggccttccagttgtcgtggcgatcaataaattcccgcttgataccgatgccgaattacaagctgtctatgatgcctgcgacaaacgtggcgttgacgttgtgatttctgatgtttgggcaaatggcggagctggtggccgtgaactggctgaaaaagtcgtgacactagccgagcaagacaatcaattccgctttgtttatgaggaagacgatagcattgaaaccaaactgactaaaatcgttaccaaagtttacggtggtaaaggcatcaacttgagctcagcagccaaacgtgaactggctgacttagaacgcctcggctttggcaactacccaatttgcatggccaaaacccaatattccttctcagacgatgccaaaaaacttggcgcaccaactgactttacagtgactattagcaaccttaaagtgtccgcaggagcaggatttatcgttgccctaacaggtgctatcatgaccatgcctggccttccaaaagtacctgccagcgaaacaattgatattgacgaggagggcaacatcacaggactattctaa

SEQ ID NO: 38607 - DNA, 1542 bp, Streptococcus pyogenes
atgacaagagtgattaatttagatggcgaaagccttactatcgaagacgtgattgcgattgctcgccaaggcgtagcctgtcacattgatgatagtgctattgaagctgtgaatgcctctcgtaaaattgttgatgacattgtcagtgaaaaacgggtggtttacggggtgaccaccggttttggatccctttgtaacgtgagcatctcaccagaagatacagttcaactccaagaaaatttgattcgtacccatgctagtggatttggtgacccattgccagaagatgccgtgagagctatcatgctgatccgtatcaattcactagtcaaagggtattctggtattcgtctatccaccattgaaaaactgttggaactgctcaataaaggggttcatccttacattcctgaaaaagggtctctaggggcttcaggagatttggcgccgcttgctcacatggtgcttcctatgcttggtctagggaaagcttactacaaaggagagcttctttctggtcaagaagctcttgataaagctggtattgacaagatttctttagccgctaaagaaggactcgcccttatcaacggaacaactgttctcactgcagtcggtgcccttgcaacctatgacgccattcaattattgaaactgtcagacctagctggtgccctatcccttgaagtgcataacgggattactagtccatttgaagaaaaccttcacaccattcgcccacaaagcggccagttggcaacagcccgcaatatccgaaacctccttgaaggcagccaaaacacaaccgtagctactcaatctcgtgtgcaagacccttacaccttgcgctgcatgcctcaaattcatggggctagcaaagacagtatcgcctatgtcaaatccaaagttgacattgaaatcaattctgtcacagataatccaattatctgtaaagatggccacgttatttcaggaggtaacttccacggagaaccaatggcacagccatttgacttcttaggcatcgccatttctgaaattggaaatgtttctgaacgccgcgtggaacgtttggtcaatagccagctcagcaaattgccatccttccttgtcaaatacccaggtctcaattcaggctttatgattacccagtacgcctgtgcctctcttgcttctgaaaacaaggttttggcacatccagccagtgtggattctatcccatcttgtgagaaccaagaagactttgtcagcatgggcaccaccgctgctcgcaaggcctttgaaatccttaaaaattctcgccgcatcgtggctactgaaatcatggcagcctgccaagcccttgatctcaaacctgaaaatcatgaactaggtaaagggactaaggttgcctacgatctcttccgcaaggaagtcaactttatcgaacacgataaacacatcgaaatctacgatgaactaaacaaggcatcagcagtcattgaagacccaagcttcctcgaagcggttgagcaggcagttgagttgagtatccaattttag

SEQ ID NO: 38608 - DNA, 987 bp, Streptococcus pyogenes
atgctagaagattactacccatccaccactagctattatcatggtgggatcgacgatgacttatatactgccaaatggggcatggtcatgactttccttgaccttaacgacagctcactaaccccatttgaagggacacattttgccttgattggctttaaaagtgataagggggtttatatcaataatggtcgtgtcggagcggtcgaaagtccagctgccatacgaacccagctcgccaaattcccttggcatttaggaaaccaagttatggtttacgatgtgggtaacattgacggccccaatcgctctttggaacaactgcaaaacagtttaagcaaagccatcaaacggatgtgtgacctcaatctcaaacccatcgtcttaggaggtggccatgaaaccgcctacggccactacttaggcctacgccaaagcctatccccaagtgatgacctagctgtcatcaatatggacgcccactttgatttaaggccttacgaccaaacaggccctaattcagggacaggctttcgacagatgtttgacgatgcggttgctgacaaacgcctctttaaatacttcgttttaggcattcaagaacataataacaaccttttcctatttgactttgtggcaaaatccaagggcattcaatttttaacaggtcaagacatctaccaaatgggccatcaaaaggtctgccgagccattgaccgtttcttagaagggcaagaaagggtctacctgaccattgacatggattgtttctcagttggtgctgcgcctggggttagtgctatccagtccctcggtgttgacccaaatcttgccgtcttagttttgcaacacattgcagctagcggaaaattagttggctttgatgtggttgaggtttcaccaccacacgatattgataaccacaccgccaatttagcagccacctttatcttttacctcgtacagattatggcacaacatagctaa

SEQ ID NO: 38609 - DNA, 768 bp, Streptococcus pyogenes
atggcagtaatttcaatgaaacaacttcttgaggctggtgttcactttggtcaccaaactcgtcgctggaaccctaagatggctaaatacatcttcacagagcgtaacggtatccacgttatcgatcttcaacaaactgtaaaattagctgaccaagcttacgaatttgttcgtgatgctgcagcaaacgatgctgtcatcttgttcgttggtactaaaaaacaagctgctgaagcagttgctgacgaagcaacgcgtgcaggccaatacttcatcaaccaccgttggttgggtggaacgcttaccaactggggaactatccaaaaacgtatcgctcgtttgaaagaaatcaaacgtatggaagaagaaggaacctttgacgttcttcctaagaaagaagttgcacttcttaacaaacaacgcgctcgtcttgaaaaattcttgggcggtatcgaagatatgcctcgtatcccagacgtaatgtacgttgttgacccacataaagaacaaatcgctgttaaagaagctaaaaaacttggtatcccagtcgtagcgatggttgatacaaacgctgatccagatgatatcgatatcatcattccagctaacgatgacgctatccgcgccgttaaattaatcactgctaaattagctgacgctattatcgaaggccgtcaaggtgaagatgcagacgttgcttttgaagctgacactcaagcagattcaatcgaagaaatcgttgaagttgtcgaaggcgacaacgcttaa

SEQ ID NO: 38610 - DNA, 1041 bp, Streptococcus pyogenes
atggcagaaattacagctaagcttgtaaaagaattacgtgaaaaatctggtgctggcgttatggacgctaaaaaagcacttgttgaaacagatggtgacatggacaaagccgttgaacttcttcgtgaaaaaggaatggctaaagcagctaaaaaagctgaccgtgttgccgctgaaggtttaacaggcgtttacgttcatggtaacgttgctgctgttgttgaagttaacgctgaaacagactttgttgctaaaaatgctcaattcgttgaattggtaaacgcaactgctaaagttatcgctgaaggcaaaccagctaacaacgatgaagcacttgcacttgttatgccttcaggtgaaactcttgctgaagcttacgttaatgcaactgctaccatcggagaaaaaatctcattccgtcgttttgctttgattgaaaaagcagatgagcaacacttcggtgcttaccaacataatggtggccgtatcggggttatctcagttgtcgaaggcggcgacgatgctcttgctaaacaagtatcaatgcatatcgctgcaatgaaaccaactgttctttcatacactgagcttgatgcacaattcatcaaagatgaacttgctcaattgaaccacgctatcgaacttgacaacgaatctcgtgcaatggttgataaaccagctcttccattcttgaaatacggttcaaaagctcaattatcagacgatgtgattactgctgctgaagcagacatcaaagctgaacttgctgctgaaggcaaaccagaaaagatctgggacaaaatcatcccaggtaaaatggaccgcttcatgcttgacaacactaaagttgaccaagcttacactcttcttgcacaagtttacatcatggacgacagcaaaactgttgaagcttaccttgactcagtaaacgctaaagcgattgcttttgcacgttttgaagttggtgaaggtatcgagaaaaaagctaacgactttgaatcagaagttgcagctactatggctgctgcccttaacaactaa

SEQ ID NO: 38611 - DNA, 714 bp, Streptococcus pyogenes
atgacaaagtatgaacgtatttataaagacctcgaaacaaaaataaacaaagacttttacaaagaaggggattttttacctactgaaatagaattgagtcaacaataccaagctagccgagataccgtccgcaaggctctctcacttctcacaaaggcaggtcttatcctcaaaaaacaaggacgtggcacccaagtgattagacatcatcagatcatgttccctatctcagaactaactagttatcaggaactcgtctcttactcaaatctagattctaagaccaacgtcattgccattgataaactgattgtggatgagacactttcaaaattgaccggttttagcaaaaacagcttggtctggcgtgttacacgccaacgcgttgttgagggtgtggcttccgtcttagacattgattaccttagtaaaactttggtgccaataatgacaagggaaatcgcagagcattctatttatcaatatttggaaaaggaactccatctcgccattgactttgccctcaaagaggttaccattgaccaaataaccgatcgtgataaaattttacttgaccttggatcagaccaacatgttgtttccgtcaaatccaaagtctacctttccaataataaccaattccaattcaccgagagtcgccataaactggaaaaatttaaatttttagattttgctcggcgcagaccaaaataa

SEQ ID NO: 38612 - DNA, 858 bp, Streptococcus pyogenes
atgatatacccttacaactcaaccatctctttaggaacggtttctctaaatgttaccgatctagcaaagatgacaaccttttacacaagtattatcggtttacaggttctctcacaagacacgacatctcgtcaattgactacagacggtaaaaccgttatcttagagttacgacaaacacctttaccaggcgataaagcttatggtctttatcacacagcctttttagttcctgatcgtcatagcttgggacttgttctcaatcatttcttaaccagaagtatctctttagaaggagcagctgatcacggccatagcgaagctatctacctcagcgatcctgagggtaatgggattgaaatttatcatgacaaagctgttgagcattgggatatccgcgacaatggtcaaattattggtgtgactgagcccacggataccaaaagcatattggagcagttgacagatatccccaagcactttttactagctcaagacacacgcattcgccatgtccatctgagtgtcaaaaatgctctggcttcttcacttctctatcaaaaggtttttgatttaggcgataaaatgaccattccaagtgctagctggattgcttcagggaactactatcatcaccttgcattcaatcactggtcagccccttacctcaaaaaacaccaagaaggtgctccaggcttagccttcttgaccattcacattgagacgcccctgcttttttcagccactctcaaaaaagcaagattacacggcctagctattttacaagaagattcttcttctttcacgacagaagacgaggaaggtatccgtgtgaacgtcatccttggacaagactag

SEQ ID NO: 38613 - DNA, 615 bp, Streptococcus pyogenes
atggcagaaaagtgttggaataatcctaagccaaaggaatggcaggcagaggagttaagtcaaggccggattattgactataaggcttttaactttgttgatggtgaaggggttcgtaattccctttatgtgtctggttgtttattccattgcaaggggtgttataatgctgcgacttggtcttttaaggcgggaatgccttatacgcaagaacttgaagagcagataatgacggatttggcacagccttatgttcagggactgacacttttaggtggagaaccctttttgaatacgggtatcttaattcctctgattaagcgtattcggcgtgaattgccagaaaaagatatttggtcttggacgggttatacttgggaagaaatgatgcttgaaacaccagacaaactggaaatgctgtccttaattgatattctggtagatggtcgttttgatatcacaaaaaagaacctcatgttgcaatttagaggctcttctaaccagcgaattatcgatgttcaaaagtctttggctgctaaagaagtgattatctgggataagttaaacgatggggaccaaacctttgaacaaattagtcgggaggatttgctttaa

SEQ ID NO: 38614 - DNA, 936 bp, Streptococcus pyogenes
atgcttaatattgggattgtgggactaggtgctatttcacaaaaagcctatttaccatatatgagacagctgagtgacattacttggcatctatcaacgcggaatgcagcagtacgtcagcaggtcggtcagttatttggtcacgctattctttacagtgatgtcaaggagttgtcaaaaacaaacttagatggggtctttattcatgcggccacatcggcccacgcagagttggctagtttatttttaaatcaggggatcccagtctttatggataaacctatagctgacaattacctgatgacaaagaacctctatgacttagccaaagaaaatcagacttttctgatggcaggatttaacaggcgttttacacctcgtgtcaagaagttgtcaagtttgtcaactaagcgtaaagtggctgttgaaaaaaatgacttgaaccggccaggagatatgacttttaagctctttgatttctttatccatcctttagatacagccttattcttgacagaagggaccttactaaaagggcattttcaatatcatctggaagcaggcttactgagtcaagttatggtaaccttgatgaccgaaagcatgacgactacagcttctatgaatttacaatcagggagtcgccgtgaggtaatggaagttcaacgggctgaagaaacttatcatttagagaacttagacgagttatctatttataaaggtactgaaaaaagggtgcttggctttgcttcttgggacactaccttgcacaaaagaggttttgaaacaatgatcgatgcctttttagaagctattagcacaggcgtcaatcctgtcagccctgagtctagtcttttaagccactggatttgtcaacagattgctgactctcagctttcttatggagagttaacggtagagttgcctaaggattag

SEQ ID NO: 38615 - DNA, 306 bp, Streptococcus pyogenes
atgacacataatcatgaaaatgaccaccaacacgaagttatcacacttgtggatgaacaaggaaatgaaaccttgtttgaaattttattaacaattgatggtcgtgaagagtttggtaaaaattatgttctcttggttccagcgggatctgaagaagatgagtctggtgaaattgaaatccaagcctattcatttactgaaaatgaagatggtactgaaggggatttacaaccgattcctgaggattcagatgctgaatgggatatgattgaagaggtatttaatagttttctagatgagaactaa

SEQ ID NO: 38616 - DNA, 420 bp, Streptococcus pyogenes
atgagaataatgggacttgatgttggctcgaaaacggttggtgtagctattagtgatcctcttggctttacagcccaaggacttgaaattatcaagattgatgaggaaaaagcagaatttggctttacacgtttagaagagcttgttaagcagtaccaagttgaacagtttgttattggattgccaaaaaatatgaataacaccaatggtccacgtgttgatgcaagtataacttatggaaaccacatagagcacctctttggacttccagtccattatcaagatgaacgattgacgactgttgaggcaaagcgtatgcttattgagcaagctgacattagtcgtggtaagcgaaaaaaagtcattgataaattagctgcacaactcattttacagaactatttaaatcggaatttttaa

SEQ ID NO: 38617 - DNA, 270 bp, Streptococcus pyogenes
atgggatttacagatgaaacagtccgctttaagttggatgatggcgacaaacgacaaattagtgaaacattaacagcagtctatcattcacttgatgaaaagggttataatccaattaatcaaattgttggttatgtcttgagtggggacccagcttatgttcctcgttataatgatgctcgaaatcagattcgtaaatatgaacgtgatgaaattgtagaagaacttgttcgctactatttacaaggaaatggaattgatgttaaatga

SEQ ID NO: 38618 - DNA, 1137 bp, Streptococcus pyogenes
ttggcaaaaaaattaaaaaagaatgaagaaatcactaagaagtttggtgacgaacgtcgcaaagcccttgatgatgctttgaaaaatattgaaaaagattttggtaagggtgcagtgatgcgattaggagaacgtgcagagcaaaaagttcaggttatgagttcaggaagtctagctcttgatattgcgcttggagctggtggttatcctaaaggacgtatcatcgaaatctatggtccagagtcttccggtaaaacgactgtggctttacatgctgtagcacaagctcaaaaagaaggtggaatcgcagcctttatcgatgccgagcatgcgcttgatccagcttatgctgctgcgcttggggttaatattgatgaactcctcttgtctcaaccagattctggagaacaaggacttgaaattgcaggtaaattgattgattctggtgcggttgatctggttgttgtcgattcagtagcagctttagtgccacgtgctgaaattgatggtgatattggcgatagccatgtcggattgcaagcacgtatgatgagtcaggccatgcgtaaattatcagcttctattaataaaacaaaaactatcgctatctttattaaccaattgcgtgaaaaagttggtgtgatgtttggaaatcctgaaacaacaccaggtggtcgagctttgaaattctatgcttctgttcggctggatgtgcgtggaacaactcaaattaaaggaactggtgaccaaaaagatagcagtattggtaaggagaccaaaatcaaggttgttaaaaacaaggtcgctccgccatttaaggtagcagaagttgaaatcatgtatggggaaggtatttctcgtacaggggagcttgtgaaaattgcttctgatttggacattatccaaaaagcaggtgcttggttctcttataatggtgagaagattggccaaggttctgaaaatgctaagcgttatttggccgatcacccagaattgtttgatgaaatcgaccttaaagtacgtgttaaatttggtttgcttgaagaaagcgaagaagaatctgctatggcagtagcatcagaagaaaccgatgatcttgctttagatttagataatggtattgaaattgaagattaa

SEQ ID NO: 38619 - DNA, 1983 bp, Streptococcus pyogenes
atgacaaacattattgaattaccggaagttctcgccaaccaaattgcagctggtgaagttgtagaaaggccagcgagtgttgtcaaggaattggttgagaatgctattgatgctaaaagtagccagattaccgttgaaattgaagagtctggccttaagatgatacaggttacagacaacggtgagggaatgtctcatgaagatttacctttaagtctgcgtcgccacgctactagtaaaattaagagtcagagtgatttgtttagaattagaacacttggcttccgtggagaggctttaccgtctgttgcctctatcagtaaaatcacgataaaaacagcaacaaaagaagtcactcacggttctcttcttatagctactggtggggaaattgagacacttgaagcgatctcaactcctactggaaccaaaattaaggttgaaaaccttttttacaacacgcctgctcgtctcaaatatatgaaaagtttacaggcagaattagctcacattgtagatgtggtcaaccggttgagtttggcacatccagaagttgctttcacactgattagtgatggtcgccaattaactcagacatcaggaactggcgatttacgccaagcaattgcagggatttatggtttgaatactaccaaaaaaatgctggctatctctaatgctgatttggattttgaagtttccggctatgttagcttgccagagttgacacgcgccaaccgtaattacatgacgattttggttaatgggcgttacatcaagaatttcttgcttaatcgagcaattcttgatggttacggttctaagctcatggttggacgtttcccaattgttgtgattgatattcagattgatccctatttggccgatgtcaatgttcaccccacaaaacaagaggttcgtatttcaaaagagcgtgaattaatggctttaattagcacggctatttcagagagtcttaaggaacaagatttgattccagatgctctggaaaatttagccaaatcaagcacacgacatttctctaaaccagagcaaacacaacttcctttacagtctaggggactttattatgatcctcaaaagaatgacttttttgtcaaagagtcggctgtctcggaaaaaatacctgaaactgatttttattccggcgctgttgacaacagtgtaaaggttgaaaaagtagagctgttaccccactcagaagaagttataggaccttcttcggttaaacacgcaagtcgtccccagaatacctttaccgagactgatcatcctaatcttgacttaaaaaacagacaaaagttatctcaaatgctaacccgtttggaaaatgaagggcaatcagtgtttcccgaattggattattttggtcagatgcacggaacttatctctttgctcagggaaaagatggtttatttataattgaccaacacgctgcccaggagcgggttaaatacgaatattatcgtgataagataggtgaggttgacagtagtttacagcaattgttggtgccctatttgtttgagttttctggttctgatttcattaacttacaggagaaaatggcactcttaaatgaagttggtatcttcttagaagtttatgggcacaatactttcattttgagggagcatcctatctggatgaaagaagaagagattgcatctggtgtctatgaaatgtgtgacatgttacttctaaccaatgaggtatctattaaaacttaccgagcagagttagctattatgatgagttgtaaacgatctatcaaggcaaatcatagcttggatgattattcagcaagaaatctgctactgcaattggcccaatgtcaaaatccttataactgccctcatggtagacccgtattgattaattttagtaaggcagatatggaaaaaatgttccgtcgaattcaagaaaatcacactagcctgcgagagctaggaaaatattag

SEQ ID NO: 38620 - DNA, 363 bp, Streptococcus pyogenes
atgagcgctaaagaacaacttaaagaattgaaaccacttttcgctttaataaccttatttgaggaacaacgagataaagacatcaagctgataaatgcttttcataatcctgaagcaataagacatatcgaaaaaggtacagctaaacaactcttatatttagctaaagaacgtgacaagagactggccatgatcgccacactccaagatgagagacagatagccgttattaaggctagatacgtggatgacttatcatgggacgagatactcgataaactaggttactcaataaacactgtgttcaaactacatagaaaagctttagaggtattagatgaacaagaagaacgctattcgtaa

SEQ ID NO: 38621 - DNA, 2556 bp, Streptococcus pyogenes
atggcaaaaactaacatttctcctggaatgcaacagtatctggacatcaaaaaagattatccagatgcttttttgctttttaggatgggtgacttttatgaattattttacgaggacgctgtcaaagcagcacaactcttagaaattggtttgaccagtcgcaacaagaatgcggaaaatccaattcctatggcaggcgtgccacatcattctgcccaacaatacattgatgtgttaattgagttgggttacaaggttgctgtcgcagaacaaatggaagacccaaagcaagctgttggggtggtgaagcgtgaggtcgttcaagtcataactcctggaacggttgtggattcagctaagccagatagcgccaataactttttggtagctgttgactttgatggttgccgttatggattggcttatatggatgtatccacaggtgaattttgcgtgacagatttggcggactttacgagtgttcgtagcgaaatccaaaacctcaaggcgaaagaagtcttactaggttttgatttatctgaagaagaacagacgattttggtcaagcagatgaatttgctgctttcttatgaagaaacggtctatgaagataaatctttaattgacggccaattgacaacggtagaactgacagcggcaggaaaactcttgcaatacgttcacaaaacacaaatgcgagaactcagccacttgcaagcattggttcactatgagatcaaggattatttgcagatgtcgtatgccactaagtcaagtttagatttggtagaaaatgctaggactaataaaaaacatggaagtctctattggctgttagatgaaaccaagacagctatggggatgaggcttttgcgctcatggattgatcgacctttggtttctaaagaagctattttagagcgtcaagaaattattcaagtttttctgaatgcttttattgagcgaaccgatttaagcaatagtttaaaaggtgtttacgacatcgaacgcttatctagtcgcgtgtcttttggcaaggcaaatccgaaagatttacttcaattggggcataccttagctcaagtgccttatatcaaagctatcttagagtcttttgacagtccttgtgttgacaaacttgtcaatgatattgacagtttgcctgagttggaatacttgattagaacagccattgatccagatgcaccagcaactattagtgaaggaagtattatccgcaatggttttgatgagcgcttggaccattatcgtaaagtaatgcgagaggggacaggctggattgcggatattgaggccaaagagcgtcaagcaagtggcattaataacctaaaaattgattacaataaaaaagatggttattattttcacgttacgaattcaaatcttagcttagttcccgagcattttttcagaaaggcaactttaaaaaattctgaacgttatggaacagcagaattggctaagattgaaggtcagatgttagaggctagggaagagtcatctagtttagaatacgatatttttatgtgtattcgagctcaagttgaaacctatattaatcgtttacagaaactggctaaaattttggcaacggtagatgttttgcaaagtttagcagtcgttgctgaaaccaatcattatatccggccgcagttcaatgataatcatgtgattacaattcaagaaggtcgtcacgcggttgttgaaaaggttatgggagtgcaggaatacattcccaatagtatctcttttgaccaacagaccagtattcagctgattacaggtccaaatatgagtggtaagtcgacttatatgagacagctggccttaacggttatcatggcccagatgggttcatttgtggctgctgatcatgttgatttacctttatttgatgcgatttttacgcgtattggggctgctgatgatttgatttctgggcaatcaacctttatggtggagatgatggaagcaaaccaagcaatcaaacgcgcaagtgacaactctcttattctatttgatgaactgggacgaggcacggcaacttatgatggtatggctttagcccaggcaattattgaatatatccatgatagagttggtgctaagaccatatttgcaacgcattatcatgaattgacagacttgtcaactaacttgacaagtctagtcaatgttcatgtagcaacgcttgaaaaagatggcgatgttaccttccttcataagattgctgagggaccggcggataaatcttacggtattcatgtggcaaaaatagcaggactgccaaaatccctattaaagagagcagacgaagttctgacccgtttagaaacacagtcacgatctactgagataatatcagtcccttcacaagttgagtcaagcagcgctgttagacaggggcaattatccctttttggtgatgaagagaaagctcatgagattaggcaagcactggaagttattgatgtcatgaacatgaccccgcttcaagcaatgacaactctttacgaattgaaaaagttgttatag

SEQ ID NO: 38622 - DNA, 1692 bp, Streptococcus pyogenes
atggatactaaaactctaatcgcaagtgaaatagctaaagttgttccagaattagaacaagatgctatttttaacttgcttgaaaccccaaaaaattctgacatgggagaccttgcctttccagcttttagcttagcaaaagtccttcgcaaagcccctcaaatgattgctagcgagttagctgaacagattgatgagagccaatttgaaaaagtcgtagctgtcggcccttacatcaactttttccttgataaagctaagatttcctcacaggtccttgaacaagtgattacagcaggttcagactatgctcagcaagacgaaggtcaagggcgaaatgttgctattgacatgtcaagcccaaacatcgctaagccattttcaatcggtcacctccgctcaacagttattggtgatagtctcgctcacatttttgccaaaatgggctataaacctgtaaaaatcaatcaccttggtgactggggtaaacaatttggtatgctcattgttgcctacaaaaaatggggagatgaagctgctgttcaggcacatcctattgatgaactcttaaaactttacgttcgtatcaatgctgaagctgaaactgatcccaccgttgatgaagaagctcgtgaatggttccgtaaattggaagatggcgacaaagaagctactgaattatggcaatggttccgtgatgaaagtttacttgagttcaaccgactttatgaccaattacatgtcaccttcgatagttacaacggtgaggccttctataatgacaaaatggatgaggttcttgacttattagaagctaaaaaccttcttgtagaatctaaaggtgcccaagttgttaatcttgaaaaatatggtattgaacaccctgccttgatcaaaaaatcagatggcgctactctttacattacccgtgacctagctgccgcactttaccgtaaacgcacttatgactttgctaaatccgtttatgttgttggtaatgagcaagctgctcacttcaaacaattaaaagcagtgctaaaagaaatgggttacgattggtcagatgatatgacacacgttgcttttggacttgtcacaaaaggcggtgctaaattatcaacacgtaaaggtaatgttattcttcttgaacctacggttgctgaagccattaaccgtgcagcttctcaaattgaagcgaaaaatccaaaccttgctgacaaagaagctgttgcacacgctgttggtgtcggcgccatcaagttttacgatctcaaaacagatcgtatgaatgggtatgactttgaccttgaggccatggtttcctttgaaggagaaactggaccttatgttcaatacgctcacgctcgtatccaatctattctacgtaaagctgactttacgccatctgcaaccaccacttacagtttagctgatgctgaaagctgggaaattatcaaacttatccaagatttcccacgcattatcaagcgaacatcagataactttgagccttctattatggctaaatttgctattaacttagcccaaagctttaacaaatattatgctcacactcgcattctcgacgacaactcagaacgtgataaccgcttagctctctgctatgcaactgctactgttcttaaagaagcgcttcgcttactcggtgttgacgcaccaaatgaaatgtaa

SEQ ID NO: 38623 - DNA, 1749 bp, Streptococcus pyogenes
atgaaacgtagcatgtatgcagggcgtgttcgcgaagaacacattggaacgacaatcacattgaaaggatgggtcagtcgtcgtcgtgacttgggtggtctcatctttattgatttgcgtgaccgtgagggtgtgatgcaattagtcattaaccctgaggaagtttccagtgatgtgatggcaactgctgaacgcttacgtagtgaatatgtgattgaagtggaaggttttgttgaagctcgacaacaagccaatgataagttggcgacaggaatggttgagttaaaagtatctgctttgaccattttaaacacagctaaaacgacgccttttgaaattaaagatgacgttgaagtaagtgatgacacgcgtttacgttaccgttacttagatttacgacgtccagaaatgttagaaaacttcaagctacgtgcaaaagtgactcattctatccgtaattaccttgatgaccttgagtttatcgatgtcgagacacctatgttgacaaaatcaactccagaaggtgcgcgtgactatctggtaccaagtcgtgttagccaagggcatttctatgctttgccacaaagtccgcaaataaccaaacagttattgatgaatgctggctttgatcgctattatcaaattgtgaaatgtttccgcgatgaagatctacgtggtgaccgtcaacctgagtttacacaagttgacttggaaacgtcattcctttctgaacaagaaattcaagacatcgttgaaggcatgattgctaaagtgatgaaagagacaaaagaaatagatgtaaccctaccattcccacgtatgagctacgatgtagcaatgaatagctacggctctgataaaccagacacacgttttgaaatgcttttacaagacttgacagtaactgtcaaaggaaatgacttcaaggttttctcagaagcaccagctgtcaaggcgattgtggtgaagggaaatgcagatcgatactctcgtaaagatattgacaaattaactgagtttgccaaacaatttggtgctaaaggccttgcctgggttaaggtgacagatggtcaattggcaggcccagtagccaagttcttgacagctattgagacagagttgtcaagccaattaaaacttgctgagaatgatttggttttatttgtagcggatactcttgaggttgctaataatacattaggtgcccttcgtaatcgtattgccaaggaccttgacatgattgatcagtcgcagtttaatttcctttgggtggttgattggccaatgtttgagtggtcagaagaagaaggacgttatatgtcagctcatcaccccttcactcttccaacgccagaatctgctcatgagttagagggtgatttggctaaggtacgggctattgcttacgacatcgttttaaatggttacgagcttggtggtggtagcctgcgtatcaatcaaaaagagatgcaagagcgcatgttcaaggctcttggctttaccgctgatgaagctaacgaccaatttggtttcttactagaagcgatggactacggctttcctcctcatggtggcttggcaattggtcttgaccgttttgtcatgttgcttgctggaaaagacaatattcgagaagttattgccttccctaaaaataacaaagcctctgatccaatgacgcaagcacctagtcttgtttctgaaaaccaattagaagaactcagtcttcaaatagaaagtcatgattaa

SEQ ID NO: 38624 - DNA, 1281 bp, Streptococcus pyogenes
atgaaacttcaaaaaccaaaaggaacccaggatattctgcctggggatgctgcgaaatggcagtatgtggaatctgttgcgcgtgatacgtttagccaatataattatggagaaattcgtactcctatgtttgaacactacgaggtaatctcgcggtctgtaggtgatacgactgatattgtgacgaaggaaatgtatgatttctatgataaaggagatcgtcacattaccttgcgaccagagggtacagctccagtggtgcgttcttatgttgaaaataaattgtttgcgccagaggtccaaaaacccgtcaaactttattatatcggttccatgttccgctacgaacgtcctcaagctggtcgtttacgtgaatttcaccagattggggtagaatgtttcggcgctgctaatccagcaacagatgttgaaaccattgcgatggcctatcacctctttgaaaaattgggcattaaggatgtcacccttcatttaaatagtttggggagtcctgagagtcgtgcagcttatcgtcaagccttgattgactacttaacaccaatgcgtgatcaattatctaaagatagtcaacgtcgcttggatgaaaacccactgcgcgtgcttgattctaaagaaaaagaagataaactagccgttgaaaaagcgccttctattttggattacttagatgaggaaagtcaggcgcactttgaggcggtcaaagatatgcttgaagcacttgacattccttatgtgattgacaccaatatggtgcgtggccttgattactatagccacactatttttgaattcatcacgtctgtggaaggttctgacttaactatctgtgcgggtggacgttatgatagtttggtaggttattttggtgggcctgagactccaggatttggctttggtcttggtttagaacgtctcttgatgattattgaaaagcagggcattaccttgccaattgagacagagatggatatttaccttgctgtgttaggtgatggtgctaatagcaaagctttagaattggttcaagccattcgccgtcaagggtttacagctgaacgagattaccttggccgtaagattaaggctcagtttaaatcagccgatacctttaaagcaaaattggtaatgactttaggagaaagtgaagttgaagcaggcaaagctgtgattaagaataatcgtagtcgtcaagaagtggaagtcagttttgaagatatgatgacaaactttgcgaacatctcagagcaattattatcttaa

SEQ ID NO: 38625 - DNA, 150 bp, Streptococcus pyogenes
atgcgcgtaaatattacacttgaacataaagaatctggtgaacgcttgtaccttacttcaaaaaacaaacgtaacactccagaccgtcttcaattgaaaaaatactcaccaaaattacgtaaacacgttacatttacagaggttaagtaa

SEQ ID NO: 38626 - DNA, 339 bp, Streptococcus pyogenes
atgaaaaaagatagtatctgtcaagtgggtgttataaatcaacaaaatgttacaaccgcaacgaactaccttgaaaaggaaaaagtccaaaaatcacttcgtattttatcaaaatttaccgataataaacagataaatatcatcttttatctccttgccgtcgaagaactctgtgtctgcgatatagcctgtttattaaatctcagtatggcatctgcctcccaccatcttcgtaaactagccaatcaaaacatcttggacactagaagagaggggaaaattatatattattttataaaagatgaggaaatcagagatttttttaatcaactaggataa

SEQ ID NO: 38627 - DNA, 642 bp, Streptococcus pyogenes
atgaaggacttattaaaacagtatcaggcaaaaccactaggagaggagaagcggtacgccgtatttttacctcttattcttgtcaatgatgactggcatgtcttatatgaagtcagaagtcagcatatttcacaaccgggggaagtttctttcccagggggacaagtagaaaatcaggagacacttcaagaagctgctatccgagaaacagttgaggaattgactgttgatgcgtcccagatccagctatggggtgaaattgattatttagtacagtcttctagaactattcattgtttcgttggtcaattagtcgttgatgactggaaaagcatacagcctaacgaagaagttgacaaggtctttatagtacctttacgtcagctacttttcactgatcctgtctattatcgtttagaagtcactcctattgagacaacggattttccttttgaccgtattcgtaatgggaaatactaccaatttagtcaagagtaccgtagtattccgttttatgaaaatctagaagaaaccatatggggaatgactgcccagtttactaagtgtttaaccgatattctaaatgatgaatcaattgcaaagaaaaacccctcagatattgaaaaatctaaggggagatag

SEQ ID NO: 38628 - DNA, 588 bp, Streptococcus pyogenes
atgacaaggactgagtatctagcagaactagataaatacttgcgcaaactacctagagaagactaccatgaagcgatggaatattatattgaatattttgatgaagctggtcctgacaaagaaagccaggttatcgacgatttaggaaatcctaaggaagctgccagtgaaatcatttcaaatgttctaggaaaacacttggcaactcccgagaaaactcccaaaaatcgggcaacaattattggattaaccattttgtccctctttgctgctccgattgctttacccgtattgctggcgttgattctctttattattgcctgcctaatgctcgggctcacagctatctttgccgcctacatttttgggcttgcaggtattcttgtcgcaggagtgaccctgtttgaaagcttgaccttgattggctcatctattcctgcacaagctatgggcatcggcagcgccttgttgtgttttggtggtggtcttcttatttggattattgccacagcattccttcgtttttcaggacgggcttttgttgcctttattaagtggatcagtaataagaaaggagctcaagcatga

SEQ ID NO: 38629 - DNA, 2274 bp, Streptococcus pyogenes
atgttagaagaattgaaaacacttattaaaaatccaaaattaatgattacaatgattggtgtggccctagtgcctgccttatataatttatcctttctaggctcaatgtgggatccttatggtcgggtcaatgaccttcccattgctgttgttaatcatgataagcctgcaaagagagctgataagtcattgacaattgggaatgatatggtggacaagatgtctaaaagtaaagatttagagtatcattttgtctcagctaagcaagctcaagagggacttaaagaaggtgattattatatggttattactttacccgaagatctttctcaacgggcagcaaccttattaaatcccgaaccccaaaaattaactatccgttaccaaacgagtaaaggacatggaatggtcgctgctaagatgggggaaacagcgatggctaagctgaaagagtctgtttcgcaaaacattacgaagacttatacctcagcagtttttagcagtatgacagacctccaatcaggattaaaagaagcctcagctggaagtcaagcacttgcttcaggagcgaagactgctcaggcggggagtcaaacactttcgacgaacttagcagccttaacgggtgctagccaacagtttcaacaaggtactggtcgattgacatcaggtttgactacctatacagatggtgtcaaccaagtcaagaatgggttaggaacattatcaacggacatccccaattatctgaatggggtttctaggttatcccagggagcttctcagcttaatcagggtctttcacagttgacacaagcaacaacactttctgacgagaaagctaagggaattcaatccttaattgtaggactaccagtcctaaatcaaggcattcagcaactaaatacagagctatcaacattgcaaccccctaaccttaatgctgatgagttaggtaatagcttaggagctatcgctcaagctgccaaacaagtcattgctgaagagactgccgctcagaatgaagaattatcggctctccaagctactagcgtttaccaatcattaactgctgaacaacaaggagagttagctgcggccctcagtcaatctgataaaagtcagaccgtatctgcagcccaaactattttaagttctgttcaaactttgtcaacaagtttacagtctctctctcaagaagatcagtcaaaacagttggagcaacttaaggaagctgttgcacagattgctaatcaatccaatcaagctttgccgggagcaagttctgctttaactgaattatcaacgggattagcaaaggtaaatggtagcttaaatcaacaagttctaccaggaagtaatcaattgacaacaggattagcacaattaaacaggtataatactgccattggttctggggtaataaaactctcagaaggtgccaatgccttgtcatccaagtccggagaattactagatggtagccatcaattatcagaaggtgctactaaactagctgatggtagttctcaattgagtcagggtggtcatcaattaacgagcggattgactgaattatcaacaggattgtcaaccttaaatggttccttagccaaagcctctcagcagttatcgcttgtttctgtgactgataaaaatgctaaagctgtcgcaaaacctcttgtgttaaatgagaaagacaaagatggtgttaagacgaatgggatcgggatggcaccttatatgattgctgtttctctaatggttgtggccctttcaaccaacgtcatttttgctaattctttatctggtcgtccggtcaaagataaatgggattgggctaaacaaaaatttgttattaatggttttatttcgactatgggatccattgttctctacttagctattcaattattagggtttgaagcccgttatggtatggaaaccttaggatttattatgctaagtggttggacgtttatggctcttgtcacagctttggtcggttgggatgatcgatatggctcttttgcttctttggtcatgttattgcttcaggttggctcttcaggtggctcttaccccattgagttaagtggagcattcttccaaaagttacatcctttcttaccaatgacttatgtggtatctggtttacgacaaaccatttcattatcaggtcatattggagtagaagtgaaagtcttaactggtttcttactggcatttatggtattagcactactcatttatcgtcccaagaaaacagtctaa

SEQ ID NO: 38630 - DNA, 612 bp, Streptococcus pyogenes
atgtcacgttatactggtccatcatggaaacaatcacgtcgccttggtttatcacttacaggcacaggtaaagaattggcacgtcgtaactacgttcctggtcaacacggtccaaacaaccgtagcaaactctcagaatatggtttgcagttagctgagaaacaaaaacttcgtttctcatacggtttaggtgaaaaacaattccgtaacttgttcgttcaagctacaaaaatcaaagaaggaactcttggtttcaactttatggttcttttagaacgtcgtcttgacaacgttgtttaccgtctaggtttagcaactactcgtcgtcaagcacgtcaattcgttaaccacggtcacatccttgttgacggtaaacgcgttgatatcccttcataccgcgttgatccaggtcaagtgatttcagttcgcgaaaaatcaatgaaagtacctgcaatccttgaagctgttgaagctactcttggacgtccagctttcgtatcatttgatgctgaaaaacttgaaggttcattgactcgccttccagaacgcgatgaaattaacccagaaatcaatgaagcacttgtcgttgaattctataacaaaatgctttaa

SEQ ID NO: 38631 - DNA, 1368 bp, Streptococcus pyogenes
atgaggttgcctgaagtagctgaattacgagttcaaccccaagatttactagcagagcaatctgttcttgggtcaatctttatctcacctgataagctgattgcagtgagagaatttatcagtccagacgatttttataagtacgctcataaaattatctttcgggcaatgattaccctcagcgatcgtaatgatgccattgatgcaaccactataagaacaatcctagatgatcaagatgatctgcaaagtattggtggcttatcctatattgttgaactagttaatagtgtcccaactagtgctaatgcagaatattatgctaaaattgtagctgagaaagctatgttgcgtgatattattgctaggttgacagaatctgtcaacctagcttatgatgaaattttaaaaccagaagaggttatcgctggagttgagagagctttaattgaactcaatgaacatagtaatcgtagtgggtttcgcaaaatttcagatgtgctaaaagttaattacgaggctttagaagcacgttctaagcagacttcaaatgttacaggtttaccaactggttttagagaccttgacaagattacaacaggtttacacccagatcaattagttattttagctgctcggccagcagtggggaagactgcctttgttcttaatattgcgcaaaatgtggggactaagcaaaaaaagactgttgctattttttctttggaaatgggtgctgaaagtttagtagatcgtatgcttgcagcagaaggaatggttgattcgcacagtttaagaacagggcaactcacagatcaggattggaataatgtaacaattgctcagggagctttggcagaagcaccgatttatattgacgatacgcccgggattaaaattactgaaatccgcgcaagatcacggaaattgtctcaagaagtggatggtggtttaggtctcattgtaattgactacttacagttgattacaggaactaaacccgaaaatcgtcagcaagaggtttcagatatttcaagacagcttaaaatcctagctaaagaattgaaagtaccagttattgccctaagtcagctttctcgtggcgttgagcaaaggcaagataaacgaccagttttatcagatattcgtgaatcaggatctattgagcaggatgccgatattgtagccttcttataccgggacgattattaccgtaaagaatgtgatgatgctgaagaagctgttgaagataacacaattgaagttatcctcgagaaaaatagagctggggcgcgtggaacagtcaaactgatgttccaaaaagaatacaacaaattctcaagtatagcccagtttgaagaaagataa

SEQ ID NO: 38632 - DNA, 453 bp, Streptococcus pyogenes
atgaaagttatttttttagcagatgtaaaaggaaaaggtaaaaaaggagaaatcaaagaggtcccaacaggctatgctcaaaatttccttattaagaaaaatttagctaaagaagcaactagtcaaagcatcggtgaattaaaaggaaaacaaaaagctgaagaaaaagctcaagctgaaatattagcagaagctcaagctgtcaaggctgttttggatgaggacaaaacacgtgttcaatttcaagaaaaagttggtccagatggacgtacatttggttccatcacagctaaaaagatttcagaagaattgcaaaagcaatttggtgtaaaagttgataaacgtcatattgttttagatcatcctatccgcgccattggtctaattgaagttcctgtgaaattacataaggaagtaacagctgagattaaattggctatcacagaagcataa

SEQ ID NO: 38633 - DNA, 1977 bp, Streptococcus pyogenes
atgaaaaaatttcgttttgaaaccattcatttgattatgatgggattgattttatttggactgctggcactttgtgtcagtattatgcaatcaaaaatattaatattattagctatttttctcgttttgctatttgttgttgctcttttatggtatcaaaaagaagcttatcaattatcagacttagctcatattgagctcttaaatgaacaaacagaagataacctaaaaacgctacttgataatatgcctgttggagtagttcaatttgatcaagagaccaacgctgtagaatggtataatccttatgcagaattaatttttacaactgaagagggttttatacaaaacggtttgattcagcaaattattacggaaaaacgtcgtgaagatatttctcaaacatttgaagtttctggtaataaatacacttcttatattgatgtatcatcaggaattttttatttttttgatagctttgtgggaaacaggcaattagctgatgctagtatgttaagaccggttgttggcattatttcggttgataattatgatgatatcactgatgatttatcagatgcagatacctcaaaaattaattcatttgtagctaacttcattgatgagtttatggagtcaaaacggattttttaccgtcgtgttaatatggatcgctactatttctttacagactttaaaacattaaatgatttgatggataataaattttctgtcttagaagagtttcgtaaagaagctcaagatgctcagcgccctttaacactcagcataggaatttcttttggtgaagaaaatcatagccagattggacaggtagctcttgagaatcttaatattgcgcttgttcgtggtggtgatcagattgtcattcgtgaaaatgcggatcatacgaatccaatttatttcgggggagggtctgtttctacagttaaacgttcaagaacacgtacccgtgctatgatgacagctatttcagatcgaatcaagatggtggacaatgtttttattgttggacataggaaacttgatatggatgcactaggttcagctgttggtatgcaatttttcgcaggtaacattattgaaaatagttttgccgtttacaatccagatgagatgagtccagatattgaaagggctattgagcgattgcaggctgacggaaagactcgtctaatcagtgtttctcaagcaatgggtttagtgactccaagatcacttttagtaatggttgaccattctaagatatctttaacactttctaaagaattttatgaacagtttcaaaatgttattgtagttgatcatcacagaagagatgatgattttcctgataatgctatcttaacttttattgaaagtggagcaagtagtgctgcggagctcgtcactgagttaattcaatttcaaaatgctaaaaaatgtttaaataagatccaagccagtgttttaatggcaggtattatgcttgatactaaaaatttttctacgcgagtgacaagtcgtacctttgatgtcgctagttacttaagaagcaaaggaagtgatagtgttgaaattcaaaatatatccgcaacagattttgaagaatataagcaaataaatgaaattattttacaaggagaacgtcttggtgacagtatcattgtagctgcaggagaaaaaaatcatctttatagcaatgttattgctagtaaagctgcagatacgatactgtcaatggctcacgttgaggctagctttgtattagttgaaacagcttctcataagattgctatttcagctagaagtcgtagtaaaatcaatgttcaacgtgtgatggaaaaattaggtggaggaggccactttaatcttgctgcctgtcagttaacggatatcagtcttccccaagcgaagtacttattattgaaaactattaatatgacaatgaaagaaacaggagaagtagaatcatga

SEQ ID NO: 38634 - DNA, 1899 bp, Streptococcus pyogenes
atgacacatgaatttacagaaagctatgacgtcattgtcataggtgcaggtcatgctggtgttgaagccagtttggccactagtcgtatgggttgtaaaactttattggcaacaatcaaccttgatatgttggcttttatgccgtgtaatccttctattggaggatctgccaaagggatagtggttagagagattgatgctcttggcggcgaaatgggtaaaaatattgataaaacttatatccagatgaaaatgcttaatacaggtaagggaccagctgtacgcgctctccgagctcaagcagataaatccctgtatgcgcgtgaaatgaaacatacggttgaaaaacaggctaatttgactcttcgccaaacgatgattgatgatattctagttgaagatggacgagttgtaggtgttttaacagccacaggacaaaaatttgcagctaaggcagttgtagtgacaacaggaacagctctgcgtggcgaaattattttaggagaactcaaatattcttctgggcctaataatagtttggcatcagtaaccttagcagataatttaaaaaaactcggcttagaaattggcagattcaaaacaggaacgcctcctcgtgtcaaagcatcttctattaattacgatcaaacggaaattcagccaggtgatgacaaacctaatcatttttcatttatgtcaaaagatgctgattatctcaaagatcaaattccctgctggttgacttatacgaatcaaactagtcatgatatcattaatcagaacctttacagagcaccgatgttttctggcattgttaaaggtgtaggccctcgttactgcccatctattgaagataagattgttcgctttgctgataaagaacgtcatcaacttttcttagagccagaggggcgtgatacagaagaagtgtatgttcaagggttgtcaacgagtcttccagaagatgtccaaaaagatttgattcattcgatcaaaggacttgaaaaggctgaaatgatgcgcactggttatgctattgaatatgatattgttttacctcaccagctacgtgccacacttgaaaccaagctaatttcaggactctttacggctgggcaaactaatggaacttctgggtatgaagaggctgctggccaaggacttattgctggaatcaatgctgctttgaaagttcaaggtaagccagaacttattttgaaacggagcgatgcctatattggcgttatgattgacgatttggttaccaaaggaaccttggaaccttatcgattgttgacatcgcgagctgagtatcgtttgattttacgtcatgacaacgctgatatgcgtttgacagagattggtcgcgacattgggttggttgatgatgagcgttggaaggccttcgaaattaagaaaaaccaatttgataacgaattaaaacgtctgaacagtatcaaattaaaaccgattaaagaaaccaatgaccgcgttcaagatctaggcttcaaaccgttaaccgatgcgatgactgctaaagaattcatgcgtcgtccagaaattgattatgcgactgcagtctcttttgttggtcctgcggctgaagatttagatgctaaaatcattgaacttttagaaacagaaatcaagtacgaaggctatattcgcaaagctttagatcaggttgctaagatgaaacgcatggaagaaaaacgtattcctacaaatattgattgggatgctattgattctattgcaactgaggcgcgtcagaaatttaagaaaattaatcctgaaacaattggacaagctagtcgtatttcaggagtcaatcctgcggacatcagtatcttgatgatttatttagaaggaaacggaaaagctcatcgaaaatattaa

SEQ ID NO: 38635 - DNA, 1122 bp, Streptococcus pyogenes
atgacagataactcaaagatacgtgttgtcgttggtatgagtggtggcgttgattcatctgtaacagctctacttttaaaggagcaaggttatgatgttattggtgtcttcatgaaaaactgggacgatacagatgaatttggtgtttgcacagctactgaagattacaaagatgtagcagccgttgctgataaaatcggtattccttactattcagtcaattttgaaaaagaatattgggacagagtatttgaatatttcttggccgaataccgagcaggtcgtactccaaatcctgatgtcatgtgtaataaggaaataaaatttaaagctttccttgactatgccatgactttaggtgcagattatgtagcaacgggacactatgctcaagtcaagcgtgatgaaaatggtacggttcacatgttacgtggagctgataatggcaaagaccaaacctactttttaagtcaactatcacaggaacaactacaaaagactttattcccccttggtcatttgcaaaagtcagaagttagagaaatcgctgagcgagcagggcttgcaacggctaaaaagaaagattcaacaggtatttgttttattggtgaaaagaatttcaaacagtttttgagccagtacttaccggcacaaaaaggtcgcatgatgactattgatggtcgcgatatgggagaacatgccggccttatgtattatactattggtcagcgtgggggtctgggcattggtggtcagcatggtggggataatcaaccttggtttgttgtcggtaaagatttgtcgcaaaatattttatacgttggtcaaggtttctaccatgaagccctaatgtcaaatagtcttgacgcctcagtcatccattttacacgtgagatgccagaagagttcacatttgaatgtactgctaaatttcgctatcgtcaacccgattcacacgtggcggtgcatgttcgaggagataaggcagaagttgtttttgcagagccacagcgcgcgattactcctggtcaagctgttgttttctatgacggaaaagaatgccttggtggtggtatgattgacatggcttataaaaatgggcagccttgtcagtacatttaa

SEQ ID NO: 38636 - DNA, 801 bp, Streptococcus pyogenes
atggataagctgattcttggtcgttatattcccggagattctctcattcatcgtcttgacccaagaagtaaattattagcgatgattatttatattgtcattatcttttgggctaacaatgttgtgacaaatttgttgatgttgacttttactttagcagttgtttttttgtcaaaaatcaagttgtctttctttttaaatggggttaaaccaatgattggtattatcctcttcacgactttatttcagatgtttttctcacaaggaggaaaagtaatttttagttggtggttcattagcataactgatttaggattgagccaagctattttaatttttatgcgtttcgttctaattattttcttttcaacgctgttaacgttgacgacaacacctttaagcctatctgatgcagttgaatcattattaaaacctttaacaagatttaaagttccagctcacgagatcggactaatgctttctttaagtttacgttttgtgcctactttaatggatgataccacgcgtattatgaatgcacaaagggcccgtggagttgattttggagagggaaatttaattcaaaaagttaaatccattattcctattttaatccctcttttcgcttcaagctttaaaagagccgacgcattagctattgctatggaagctagaggttatcagggaggagaagggcgaactaaatatcgtcaattagactggcagctaaaagatagtttagctattggaatagtttctttattgggtttgctactttttttcttgaaaacctctttgtaa

SEQ ID NO: 38637 - DNA, 843 bp, Streptococcus pyogenes
atgtcaattaatctccaaaatgtaagttatacttatcaagcagggactccttttgaagggcgtgccctttttaacattaatttagatattttagatggttcttatacggcttttatcggacatactggatccgggaaatcgaccattatgcaattgctaaatggtttacacgttccgacaacgggaattgtcagcgtagataaacaagatataacgaatcactctaaaaataaagagattaaatctattcgaaaacatgtaggattagtttttcaatttccagaaagtcaactatttgaagagacagttttgaaagatgttgcttttggccctcaaaattttggggtctctccggaggaagcagaagctttagcgcgtgaaaaactagctcttgttgggatttcagaaaatctttttgaaaagaatccatttgaactctcagggggtcaaatgcgtcgtgttgctattgcgggtatccttgctatgcagccaaaggttttagttttagatgaaccgactgctggtcttgatcctaaagggcgtaaagaattaatgactatttttaaaaagttacaccaatctggcatgactattgttttagtaacccatctgatggatgatgtggccaattacgcagattttgtatatgttcttgacaaaggtaaaattattttatcaggaaaacccaaaacaatttttcaacaagtcagtttgcttgagaaaaaacagttaggagttcctaaggtgactaaacttgctcaaaggcttgttgatagaggaatacctatctcttctttgcctattaccttagaggagctaagagaggtactaaaacatggataa

SEQ ID NO: 38638 - DNA, 891 bp, Streptococcus pyogenes
atgattattttaaaggagcaagctttctttttaaggatacgtttaaataacatgtcagctattattgaacttaaaaaagttacatttaattaccataaagaccaagaaaaaccaacattagatggcgtatcgtttcatgtgaaacaaggtgagtggctgtctatcattggccataatggatctggtaaatcaacgactattcggttaattgatggattattggaaccagaatcagggtctattattgttgatggagatctactaaccataactaatgtttgggaaattcgtcataaaattggtatggtctttcaaaaccctgataatcagtttgttggagcaactgttgaagatgatgttgcttttgggcttgaaaataaaggtattgcacatgaagatataaaagagagggttaatcatgctttagagttagtcggcatgcagaactttaaagaaaaagaaccagcccgtttatctggtggccaaaaacagcgcgtagctattgcaggtgcagttgctatgaagcctaaaattattattttagatgaagctactagtatgcttgaccctaaaggacgattagagttaatcaaaactataaaaaacatccgtgacgactaccagctgactgttatttccattactcatgacttagatgaagttgctcttagtgatagagttttagtgatgaaagatggtcaagtggaatcaacatcaacaccagaacaattatttgcaagaggggatgaactactccaattaggtcttgatatcccttttacaacatctgttgtacagatgcttcaagaagaaggttatcctgttgactatggatatctcacagaaaaggaattagaaaatcagttatgtcaattaatctccaaaatgtaa

SEQ ID NO: 38639 - DNA, 543 bp, Streptococcus pyogenes
atgataaaaaaagaaaatattcctaatctattaactcttgttcgaatcgcaatgattcctttctttctttttattacttcctcatctaataaggtggggtggcatatttttgcagctgtgatttttgcaattgccagttttaccgattatctagatgggtatcttgcgcgtaagtggcatgtagccagtaattttggaaagtttgccgatcctctagcagataagatgcttgtcatgagtgcctttatcatgttagttggacttggcttagttcctgcgtgggtgtcagctgttattatttgccgagaattggcagtaactggtcttcgattactacttgttgaaaccggaggaaaggtccttgcagctgctatgccgggaaaaatcaaaacagcgacacaaatgttgtctattattttattactttgccattggatattcctaggaaacgtcttactctatattgctctttttttcactatttattctggatatgattattttaaaggagcaagctttctttttaaggatacgtttaaataa

SEQ ID NO: 38640 - DNA, 1026 bp, Streptococcus pyogenes
atgagtgaaaaaagtcttggtgaagtgttaagagaatcgcgtgttggaaaaaatatcacactagatgatatagaattgaagacagggatttcttcccattacttgctggcaatggaattggatcagtttaaaattattccggaagaaaaatttgatcaatttttaaaagaatatgctgacattgttgagttagatttcaatactttaaaaagacgataccgttatcaagttaattccaaaaaagacagtgatataaaatctgtaactgagattgttgaagagaagttaagtaagaaacgattacaagagaagttgttatcacatcagagcatggggtatggtcaaccgttagaagtttctaaaaacaaagaaaccttagttatccctgtaaagactgttggtttagatagcaaatcgccactaaaaacgatatcgcctgttagccaatttaaatcagataacaggttaattcctaaaaaaaatgtgtcacgtatgaggcgaaatagcactgacagtcgttctaaaacgtcactatttcccatagttatattaggaacgattgcttttgcaattatcagtgttatcattttaggtgtttggcaacaattcgaaaagagtcaaagagctaaagaagctgaagttgctttgcttaaagcctctgagcagtctactaacggtttaaaaaataattcaaatgatcgcaaaactcaagtcacaactgaggggtcgggtaattatttaatagcgactgttactaaatctaaagagaccgttgatatcagtgtgtctttaaccgaggcacaaagtagttggatttctctaacaaattcagaaattggtgaaggtggtataacattgactcaagactcgccaacttatacagcgactttacctgcagaaataacagaatcattgttgacacttggtgtgacaaaaggtgtatctgtaacaattgatggacaacctgttgatctatcacctttaacaagtactgacttaagttatatcacgtttaagatccaataa

SEQ ID NO: 38641 - DNA, 1290 bp, Streptococcus pyogenes
atgacaaaattagtaaagataaactatcctaatattgacgaagacctttactatgtaaaattagaaaatggtttaactgtttattttataaaaaaaatagggtttttagaaaaaacagctatgttgacagtaggtttcggttctcttgacaataagttgacagtcgatgacgaatcacgagatgctccagcaggtattgcacactttttagaacataaactctttgaagatgaatcaggtggagatatttcattaaagtttacacagctaggagcagagacaaatgcctttacaactttcaaccaaacgagtttcttcttttcaacagctagtaaatttcaggaaaatttggaactccttcaatattttgttctttctgctaatataacagatgaatctgttagtagagaaaaaaaaataatcgggcaagaaattgatatgtatcaagatgatgctgactaccgtgcatatagtggaatccttcagaacttatttccaaaaacaagtttagctaatgatattgctggctcaaaagcatccattcaaaagatcacgaaaatattattggaaacgcatcatacttatttttaccaacctactaatatgagtctattcattgtcggtgatattgatattgacgaaacttttttagctattcaaaggtttcaaaccacattatcctatccagatagaaaaagggtaactgttgatcctttacactattatcctgtcattaaatcatcttctgttgacatggatgttactactgccaagctggttgttggttttcgagggtatctgaccttaactcagcattcactattaacgtatcgtattgccttgaagctatttttatcaatgcttataggttggacttctaaaatctatcatacgctatatgaagatggtaaaatagacgattcatttgatgtggatgttgaaattcatcataattttcaatttgtattaatatcacttgatacaccagagcctatcgcaatgtctaactatatccgtcaaaaattagctactataaagatatcaaaagagtttacaaatgagcacttaaatctattaaaaaaagaaatgtatggtgactttattcagagtttagactctatagaacatttaacccatcagttcagtctatacctgtctgattctgataaagaaacatattttgatattccaaaaattatagaaagactcactctaaaagatgttgttacaattggaaaagcattttttgaaaaagctgatgcttcagacttcacagtcttcccaaaatag

SEQ ID NO: 38642 - DNA, 1260 bp, Streptococcus pyogenes
gtgcctatttttaaaaaaactttaattgttttatcctttatttttttgatatctatcttgatttatctaaatatgtatctatttggaacatcaactgtaggaatttatggagtaatattaataacctatctagttattaaacttggattatctttcctttatgagccatttaaaggaaagccacatgactataaagttgctgctgtaattccttcttataatgaagatgccgagtcattattagaaactcttaaaagtgtgttagcacagacctatccgttatcagaaatttatattgttgatgatgggagttcaaacacagatgcaatacaattaattgaagagtatgtaaatagagaagtggatatttgtcgaaacgttatcgttcaccgttcccttgtcaataaaggaaaacgccatgctcaagcgtgggcatttgaaagatctgacgctgacgtttttttaaccgtagattcagatacttatatctatccaaatgccttagaagaactcctaaaaagcttcaatgatgagacagtttatgctgcaacaggacatttgaatgctagaaacagacaaactaatctattaacgcgacttacagatatccgttacgataatgcctttggggtggagcgtgctgctcaatcattaacaggtaatattttagtttgctcaggaccattgagtatttatcgacgtgaagtgattattcctaacttagagcgctataaaaatcaaacattcctaggtttacctgttagcattggggatgatcgatgtttaacaaattatgctattgatttaggacgcactgtctaccaatcaacagctagatgtgatactgatgtacctttccaattaaaaagttatttaaagcaacaaaatcgatggaataaatctttttttaaagaatctattatttctgttaaaaaaattctttctaatcccatcgttgccttatggactattttcgaagtcgttatgtttatgatgttgattgtcgcaattgggaatcttttgtttaatcaagctattcaattagaccttattaaactttttgcctttttatccatcatctttatcgttgctttatgtcgtaatgttcattatatgatcaaacatcctgctagttttttgttatctcctctgtatggaatattacacttgtttgtcttacagcccctaaaactttattctttatgcaccattaaaaatacggaatggggaacacgtaaaaaggtcactatttttaaataa

SEQ ID NO: 38643 - DNA, 1209 bp, Streptococcus pyogenes
atgaaaatagcagttgctggatcaggatatgttggattatcactaggagttcttttatcacttcaaaacgaagtcactattgttgatattcttccctctaaagttgataagattaataatggcttatcaccaattcaagatgaatatattgaatattacttaaaaagtaagcaattatctattaaagcaactttagatagcaaagcagcttataaagaagcggaactggtcattattgccacacctacaaattacaacagtagaattaattattttgatacacagcatgttgaaacagttatcaaagaggtactaagcgttaatagccatgcaactcttatcatcaaatcaacaattccaataggtttcattactgaaatgagacagaaattccaaactgatcgtattatcttcagccctgaatttttaagagaatctaaagctttatatgacaacttatatccaagccgaattattgtttcttgtgaagaaaacgattctccaaaagtaaaggcagacgcagaaaaatttgcacttttattaaagtctgcagctaaaaaaaataatgtaccagtacttattatgggagcttcagaagctgaagcagtaaaactatttgccaatacttatttagcgttaagggtagcttattttaatgagttagacacttacgcagaatcgagaaaattaaatagtcacatgattattcaaggaatttcttatgatgatcgaataggaatgcattataataacccatcatttggttatggaggttattgtctacctaaagatacgaagcaattattggcaaattacaataatattcctcaaacgctaattgaagctatcgtttcatcaaataatgtgcgcaagtcctatattgctaagcaaattatcaacgtcttagaagagcgggagtccccagtaaaagtagtcggggtttaccgtttaattatgaaaagtaactcagataattttagagaaagtgctatcaaagatgttattgacattcttaaaagtaaagacattaagataattatttatgagccaatgttaaacaaacttgaatctgaagatcaatctgtacttgtaaatgatttagagaatttcaagaaacaagcaaatattatcgtaactaatcgctatgataatgaattacaagatgttaaaaataaagtttacagtagagatatttttaatagagactag

SEQ ID NO: 38644 - DNA, 915 bp, Streptococcus pyogenes
atgaccaaagtcagaaaagccattattcctgctgcaggtctaggaacacgttttttacctgctaccaaagctcttgccaaagagatgttgcccatcgttgataaaccaaccatccagtttatcgtcgaagaagcgctaaaatctggcatcgaggaaatccttgtggtgaccggaaaagctaaacgctctatcgaggaccattttgattcaaactttgaattagaatacaacctccaagctaaggggaaaaatgaactgttgaaattagtggatgaaaccactgccattaaccttcattttatccgtcaaagccacccaagagggctgggagatgctgtcttacaagccaaagcctttgtgggcaatgaaccctttgtggtcatgcttggagatgacttaatggacattacaaatgcatccgctaaacctctcaccaaacaactcatggaggactatgacaagacgcatgcatccactatcgctgtgatgaaagttcctcatgaagatgtgtctagctatggggttatcgctcctcaaggcaaggctgtcaagggcctttacagtgtagacacctttgttgaaaaaccacaaccagaagatgcgcctagtgatttggctattattggtcgttacctcctaacccctgaaatttttggtattttggaaagacagacccctggagcaggtaacgaagtgcaactcacagatgctatcgataccctcaataaaactcagcgtgtctttgcacgagaatttaaaggcaatcgttacgatgttggggataaatttggattcatgaaaacatctatcgactatgccttagaacacccacaggtcaaagaggacttgaaaaattacattatcaaactaggaaaagctttggaaaaaagtaaagtaccaacacattcaaagtaa

SEQ ID NO: 38645 - DNA, 1023 bp, Streptococcus pyogenes
atgacaaaacctattattttaactggagatagaccaactggaaaattacatttaggtcattatgtcggaagtcttaaaaatcgtgtctttttacaaaatgaaaacaagtataagatgtttgttttcttggccgatcaacaggcactgacggatcatgctaaagaatccgaattaattcaagaatctattggaaatgttgccttggattacctctctgtcggtttggatccgaagcaatcaacgatttttattcaaagtcagattccagagctagctgaattgagcatgtattatatgaatctggtatcattagcacgtttggaaagaaatcccactgttaaaaccgaaattgctcagaaaggttttggcgaaagtattccatctggttttttggtttatccagtatcacaggccgctgatattacagcatttaaagcgaatttagtacctgtaggtaacgaccagaaaccgatgattgaacaaacacgtgaaattgtgagaagttttaatcatacttaccatacagactgtttagtagaacctgaaggtatttatccagaaaatgaaaaagctggacgcttacctggtcttgatggcaatgccaaaatgtctaagtcattgggaaatggaatctatctctcagatgatgcagataccgttcgcaaaaaagtgatgagcatgtatactgatccaaatcatattaaaatagaagatcctggtcaaattgaagggaatatggtctttcattatttggatatttttgctagaaaagaagatcaagctgatatcgaagcaatgaaagagcattatcaaataggtggtttaggagatgtgaaaacgaaacgctaccttttagatattttagaacgtgaattagcacctattcgtgaaagacgtttggagtacgctaaagatatgggagaggtgttccgtatgttacaagaaggtagtcaaaaagcaagaactgtggcagccaagactttatcagaagtgaagtcagcaatgggtattaattatttttaa

SEQ ID NO: 38646 - DNA, 1620 bp, Streptococcus pyogenes
ttgcttacagtttctgatgtatcactacgctttagtgatcgaaaactatttgatgatgttaatatcaaattcacagccggcaatacttacggcttaatcggtgccaatggtgccggaaaatcaacttttcttaaaatccttgcaggagatattgaaccaagtactggtcatatctctttaggacctgacgaacgcttatctgttcttcgccaaaatcattttgattatgaagaagaacgtgcgattgatgttgtaatcatgggtaatgaacaactctacaatatcatgaaagaaaaagacgctatctatatgaaagcagatttttcagaagaagatggggttcgtgccgctgagctagaaggtatctttgctgaattaggtggctgggaggcagaaagtgaagcttctcaacttctccaaaatctaaatattccagaagaccttcactaccaaaatatgagtgaactggctaatggagataaagtgaaagtccttcttgctaaagcgctctttggtaagcctgacgttttattacttgacgagccaaccaatggtcttgatattcaatctatttcatggttggaagatttcttgattgattttgaaaatacagtcatcgttgtttcccatgaccgtcacttcttgaataaagtatgtactcacatggccgaccttgactttggtaaaatcaaactctttgtgggtaactacgatttctggaaacaatcttctgagctggccgctcgtttacaagctgaccgcaatgctaaagcagaagagaaaatcaaagaattacaagaattcgttgcccgtttctcagcaaacgcatctaaatcaaaacaagcaacctctcgtaaaaaaatgcttgataagattgaattagaagaaattgttccctcaagccgtaaatacccatttattaattttaaagcagagcgtgaaatgggaaatgacttcctcactgttgaaaatctttctgtaacgatcgatggagagaaaatcattgataatatcagtttcattttacgtccaggtgacaaagctgctattattggtcaaaatgatattcagacaactgctcttatgcgtgctttagcagatgatattgactacgaaggaaccattaaatggggagtgacaacaagtcgttcttacttgcctaaagacaattcaaaagattttgccacggaagaatctattcttgaatggttacgtcaatttgcctcaaaaggtgaagatgatgatacctttttacgtgggttcttaggacggatgcttttctctggagacgaagttaaaaaatctgttaacgttctttccggtggcgaaaaagtgcgtgtcatgctttctaagttgatgctattgaaatcaaacgttcttattcttgatgacccaactaatcacttagatttggaatctatttcaagtcttaatgatggaatcaaagacttcaaagaatctgttatctttgccagtcatgaccatgaatttattcaaacgattgctaaccacatcgttgttatttcaaaaaatggtgttatcgaccgtatagatgaaacttatgacgaattccttgacaatccagaagtccaagcccgagttgctgaactttggaaataa

SEQ ID NO: 38647 - DNA, 480 bp, Streptococcus pyogenes
atgaaagtgaaactaatttgtgttggaaaactaaaagaaagatacctcaaagatggtatttcagaatatcaaaaaagactttcccgtttttgtcaattcgaaatgattgagttaactgatgaaagaacaccagataaagcaagttttgctgataatcaattgattatgagtaaagaagctcagcgaatccataaaaaaattggggaacgtgattttgtaattgcattagctattgaaggaaaacagtttccttcagagacatttagtgaattaatatcaggggttactgttaagggatattcaactatcacgtttattattggtgggagtcttggattagattcaattattaaaaaaagagctaatatgctaatgagttttggattgttaaccttacctcatcagttaatgcgtctagtccttactgagcaaatttatcgtgcttttatgattacacaaggcagtccttatcataagtaa

SEQ ID NO: 38648 - DNA, 1224 bp, Streptococcus pyogenes
atgccaagtatgaaacatatcttaaaatccttaagtattttactaattggatttttaggaggattaatagcaattattacattcaataatctctacccacattctccatcaaaaataaattcaggtaaggcaacaactagtaatatggtttttaacaacacaaccaatactactaaagctgtcaaagctgttcaaaatgcagttgtatcagttattaattatcaagataacccttcttcatccctttctaacccttatacaaaactctttggagaagggcgttcaaaagagaataaggatgctgaattatctatttttagtgaaggatctggggtcatttatcgaaaagatggcaactccgcttacgttgttactaataaccatgttatcgacggagctaaacgaattgaaattcttatggcagacggatctaaagttgttggtgaattagttggagctgatacttattcggatttagctgttgttaagatctcttcagataagataaaaacagtagctgaatttgcagattctacaaaactaaatgttggagaagttgctattgctatcggcagcccactaggaacacaatacgctaattctgttactcaaggaatcgtctctagtttaagtcgtactgtaactttaaaaaacgagaatggtgagactgtctcaacaaatgctattcagacagatgctgctattaaccctggaaactctggtggaccactaattaatattgaggggcaagtaatcggaattaattcaagtaaaatttcttctaccccaactggtagcaacggtaatagtggtgctgttgaaggaattggttttgctatcccatctactgatgttattaaaattattaaacaactagaaactaatggtgaagttatcagacctgctcttggaatatccatggtcaatttaaatgacttatccacaaatgctcttagtcaaattaatattccaactagtgtaactggtggtattgtagtagcagaagttaaggaaggaatgccggcatctggcaaacttgctcagtacgatgtgattacagaaattgatggcaaaacagttaattcaattagtgatttacaaagtagtctatacggacacgatattaatgatactattaaagtaactttttatagaggaactacaaagaaaaaagcagatatcaaattaacaaaaactactcaagatttgactaaaacgcagtaa

SEQ ID NO: 38649 - DNA, 690 bp, Salmonella typhimurium
atggcgagacgtattctggtcgtagaagatgaggcgccgatccgtgaaatggtgtgcttcgtgctcgaacaaaatggctttcagcccgtagaagccgaagattatgacagtgcggtgaataaacttaatgaaccctggccggatctcatccttcttgactggatgttgcccggcgggtcagggttacagtttattaaacatctcaaacgtgaagccatgacccgggatattcctgtggttatgctgaccgcaagaggtgaggaagaagatcgtgtgcgcgggctggaaaccggcgctgacgattacattaccaagccgttttcccccaaggagttggtggcgcgcattaaagccgttatgcggcgcatctcgccgatggcggtcgaagaggtgatcgagatgcagggactgagccttgatcccggctctcaccgcgtgatgaccggcgacagcccgctggatatggggccgaccgaatttaaattactccatttctttatgacgcacccggaacgggtttacagtcgcgagcagctactcaatcatgtctggggcaccaatgtgtacgttgaagaccggacggtcgacgtgcatattcgccgtttgcgtaaggcgctggagcacagcggccacgaccggatggtgcaaacggtacgcgggacagggtatcgtttttcgacccgcttttaa

SEQ ID NO: 38650 - DNA, 1296 bp, Salmonella typhimurium
gtgctggaacggctgtcatggaaaaggctggtgctggagctggtgctctgttgcatccccgcgcttatccttagcgctttttttggttatctgccgtggtttttactggcggcggtgacgggactgcttgtctggcatttctggaatttgttacgcctctcctggtggctttgggtcgacagaagtatgacgccgccgccgggacggggaagttgggaaccgctgttatacggtttacaccagatgcagttgcgaaataagaagcgtcgccgcgagctggggaacctgattaaacgttttcgcagtggcgcggagtcgctgcctgatgccgtggtactgaccacagaagagggcggcattttttggtgtaacggtttggcgcaacagatactggggctacgctggccggatgacaacgggcagaatattctcaatctactgcgttatccggagtttacccagtatttaaaaacgcgtgatttcacccgtccgcttcatttggtgctcaataccgggcggcacctggagatccgcgtcatgccttataccgataaacaactcctgatggtggcgcgcgatgtgacgcaaatgcatcagcttgaaggcgccagacgtaactttttcgccaacgttagccatgagttgcgtacgcccttgacggtattgcaaggctatctggaaatgatgcaggaacaggcgctggaaggggcgacgcgagagaaagcgctgcatacgatgcgcgagcaaacgtatcgtatggaagggctggtaaaacaactgcttacgctgtctaaaattgaggcggccccggcgctgttattaaatgaaaaagtggatgtaccgatgatgctgcgggtcgtggagcgtgaagcgcagacgctcagccagcagaaacatacctttacgtttgaggtcgacgatagtcttagcgttctgggcaacgaagagcagctacgtagcgcgatctcaaacctggtgtataacgcggtaaaccatacgccggcgggaacgcatattacggtgagctggcgacgtgtcgcgcatggcgctgagttttgcattcaagataacggtccggggattgctgccgagcatattcctcgtctgaccgaacgcttctaccgtgtcgataaagcgcgttcgcggcaaacgggcggcagcggcctgggattggcgattgtgaaacatgcgttgaatcaccatgaaagccgccttgaaatcgacagttcgcctggcaaaggaacgcgatttagctttgtgctgccggaacgtttaattgccaaaaatagcgattaa

SEQ ID NO: 38651 - DNA, 1320 bp, Salmonella typhimurium
atgacccatcagttaaaatcgcgcgatatcatcgccctgggctttatgacatttgcgctgttcgttggcgcaggcaatattatctttcctcctatggtcggtttgcaggcgggtgaacacgtctggacagccgctattggctttctgattaccgccgtagggctaccggttcttactgttgtggcgctggcgaaagtcggcggcggcgtagacagcctcagtacgccgattggtaaagtggcgggactcctgctggcgaccgtttgctatctggccgtcgggccgttatttgcgacgccgcgtaccgcgacggtgtcgtttgaggtcggtatcgctccgttgactggcgattctgcaatgccgttgctgatttacagcgtggtctatttcgctatcgttattctggtttccctctatccgggtaagctgctggatacggtagggaatttcctggcgccgttgaaaattattgcgctggtcatcctgtccgtcgcggctatcgtttggcctgccggtccaatcagcaacgccctggacgcttatcagaatgcggccttttctaacggatttgtgaacggctatctgacgatggatacgctgggcgcgatggtgtttggtatcgttattgtgaacgcggcgcgttctcgcggcgtgaccgaagcgcgcctgttgacgcgttacacggtctgggccggcctgatggcgggcgtggggctgacgctgctttaccttgccttgttccgcttaggttctgacagcgcgacgctggtcgatcagtcagcgaacggcgcggcgattcttcatgcctacgttcagcatacctttggcggcgcgggaagcttcctgctggcggcgctgatctttatcgcgtgtctggtgacggcggtggggctgacctgcgcctgcgctgagtttttcgcgcagtatattccgctgtcttaccgcacgctggtctttattctcggcggcttctctatggtggtgtcaaacctcggactgagccatctgattcaaatctccattccggtgctgacggctatctatccgccgtgtatcgcactggttgtattaagttttacccgctcatggtggcataattccacccgtatcatcgcgccggccatgtttatcagtctgctttttggtatccttgacggcatcaaagcatctgccttcggcgatatgctgccagcctggagtcagcgtttgccgctggcggaacagggactggcttggttgatgccaacggtggtgatggtgatcctggcgattatctgggatcgcgcggcgggtcggcaggtgacctccagcgctcactaa

SEQ ID NO: 38652 - DNA, 1371 bp, Salmonella typhimurium
atggaaagcaataataagctaaagcgtgggctgagcacccggcacattcgctttatggcattaggttcggcaatcggcaccggcctgttttacggctcggcggacgccatcaaaatggcggggccgagcgtgctgttggcctatattattggcggggtcgcggcatatatcattatgcgcgcattgggggaaatgtccgttcacaaccctgccgccagctcattttcgcgctatgcgcaggaaaacctcggcccgcttgcgggctacattaccggctggacctactgttttgagatcctgatcgtcgccattgccgacgtgaccgcgttcggcatttacatgggagtctggttccccgccgtgccgcactggatttgggtacttagcgtggtgctgatcatttgcgccatcaacctgatgagcgtcaaggtgttcggcgagctggagttttggttctccttcttcaaagtcgccaccattattatcatgattgtcgcgggtatcggcatcattgtgtggggaattggcaacggcgggcagccgaccggcattcataacctgtggagcaacggcggcttcttcagcaatggctggttgggaatgatcatgtcgctgcaaatggtgatgttcgcttacggcgggattgagattatcggtatcaccgccggggaagcgaaagacccggagaaatccattccgcgcgccattaactcagtaccgatgcgtatcctggtattttatgtcggcacgctgttcgtcattatgtctatctatccgtggaatcaggtcggcacaaacggcagtccatttgtgctgacgttccagcatatggggattacctttgccgccagcattctgaactttgtggtattgaccgcctcgctttccgctatcaactccgatgtgtttggcgtaggccgtatgctgcatggtatggcggagcaggggagcgcgccgaaagtctttgctaaaacgtcacgccgtggtattccgtgggtcactgtgctggtgatgacgattgcgctgctgtttgcggtttacctgaactacatcatgccggaaaacgtcttcctggtgattgcttcgctggcgacgtttgcgacggtatgggtatggattatgatcctgctgtcgcaaatcgccttccgtcgtcgtttaccgccggaagaggtaaaagcgctgaaatttaaggtgccgggcggtgtcgtaacgacgatagcgggtctgattttcctggtcttcattattgcgcttatcggctaccatccggatacccgcatctcactgtatgtgggcttcgcctggatagttctgctgttgattggctggatatttaaacgccgtcgcgaccgtcaattggcgcaggcgtag

SEQ ID NO: 38653 - DNA, 1818 bp, Salmonella typhimurium
atgttgaatgcctggcacttaccggttgccccatttgtgaagcaacataacgataaattaaccattacgctgtggctgagcggagaaaatccgccgtctcgcgtgacgttgcgctcagaattcgataatgaagaaatctcactggcgatgcgcaaacagcgccgccagccgcagccgggcgtgacggcgtggcgagcgacgctcaatatcgcgttagggcaaccccgtcgccgttacagctttaaattgctttggcatgaccgccagctttggtttacgccacagggatttagccgttttccgcctgcgcgtctggaacaatttgcggttgatgtgccggatagcggcccgcagtgggtcgccgatcaaattttttatcagatcttcccggatcgttttgcccgcagccagtctcgtgaagccgggcaggaccgggtgtactaccatcatgccgcaggtcaggagattgtgctgcgcgactgggacgatcctttaaccccccaggcgggcggttccaccttttacggcggctgtctgaatggcatttgtgagaagctgccgtatctgaaaaaactgggcgtcacagcgctatatctgaatccggtatttaccgcgccgagcgtccataagtacgatacggaagattatcgccatgtcgatccgcaatttggcggcgatcgggcgctgctacgcctgcggcgtaaaacccaggtgcagggcatgaggctggtgctggatggcgtgtttaatcatagcggcgactcgcatgtgtggtttgacaggcataaccgcagcactggcggcgcgtgccatcacccggactcgccgtggcgcgactggtactccttttcaccacaaggcgtggcgctggactggctgggttatccgagcctgccgaaactcgattatcaatcagaaacgctggtcgatgagatctatcgcggtgaggacagtatcgttcgtcactggctaaaggctccgtggaatatggacggctggcggctggatgtcgtacatatgctgggcgaggcgggcggggcgcgtcataatttgcagcacgtcgccggtattacccgggcggcaaaagaggcgcagcccgaagcctatattgtgggggaacatttcggcgatgcgcggcagtggctacaggccgatgcggaagatgccgccatgaattatcgcggcttcaccttcccgctatggggatttctcgccaatactgatatcgcttacgaaccacagcatattgatgcccggacctgtatcgcgtggatggataactaccgcgccgggctgtcacatcagcaacaactgcgcatgtttaatcaactcgacagccatgatactgcgcgctttaaaactctgctgggtaaagacgcggcgcgcctgccgctggcggtggtctggctgtttacctggcccggcgtgccatgtatttattacggcgatgaagtcggcgtggacggcgcaaatgaccccatgtgccgcaaaccgttcccatgggatgaacgcaagcaggacggcaacttgctggcgctgtaccagcgtatggcgaaactgcgccagagcagtctggcgctgcgtcgtggcggatgccaggcgctgtatgccgaaggtgacgtagtggtattcgtgcgagtttatcagcagcagcgggcgctggtggcgattaaccggggcgaggcctgtgaagtggcgctggaagcgttgccgttgctgaacgtggccggatggcaatgtaaaacgggaagcggtgatatccgcgagggaagacttagtttacccgcgatttccgcgacggtatggatgaatcgttga

SEQ ID NO: 38654 - DNA, 2463 bp, Salmonella typhimurium
atgcgagtgttgaagttcggcggtacatcagtggcaaatgcagaacgttttctgcgtgttgccgatattctggaaagcaatgccaggcaagggcaggtagcgaccgtactttccgcccccgcgaaaattaccaaccatctggtggcaatgattgaaaaaactatcggcggccaggatgctttgccgaatatcagcgatgcagaacgtattttttctgacctgctcgcaggacttgccagcgcgcagccgggattcccgcttgcacggttgaaaatggttgtcgaacaagaattcgctcagatcaaacatgttctgcatggtatcagcctgctgggtcagtgcccggatagcatcaacgccgcgctgatttgccgtggcgaaaaaatgtcgatcgcgattatggcgggacttctggaggcgcgtgggcatcgcgtcacggtgatcgatccggtagaaaaattgctggcggtgggccattaccttgaatctaccgttgatatcgcggaatcgactcgccgtatcgccgccagccagatcccggccgatcacatgatcctgatggcgggctttaccgccggtaatgaaaagggtgaactggtggtgctgggccgtaatggttccgactattccgccgccgtgctggccgcctgtttacgcgctgactgctgtgaaatctggactgacgtcgatggcgtgtatacctgtgacccgcgccaggtgccggacgccaggctgctgaaatcgatgtcctaccaggaagcgatggaactctcttacttcggcgccaaagtccttcaccctcgcaccattacgcccatcgcccagttccagatcccctgtctgattaaaaataccggtaatccgcaggcgccaggaacgctgatcggcgcgtccagcgacgatgataacctgccggttaaagggatctctaaccttaacaacatggcgatgtttagcgtctccggcccgggaatgaaagggatgattgggatggcggcgcgtgttttcgccgccatgtctcgcgccgggatctcggtggtgctcattacccagtcctcctctgagtacagcatcagtttctgtgtgccgcagagtgactgcgcgcgtgcccgccgtgcgatgcaggatgagttctatctggagctgaaagaggggctgctggagccgctggcggttacggagcggttggcgattatctctgttgtcggcgacggtatgcgcacgctacgcggcatttcagcgaaattcttcgccgcgctggcgcgggctaatatcaatatcgtggcgatcgctcagggatcttctgagcgttctatttctgtggtggtgaataacgacgatgccaccaccggcgtgcgggtaacgcaccagatgctgttcaataccgatcaggtgattgaagtgtttgtcattggcgtcggcggcgtcggcggcgcgctactggaacagcttaaacgtcagcaaacctggctgaagaacaagcacatcgatctacgcgtgtgcggcgtggcgaactcaaaggcgttgctaaccaatgtgcatggcctgaatctggacaactggcaggcggaactggcgcaagcgaacgcgccgttcaatctgggacgcttaattcgcctggtgaaagaatatcatctactcaatccggtgattgttgattgtacctccagtcaggcggtggccgaccagtatgccgacttcctgcgtgaagggttccatgtggtgacgccaaacaagaaagcgaacacctcgtcaatggactactaccatcagctacgtttcgccgccgcgcaatcacggcgcaaattcttgtatgacaccaacgtcggcgccggtttgccggtaatcgaaaacctgcaaaacctgctgaatgccggtgatgaactgcaaaaattttccggcattctttccgggtcgctctcttttattttcggtaaactggaagaggggatgagtctctcacaggcgaccgccctggcgcgcgagatgggctataccgaacccgatccgcgcgacgatctttccggtatggatgtggcgcgtaaactgttgatcctcgcccgcgagacgggccgcgagctggagctttccgatattgtgattgaaccggtgttgccgaacgagtttgacgcctccggcgatgtgaccgcctttatggcacatctgccgcagcttgacgacgcgtttgccgcccgtgtggcgaaagctcgtgatgaaggtaaggtattgcgctatgtgggcaatatcgaagaggatggcgtgtgccgcgtgaaaattgccgaagttgatggtaacgatccgctcttcaaagtgaaaaacggtgaaaacgcgctggcgttctacagccactattatcagcccttgccgttggtgctgcgcggctacggcgcaggcaatgatgtgacggcggcgggcgtgtttgccgatctgttacggaccctctcatggaagttaggagtttaa

SEQ ID NO: 38655 - DNA, 930 bp, Salmonella typhimurium
atggtgaaagtgtatgccccggcttccagcgcgaacatgagcgtcggtttcgacgtgttgggcgcagccgtcacacccgttgacggcacgttgctgggcgatgtggtatccgttgaagcagcggaccatttccgtctgcataacctggggcgatttgccgataaactgccgccggagccgcgtgaaaatattgtttatcagtgctgggaacgtttttgccaggcattggggaaaaccatcccggtggcgatgacgctggaaaaaaatatgccgattggttccgggttagggtccagcgcctgttccgtcgtcgccgcgctggtcgcgatgaatgagcactgcggcaaaccgttaaacgacacgcgtctgttggcgctgatgggcgagctggaaggccgtatctccggcagcatccattacgataacgtcgcgccgtgctttcttggcggtatgcagttgatgattgaagaaaacggcattattagtcagcaggtgccgggctttgatgagtggctatgggtactggcttatccgggcattaaagtttctaccgcagaagcacgggccattttgcctgcgcagtatcgccgtcaggattgcattgcgcatggacggcatctggccggttttattcacgcctgttactcgcggcagccgcagcttgccgccgcgctgatgaaagatgttattgccgaaccataccgcgcgcgtttactgccgggctttagccaggcgcggcaggcggtgtcggagatcggcgcgctggcgagcgggatttccgggtcggggccgacgctgtttgcgctatgcgataaaccggagacggcgcagcgcgtcgcggactggctgagcaaacattatctgcaaaatcaggaaggcttcgttcatatttgccggctggatacggcgggcgcacgagtagtgggataa

SEQ ID NO: 38656 - DNA, 618 bp, Salmonella typhimurium
atgatgagaaagccttcacaaattgtccattgcattagttgcgatttatcctgtcaattatttcctgacagcgcagtacgggtgcaatactgtcataatgcggcattttccatctggccagatggtaatgctttcctgaaaaaagggtttattgaaaagttattgcttgatagacacaatcatttatccagcggttttatctttgttgatttttctttcccgaatcttcgacgatttaccgatttgcaatgggctgacagtctggcagacagtggcatgcatattgtcctgatttctgacagaagtttaactccgctggccaattactggattttgaaaagcaataaaatacaagggattatttattccgatgacgatgatattgtgcaacagcaaaagatgcaccgcttgtttaccggtcggctcgccaacagtaaacgtggacgaacgcttaactatacggaatttatattactgaagcgctttgtatcaggaataagtattcagcagattgtaaatattgacaatattgatattaagaaactttatgtgcataagctgcggcttgaaaataagctagggcatagcattcataaaataatatcaaatattttatag

SEQ ID NO: 38657 - DNA, 1287 bp, Salmonella typhimurium
atgaaactctataatctgaaagaccataatgagcaggtcagctttgcgcaggccgtcacgcaaggactgggcaaacagcagggacttttttttccgcacgatctgccggagtttagcctgacggaaattgatgagatgctcaaccaggactttgtcagccgtagcgcaaagatcctctcggcatttattggcgatgaaataccgcagcaaattctggaagagcgcgtccgcgcggcgtttgcgttcccggcaccggtagcgcaggtagaaagcgatgtcggctgcctggagctgttccatggtccgacgctggcctttaaagacttcggcgggcgttttatggcgcaaatgctgacgcatatcagcggcgacaaaccggtgacgattctgactgcaacgtcaggcgataccggcgcggcggtggctcacgcgttctatggcctggaaaatgtgcgggtcgtcattctctacccgcgcggtaagatcagtccgttgcaggaaaaactgttctgtacgctgggcggcaacattgaaaccgtggcgatcgacggcgatttcgacgcgtgccaggcgctggtgaaacaggcatttgatgacgaagaactgaaaacggcgctggggctgaattcggctaattcgattaatatcagccgcctgttggcgcaaatttgctactactttgaagccgtggcgcaactgccgcagggggcgcgtaaccaactggtgatctccgtccccagcggcaactttggcgatttgacggcagggctgctggcgaagtcgttaggcctaccggtgaaacgttttatcgccgccaccaacgtcaacgacacggtgccgcgttttctgcatgacggaaagtgggcgccgaaagcgacgcaggcgaccctgtcgaatgcgatggatgtcagccagccgaataactggccgcgcgtggaggagctattccgccgtaaaatctggcgcctgactgagctgggctatgcggcggtggatgatactacgacacagcagacgatgcgcgagctgaaagcgaaaggttatatctcggaacctcatgcggcggtagcgtatcgggcattacgcgaccagttaaaccctggcgagtatggcttgtttctcggaacggcgcatccggcgaagtttaaagagagcgtggagtccattctgggagaaacgctggccttgcctgaagcgctcgccgaacgcgccgacctgccgctgctttcacatcatctgcctgcggattttgccgccctgcgtaagctgatgatgacccgccaataa

SEQ ID NO: 38658 - DNA, 2868 bp, Salmonella typhimurium
atgccaactccccaaaattactcattcatcgccatagcggtatcagcagcattagcctctatggtatttccctcccaggcggcctgggttgacgttgatagtctgccatccagtgggctggtcagtcagttgccgccggaattacaggctattattcccgctcaggccagtaccggtttcaccaaagtcgggaccatgcccaactacgtttatcagtggaacaccggcaccatcccggtttatggcaatggcctcacgcttaatgggccgggcgcggaggcgtttgaacacactgtcacggttattcaaaacagcgggacgggaagtccgggcgtgatttttggcaacgacctgaccattcggacgcagtcggcgaatgccgcgaataatggtagagacgtcgatggcatccgtactcacggcgcgaatactccggataacccggtatttattattaccggtgaccgtacccgcatctacgtggatggtcaggatggtgacggtattaacgccggatataactcactgggccagggttggaccggatcggccaatatttacgtcggcgacgatctgtatatcaaaacgaccggtagccagggacgtggcattacagccaacgccatgcgggatgcgtcacgtgccaaaaatacgattgtcgtcggcaatcgtgcgcatattgttactaccggcgacagttcggaggggctgcgtaccggacaaagcggttcgttgattcgtctgggtgacgatgcaactatcgaaacatccggcgcatcctcaacggggatttacgcagcatcctcctccagaaccgagcttggcaacaacgctactattacggtgaacggtgccagcgcacacgcggtatatgcaactaacgctaccgttaatttgggagagaatgccactattagcgttaacagcgccagtaaggctgcatcctatagtaaagcccctgccggtttatacgccctctcccgaggcgccattaatctggcaggcggtgcggctattactatggcgggcgataacagtagcgaaagttacgccatcagcacggagactggcggcattgttgacggttcttcaggaggtcgtttcgtcatcgacggtgatattcgtgctgctggcgccaccgctgccagcggtacgctaccgcagcagaacagtacgattaagctcaatatgacggacaactcgcgatgggacggggcgtcgtacatcaccagcgctacggcgggcacaggcgttatctctgtacaaatgagcgatgcgacctggaatatgaccagcagctcaacgctcactgacctgacgctgaatagtggcgcaaccattaacttcagccatgaagatggcgaaccatggcaaacgctcaccatcaatgaagattatgtaggcaacggcggtaagctggtctttaatactgtgctcaacgatgatgattccgaaacggacaggctgcaggttctcggcaatacttcaggcaacacatttgttgcagtaaataatattggaggagccggggcgcaaaccattgaaggtattgaaattgttaacgttgctggcaattccaacggtactttcgaaaaagcaagccgtattgttgccggagcctatgactacaacgtggtgcagaaaggtaaaaactggtatctgaccagctacattgagccggacgaaccgattattcctgatccagtagaccctgttatccctgaccctgtcgttcccgatccggtggaccctgatccagtagacccggttatccctgaccctgtgattcccgatccggtggaccctgatccagtagaccctgagccagtagacccggtcatccctgatccgacaattcctgacatagggcaatctgacacaccgccgataacagaacatcagttccgtccggaagtgggcagctatcttgccaacaactatgcggcaaatacgctgttcatgacgcgtctccatgaccgtctgggtgaaacccagtacaccgacatgctgacgggtgagaagaaggtcaccagcctgtggatgcgtaacgtcggcgcccatactcgcttcaacgatggcagcgggcagctaaaaacccgcatcaacagctatgtgttacaactgggaggcgatctggcacagtggagcactgacggtcttgaccgttggcatattggtgcaatggcaggttatgccaacagccagaaccgcacgctgtcgtccgtgagtgactatcattcccgtggtcaagtcaccggttacagcgtcggcctttacggcacctggtatgctaacaatatcgatcggtctggggcttatgtggatacctggatgctgtacaactggtttgataacaaggtcatgggtcaggatcaggccgctgagaaatataaatccaaaggaattaccgcctcggttgaagccggttacagcttcaggttaggtgaaagcgcgcatcaaagctactggttgcagcccaaagcgcaggtggtatggatgggcgtgcaggctgacgacaatcgcgaagccaatggtaccctcgtcaaggatgataccgccggtaatctgctaacccgcatgggcgtaaaagcctatattaacggccacaatgctattgataacgataaatctcgagagttccagccattcgtggaagcgaactggatccataatacgcagcctgccagcgtgaagatggacgatgtcagcagcgatatgcgtggtacgaagaatattggagaactgaaagtgggtattgaaggacaagttaccccgcgcctgaacgtatggggtaacgtggcgcaacaggtgggtgacacaggttatagtgatacccaaggaatgctggggatgaaatacagtttctga

SEQ ID NO: 38659 - DNA, 954 bp, Salmonella typhimurium
atgacggacaaattgacctcccttcgtcagttcaccaccgtagtggctgataccggagatatcgcggcaatgaaactgtatcagccgcaggatgctacaactaacccttctctcattcttaacgcagcgcaaatcccggaatatcgtaagctgattgacgatgctgtcgcctgggcgaaacagcagagcagcgaccgcgcgcagcaggttgttgacgcgaccgataagctggcggtgaatattggcctggagatcctgaagctggtgccggggcgtatttctaccgaagttgacgcgcgtctgtcttatgacactgaagcgtctatcgccaaagcaaaacgtatcattaaactctacaatgatgcgggtatcagcaacgatcgtatcctgatcaagctggcgtccacctggcagggcattcgtgcagccgaacagctggaaaaagaaggcatcaactgtaacctgacgctgctgttctccttcgcgcaggcgcgtgcgtgcgccgaagcgggcgtctacctgatctcgccgttcgtaggtcgtattcttgactggtataaagccaataccgacaagaaagactatgcgccagctgaagatccgggcgtggtttccgtaacggaaatctacgagtactacaaacagcatggttacgaaaccgtcgttatgggcgcaagcttccgtaacgtaggcgaaattctggagctggcgggctgcgaccgtctgactatcgcgccggcattgctgaaagaactggcggaaagcgaaggggcgattgagcgtaagctctctttctccggcgaagtcaaagcgcgcccggaacgcattaccgaagccgagttcctgtggcagcatcaccaggaccccatggcggttgacaaactggcggatggtatccgtaagtttgcggtagaccaggaaaaactggaaaaaatgatcggcgatctgctgtaa

SEQ ID NO: 38660 - DNA, 591 bp, Salmonella typhimurium
atggataccttacgtattggcttagtttctatctccgaccgcgcttcaagcggcgtttaccaggataaaggcattcctgcgcttgaggagtggctcgcttctgcgctgaccacgcctttcgaggtccaacggcgcttaattcctgatgaacaggaaattatcgagcaaacgttgtgtgaactggtcgatgagatgagctgtcatctggtgctgaccactggcggtaccggtccggcgcgtcgcgacgtcacgccggacgcgacccttgccatcgccgaccgtgaaatgccaggttttggcgagcagatgcgccagatcagcctgcgctttgtgccgaccgccattctttcccgccaggtgggcgttatccgtaaacaggcgttaattcttaatctgcctggacagccaaaatcgatcaaagaaacgctggaaggcgtaaaagcggacgatggcagcgttagcgtgccgggcatttttgcgagcgtgccgtattgcatacagctgcttgacgggccgtatgtcgaaaccgcgccggaagtggttgccgctttccgtccaaagagcgccagacgtgagaatatgtcggactga

SEQ ID NO: 38661 - DNA, 696 bp, Salmonella typhimurium
atgtccgctctttgtccgctactgactccgcctgcttcggaagcattgctgttagcccaggcgcggcagctttccggctatacgttaggcgagctggcggcgatggccggcattaccacgcctaaagatttgaagcgagacaaaggctggatcggtgtcttgctggagatctggctcggcgccagcgccgggagcaagccggagcaggatttcgccgcgttaggcgtagaactgaaaaccatcccggtggatagtctgggtcgtcctctggaaacaacctttgtttgcgtggcgccgttaaccggtaacagcggcgtgacctgggagacaagtcacgtacggcataaattgaagcgcgtgctatgggtgccggtcgaaggcgatcgcagcataccgttagccgaacgccgcgtaggttcgccgttactctggagtccgagtgaagaagaggacaggcagctacgcctcgactgggaagagctgatggacatgatagtgctgggccaggtggaacgcattaccgcccgtcatggcgaagtcttgcaactgcgacccaaagccgccaatgccagggcgctcaccgaggctatcggcgcgcgcggggaacctattttgacgctaccgcgtggattttatctgaaaaaaaattttacgcaggcgctgctggctcgccattttttattgcagaatccgtaa

SEQ ID NO: 38662 - DNA, 1917 bp, Salmonella typhimurium
atgggtaaaattattggtatcgacctgggtactaccaactcttgtgtagcgattatggatggaacgcaggcacgcgtgctggagaacgccgagggcgatcgcactacgccttctatcattgcttatacccaggatggtgaaactctggttggtcagccggctaaacgtcaggcagtgacaaacccgcaaaacaccctgtttgcgattaaacgcctgattggccgccgcttccaggacgaagaagttcaacgtgacgtttctatcatgccgtacaaaatcatcggcgccgacaacggcgacgcatggcttgatgtgaaaggtcagaaaatggcgccgccgcagatttctgccgaagtgctgaagaaaatgaagaaaacggctgaagattatctgggcgaaccggtaactgaagcggttatcaccgtaccggcttactttaacgatgcgcagcgtcaggcaaccaaagatgctggtcgtatcgcggggctggaagttaaacgtatcatcaacgaaccgactgccgcagcgctggcttacggtctggataaagaagtcggcaaccgtactatcgcggtttacgacctcggtggtggtactttcgatatctctattatcgaaatcgacgaagttgatggcgaaaaaacctttgaagttctggcaaccaacggtgatacccacctgggtggtgaagacttcgatacccgcctgatcaactacctcgttgacgagtttaagaaagatcagggcattgacctgcgtaacgatccgctggccatgcagcgcctgaaagaagccgcagaaaaagccaaaatcgagctgtcttctgcgcagcagaccgacgtgaacctgccgtacattaccgcagatgccaccggtccgaaacacatgaacatcaaagtgactcgtgcgaaactggaaagcctggttgaagatctggtgaaccgttctatcgagccgctgaaagtcgcactgcaggacgctggcctgtccgtgtctgatatcaacgacgtgatcctcgttggcggtcagacccgtatgccaatggtgcagaaaaaagtggctgagttctttggtaaagagccgcgtaaagacgttaacccggacgaagctgtggctatcggcgcagcggtacagggcggcgtgttgaccggtgatgtgaaagacgtactgctgctggacgttaccccgctgtctctgggtatcgaaacgatgggtggcgtgatgactccgcttatcaccaaaaacaccaccatcccgaccaagcacagccaggtgttctctactgcggaagacaaccagtctgcggtaaccatccatgtgctgcagggtgagcgtaagcgtgcgtctgataacaaatctctgggtcagttcaacctggatggcatcaacccggcgccgcgcggtatgccgcagatcgaagtcaccttcgatatcgatgctgacggtatcctgcacgtctccgcgaaagataaaaatagcggtaaagagcagaagatcactatcaaggcgtcttctggtctgaacgaggaagaaattcagaaaatggttcgcgatgcagaagcgaacgctgaatccgaccgtaagttcgaagagctggttcagacccgtaaccagggcgaccatctgctgcacagcacccgtaagcaggttgaagaagcaggcgataaactgccggctgatgacaaaaccgctatcgagtctgccctgaacgcgctggaaactgccctgaaaggcgaagataaagccgctatcgaagcgaaaatgcaggaactggcgcaggtttcccagaaactgatggaaatcgctcagcagcaacatgcgcagcagcaggctggctccgctgacgcttctgcaaacaacgcgaaagatgacgacgttgtcgacgctgagtttgaagaagtaaaagataaaaaataa

SEQ ID NO: 38663 - DNA, 1065 bp, Salmonella typhimurium
atgcgcgttaccgatttttcctttgaactacccgaatccctgattgcccactacccacagccggaacgcagtcgctgccgtttgctgtcattagaggggccgacgggcgcgctgacgcacggtactttcaccgatctgctcgataagctcaaccctggcgatttgctggtcttcaataatacccgcgtgatcccggcgcggctctttggccgtaaagccagcggcggcaagatagaagtgctggtcgaacgtatgctcgatgataaacgcatcctggcgcatattcgcgcttctaaagcgccaaaaccgggtacggaactgctgctgggcgacgacgaaagtattcacgcgaccatgaccgcgcgtcacggcgctctgtttgaagttgagtttaatgacccgcgtccggtgctggatattcttaacgccatcggccatatgccgttgccgccgtatatcgaccgtccggacgaggacgccgaccgcgaactgtaccagacggtctacagtgaaaaaccgggcgccgtcgccgcgccgaccgcggggctgcactttgatgagccgctgctggcggcgcttcgtgagaaaggtgtcgaaatggcgtttgttacgctacacgtaggcgcgggcactttccagccggtgcgtgtcgataccattgaagatcacatcatgcactccgaatatgctgaggtgccgcaagaggtggtcgacgcggtgctggcggcgaaagcgcgcggcaaccgcgtgattgctgtcggcaccacctcggtacgctcgctggaaagcgcggcgcaggcggcaaaaagcgatttgatagagccgttcttcggcgatacgcaaatctttatttatccaggttatcaatacaaagtgattgatgcgctgatcaccaacttccatctgccggaatcgacgttgattatgctggtttccgcatttgccggttatcaacacaccatgaatgcctataagactgcggtagaacaaaaatatcgcttttttagctacggggacgcgatgtttatcacgtacaatccgcaggctatttctgagcgtccgtaa

SEQ ID NO: 38664 - DNA, 1128 bp, Salmonella typhimurium
atgaaatttgagttagataccaccgatggtcgtgcgcgtcgcggtcgtctggtgtttgatcgtggcgtagtggaaacgccagcctttatgcctgtgggtacttacggtaccgtgaaaggcatgacgccggaagaagtggaagcgaccggcgcgcagattattctcggcaacactttccacctgtggctgcgcccgggtcaggaaatcatgaagctgcatggcgatctgcacgattttatgcagtggaaagggccgattctcaccgattccggcggcttccaggtcttcagcctcggcgatattcgtaagattaccgagcaaggcgtgcacttccgtaacccgatcaacggcgatccgattttcctcgatccggaaaagtcgatggagatccagtacgatctcggttccgatatcgtgatgatctttgatgaatgtacgccgtacccggcagactgggactatgctaaacgctcgatggagatgtcgttgcgttgggcgaagcgtagccgcgaccgttttgatagccttggcaataagaatgcgctttttggcatcattcagggcagcgtttacgaagatttacgcgatatctcggtgaaaggtctggtagagattggctttgatggctacgctgtcggcggtttggctgtcggtgagccgaaagcagatatgcaccgcattctggagcacgtttgcccgcagatcccggctgacaaaccgcgttacctgatgggcgtgggtaaaccggaagatctggtggaaggggtgcgtcgcggtattgatatgtttgactgtgtcatgccaacgcgaaatgcccgtaatggtcatctgtttgtgaccgacggcgtggtgaagattcgtaatgcaaagcataaaagcgacaccagcccgcttgacgccgagtgcgattgctacacctgtcgcaattattcacgcgcttacttgcatcatctcgaccgttgcaacgaaatattaggtgcgcgtctcaataccattcataacttgcgttactaccagcgtttgatggcgggtttacgcaaggctattgaagagggtaaattagagagcttcgtaaccgagttttaccaacgtcaggggcgacccgttccacctttgaacgttgattaa

SEQ ID NO: 38665 - DNA, 348 bp, Salmonella typhimurium
atggctatcatcccaaaaaactacgcgcgcctggaaagcggctatcgtgaaaaagcgctgaagctgtttccgtgggtgtgcggacgttgttcccgtgagtttgtgtattcaaatctgcgtgagctgacggtgcatcatatcgatcatgaccacaccaataacccggaagacggcagcaactgggagctattgtgcctctactgccacgatcatgagcattctaaatataccgaagccgatcagtacggttcgacggtcattgccggggaagatgcgcaaaaagatgtcggcgaggcgacttataacccgtttgccgatctgaaagcgatgatgaacaaaaagaaataa

SEQ ID NO: 38666 - DNA, 903 bp, Salmonella typhimurium
atgggttccaccagaaaagggatgctaaacgtcctgattgccgccgtattgtgggggagttcaggcgtttgcgcgcagtacatcatggagcaaagccgtatgtcgtcacagttcctgacgatgatacgtttgttattcgccgggctgatactggtgaccttctcctttatgcacggcgataagatattttcaattcttaaaaaccgcaaagatgccctgagtctgctgattttctccgtggtgggcgcgctcaccgttcagctaaccttcctgctcacgattgaaaaatccaatgccgccaccgcgacagtgctgcaatttttatcgccgaccattattgtagcgtggtttgcattagcgcgaagaacacgaccaggcattctggtcttaaccgccattcttacatcgcttatcggcacctttttactggtgactcacggcaatccaacatcgctgtcgatctcttcagccgcgctgttctggggtatcgcctccgcatttgccgccgccttttatacgacctggccttccaggctaatcgcccaatacggcacactgccagtggtcggctggagtatgtcctttggcggccttattctgctgcccttctacgctaaagaaggaacgcactttgcggtgagcggcagcctgattctggcctttttctacctggtggtgatcggtacatcgctgacgttcagcctgtatttgaaaggcgcgcaactgattggtggccccaaagccagcattttaagctgcgcggaaccgttaagcagcgccctgctgtcgctactgctgttggggattagttttaccttgccggactggctgggcacgctgctcattctctcgtcagtgattctgatctccctcgattcccgtcgacgcgcgcgggccgcttaa

SEQ ID NO: 38667 - DNA, 1041 bp, Salmonella typhimurium
atgcactatcaccgtataccccacagctcgctcgaagtaagtacgctagggctgggcacaatgacatttggtgaacaaaacagcgaagccgacgctcacgcacagctcgactatgccatcgcaaatggcattaaccttatcgacgccgccgagatgtatccggtaccgccgcgcccggaaacacaagggctgacggagtcctatatcggtaactggctcgccaaacgcggcaaccgtgaaaaactgatcatcgccagcaaagttagcggaccggcacgtaataatgatcaaggcatccggcctcatcaggcgctggatcgtaaaaatattcgcgaagcgctacacgacagtttgacccgattgcagaccgactatctggatttgtatcaggtgcactggccgcagcgccccactaactgcttcggtaaactcggctataactggacggactccacgccagtagtaagtctgctggagacgttagacgcgctaagtgagtttcagcgagcgggtaagattcgttatattggcgtttcaaatgagacagcgtttggcgttatgcgctatctgcatctggcggaaaaacatgacctgccgcgtattgtcacgatccagaacccctatagcctgttaaaccgcagctacgaggtcgggctggcggaagtcagccagtatgaaggtgttgaattgctcgcctactcctgtctggcgtttggcacattaaccggtaaatacctgaacggggccaaacccgcaggcgcgcggaataccttgttcagccgcttcacacgttacagcggcgaacaggcgcaaaaagccgttgcctcctacgtcgatatcgcgaagcgtcacaatcttgatccggcgcagatggcgctggcctttgttcgccgccagccgtttgtcgccagtacgttactgggcgcaaccacgatggcgcagctcaagacgaatgtggaaagtctgcatctgacgttaagcgaagaggttctggcggagattgaggcggcgcatcaggtttatacctatccggcgccgtga

SEQ ID NO: 38668 - DNA, 1023 bp, Salmonella typhimurium
atgatggcgacaatgctggatgtttcccgccatgcgggcgtatcaaaggccaccgtctcacgagtgctgaatgggacggggcaggtaaaagaaagcacgcgccagaaagtgtttacggcgatgcaggctctgggctatcgccccaacctgctggcacgctcgctggcgaatcgcaccagcaacagcatcggtctggtcgtctctacgtttgacggcttctatttcggcagtttgttgcgccgggcgtcgcgccaggcggagtctcataacaagcagttgatcgtcaccgatggtcacgatacgccggaacgagagcagaaagccgtacaaatgttggccgacagacagtgcgacgctattattctttacactcgctatatggatgagctggcgattttgtcgttgattgacgccacggaaatgccgctggtgattattaatcgcaacgtcactcaggcccgcgatcgcgctattttcttcgagcaggagacggcggcattccaggcggtggaatatctgattacgcagggccatcgcgatatcgcctgtattacgctgcctgttcatactcccaccggcacatcacgcgtagcgggttatcgcaaggcgctggaaaagtatggcattccctggcaaccggcaaaagtgaaatacggcgattacacgctgacgcgcggctatgacgcctgccgggaattactggaggaaggcgtcacgtttagcgcgctattcgcctgtaatgatgacacggcgctgggcgcggcaaaagcgctgcgccaggccggattacgcatcccacaggatgtgtcgctgtttggttttgacgatgcgccgggcgcaacctggcttgagccggggctttcaacagtctatttacccatcgaggctatgatagccaccgcgatcgatcaggccgttcgtctggcgaacagcgagccggtcgccccgatcccgccctttaccggcacgctgattctgcgcgagtccgtcgccgcgggcccgttttttcaacgtccggcctaa

SEQ ID NO: 38669 - DNA, 1383 bp, Salmonella typhimurium
atgcgataccgttttcccgataacttctggtggggcagcgcctgctcagcgttgcaaaccgaaggggatagtctgaatggcggtaaaagccagaccacgtgggatgtgtggttcgagcgccagccgggtcgttttcaccagggcgtcggtccagcggaaacctcaacgttctatcgccactggaagcaagacatcgcgctactgaaacagttaaaacataacagttttcgcacctcgctaagctgggcgcggctcattccagacggcgtaggcgaggtgaatccacaagcggtgagcttctacaatcacgtcatcgacgagctactggcgcagggcatcacgccgtttattacgctgttccattttgatatgccgatggtcatgcaggagaaaggcggctgggaaaatcgcgacgtcgtagaggcgtttggtcggtacgcgcaaacgtgttttaccttgtttggcgaccgcgtgaagcactggtttacctttaacgagccgattgtgccggtggaaggcggctatttgtacgacttccactatcccaatgtggtggattttaaacgggcggccaccgtggcgtaccataccgtgctggcgcactcgaccgccgtgcgcgcctggcgcgccgggcgctacgacggtgaaatcggcatagtactgaatctgacgccgtcctacccacgctcgcagcatcccgccgatgtgcaagccgcgcaccatgcggatctgttattcaaccgcagttttcttgacccggtattaaagggagaatacccggcggacttggtggcgctgctgaaaacctatgaccagttgcctgcctgtcagccaggcgaccgtcagcttattgccgacggcaaaatcgatttactggggattaactattatcagccgcgccgcgtgaaatgccgtgatacggcggtgaatccgcaagcgccgtttatgccggagtggttatttgactattacgacatgccggggcgcaagatgaacccttaccgcggctgggaaatttacgcgccaggaatttacgacatcatcaccaacctgcgggataattacggcaatccgcgctgttttatctccgaaaacgggatgggcgttgagaacgagcagcgttttgtgcaagcgggacagattcacgatgattaccggattgactttatttctgagcatcttaaatggctgcataaaggcattagcgagggctgtcactgtcttggctaccacatgtggacctttatcgataactggtcatggctgaacggctataaaaatcgctatggttttgtacaactggatttagccacccaaacgcgcacggtgaaaaaaagcggagaatggtttgccgccaccgcagagcataacggttttgattaa

SEQ ID NO: 38670 - DNA, 1104 bp, Salmonella typhimurium
atgcaggatgagttttacatggcgcgagcgctcaaactggcgcagcgtggacgtttcaccactcaccctaaccctaatgtcggctgtgtcattgttaacaatggcgacatcgtcggcgaaggttatcaccatcgcgccggagagccgcacgccgaggttcatgcgctgcggatggcgggcgcaaaagccaaaggcgcaaccgcctatgtcacgcttgaaccctgtagccatcatgggcgaacgccgccatgttgcgatgcgctgattgcggccggcgtcgcgcgcgtggtcgccgcgatgcaggacccgaacccacaggtcgccgggcgtgggctgtatcgcctgcaacaggcgggtattgcggtcagccacgggttaatgatgagtgaagcggaggcgctcaataaaggcttcctcaagcggatgcgtaccggattcccttatcttcagcttaaactgggcgcctccgtcgacggacggacggcgatggccagcggcgaaagccagtggatcacctcgccgcaggcccggcgtgacgttcagcgcttgcgtgcgcaaagccacgctatcttaaccagtagcgcgacggtattggctgacgatccggccttgacggtgcgttgggcggagttagacgcctctacgcaggcgtcttacccgcaggaaaatctgcgccagccggtgcgaattgttatcgacagccaaaaccgggtaacgcctgcgcatcgtattgtgcagcagcctggcgaaacgtggatcgcgcgtacccaggaagatagccgcgcgtggcccgatgcggttcgtactatcagcgtgccggcgcacaacggacatttggatctggttgtgctgatgatgcagttaggcaggcagcagattaatagcatatgggttgaagccggaccgggactggcgggcgcgttgctgcaagccgggctggtggatgaactgattgtctatgtcgcgcctaaattgttgggaacccaggcgcggggattatgcgaattgccggggcttgagaagctcgccgacgcgccgcaatttaccttcagcgaaatacgtcatgtcggcccggatgtttgcctgcatatggtgagcgcatga

SEQ ID NO: 38671 - DNA, 471 bp, Salmonella typhimurium
atgaacattattaaagctaacgttgcagcccctgacgctcgtgtcgccatcactattgcgcgtttcaatcagtttatcaacgacagcctgctggatggcgcggttgatgccctgacgcgtattggtcaggtaaaagatgataatattaccgtagtgtgggtgcctggcgcctatgaactgccgctggcgaccgaagcgctggcgaaaagcggtaaatacgacgccgtggttgcgctgggaaccgtgattcgcggggggactgcgcactttgaatatgtggcaggcggcgccagcaatggcctggcaagcgttgcccaggacagcggcgtgccggtagcctttggtgttctgaccaccgagagtattgaacaagccatcgaacgtgctggtacaaaagccggtaataaaggcgcagaagctgcgctgaccgcgcttgaaatgattaatgtattgaaagccattaaggcctga

SEQ ID NO: 38672 - DNA, 420 bp, Salmonella typhimurium
gtgaaacctgctgctcgtcgccgcgcccgtgagtgtgccgtccaggcgctttactcctggcagttgtcccagaacgacatcgctgatgttgaataccagttcctggcggaacaggacgtaaaagacgtcgacgttctctatttccgtgaactgctatccggggtggcgactaacagcgcgtacctggatggtttaatgaaaccgtatctgtcccgcctgcttgaagagctgggacaggttgaaaaagccgtgctgcgtattgcgttgtttgagctgtcaaaacgcagcgatgtgccttataaagtggccatcaacgaagcgattgaactggcgaaaacctttggcgctgaagacagccacaaattcgtcaacggcgtactggataaagcagctccggtgattcgtcccaacaaaaagtga

SEQ ID NO: 38673 - DNA, 978 bp, Salmonella typhimurium
atggcatgtggcgagttttccctgattgcccgttattttgaccgtgtaagaagctctcgtcttgatgttgaaaccggtattggcgacgattgcgcgctcctgaatattcctgaaaagcagaccctggcgatcagtaccgatacgctggtggcgggcaaccacttcctccctgatatcgatcctgccgatctggcttataaagcgttggcggtgaatttaagcgatctggccgcgatgggggccgacccggcctggttaacgctggcgttaacgctaccggaagtggatgagccgtggctggaggcttttagcgacagcctgtttgcgctattgaattactacgatatgcagctcattggcggcgacaccacgcgtggaccgctgtcgatgacgctgggtatccacggttatatcccggcagggcgcgcgctcaagcgatctggcgcgaagccgggcgactggatttatgtcaccggtacgccgggcgacagcgctgccgggctggcggttttgcaaaaccggctacaggtgtcggaggagaccgatgctcactatttaattcaacggcatttacgtccgacgccgcgtattttacacggccaggcgctgcgtgacatcgccagcgcggctatcgatctttccgatggtctgatttccgatctggggcatatcgtcaaggccagcggctgtggggctagagtggatgttgatgcgttgccaaaatccgatgcgatgatgcgccatgttgatgacgggcaggcgctgcgttgggcgctttccggcggcgaagactatgagctgtgctttacggtgccggaactgaaccgtggcgcgctggatgtcgccattggtcaactgggtgttccctttacctgcataggccaaatgagcgcagatattgaagggctgaattttgtacgtgacggaatgcctgtcaccttcgactggaaaggatatgaccattttgccacgccataa

SEQ ID NO: 38674 - DNA, 867 bp, Salmonella typhimurium
atgggtgaattttcgacacttcttcagcaaggaaacggctggttcttcattcccagcgccattttattaggtattttgcacgggcttgaaccagggcactccaaaactatgatggcggcttttatcattgccattaaaggtacggttaaacaggccgtcatgctcggtctggcagcaacgctttctcataccgcgatcgtctggttaatcgcgctgggtgggatgtatcttagccgggcattcaccgcacaatcagtggaaccatggctgcagttaatttctgcgattattattctgagcaccgcgtgctggatgttctggcggacatggcgaggcgagcagcagtggctggcgggaaaccaccatcacgaccacgaccacgaccacgaccacgaccacgaccacgaccacgaccacgaccacgaccacgaccacgaccacgaccatcatggtcacatacatccggaaggtgcaacgtcaaaagcgtatcaggatgcccatgaacgcgcccatgctgccgatattcaacgccgttttgatggtcaaacagtgactaatggacagatcctgctattcggcctgaccggagggcttatcccctgtccggctgcgatcaccgttttactgatttgtatccagcttaaagcgtttacgctgggcgccacgatggtgctgagctttagtcttggcctggcattaacactggtgacggtaggcgtgggcgcggcgataagcgttcaacaggcagcaaagcgctggagtggtttttcgacgcttgcccggcgggcgccctatttttcgagcattctgattggtctggtcggcgtgtatatgggaattcatggctataccgggatcatgcagtaa

SEQ ID NO: 38675 - DNA, 1806 bp, Salmonella typhimurium
atgattgcgcgcgtaatgcttctgcttgtcgcactggttagcgctggcgcccaggcccaggaaatcaaagaaagctacgctttcgccgtactcggcgaacctaagtatgcttttaactttgagcactttgattatgtgaatcctgctgcgccgaaaggcggtcagatgacgctttccgccattggtacgttcgataatttcaatcgctattcgctgcgcggcaatcccggcgtacgtaccgaagccctttacgatacgctttttaccacctcggatgatgaacccggaagctattacccgctgattgccgaccatgcccgctatgccgccgactattcctgggtggaaatctcgattaatccccgcgctcgttttcacgatggcacgcccattaccgcccgcgatgtggcctttacctttcataagtttatgaccgaaggcgtaccgcagttccgtctggtctataaaggtactaccgtgaaggcgattgcgcctttaaccgtgcgaattgagctggcgaagcctggtaaagaagacatgcttagtctgttttcattaccgatcatgcccgaaaaattctggaaaaatcacaagctcagcgatccgctttcaacgccgcccttagccagcgggccataccggattactcagtggaaaatgggccagtacattgtctattcacgcgtcaaaaactactgggcggctaatctgccggtcaatcgtggacgttttaacctcgacactatccgctacgattactaccttgatgacaatgtcgctttcgaggcgtttaaagcgggcgcatttgatctacggctggaaaacgacgctaaaaactgggcaacgcgctatatcggtaaaaatttcgataatcattacatcattaaagaagaacagaaaaacgagtcggcgcaggacacacgctggctggcctttaatattcagcgcccggtatttaaagaccggcgggtacgtgaagctgtcaccctggccttcgattttgagtggatgaataaagcgctgttctataatgcctggagccgaaccaacagttacttccagaataccgagtacgccgccagaaattaccctgacgccgatgaactggtattactcgcgccgatgaaaaaagatcttcctcctgaagtcttcactcagatctatcagccgccggtctctaacggcgacggctacgatcgcgaaaatcttcttaaagctgacgccttgttgacgcaggccggatgggtgatcaacggacagcaacgggtcaatagcgtcaccggtaagcccctgacgtttgaacttctccttcctgccagcagtaatagccagtgggttctgcccttccagcataatcttcagcgtctgggcattacgatgactatccgtcaggttgataattctcaactcaccaaccggatgcgtagccgcgactatgacatgatgccgaggctatggcgggcgatgccctggcccagctccgatctacaaatctcatgggcgtcggaatacattgactccagttataacgctcccggcgtacaaagcccggtggtggataaactgatcgcgcaaattatcgcagcgcagggtgataaagcgaaactggtgccgctgggacgggcgctggatcgcgtgctgacctggaactattacatgctgccgatgtggtatatggcgcaagacaggctcgcccggtgggataaattctcccatccggcgattcgcccggtatataccatcgggttagatacctggtggtatgatgtcaacaaagccgccaaactaccggcagccaggaggtag

SEQ ID NO: 38676 - DNA, 1761 bp, Salmonella typhimurium
atgatttttacactccgcccctaccagcaagaagccgtagacgccacgctcagccactttcgccgccaccgtacgcccgccgtgattgttctgccgaccggcgcaggtaaaagcctggtgatcgccgaactggcgcgcgtcgcccgcggacgggtactggtgctggcgcatgtgaaagagctggtcgcgcagaaccacgccaaatattgcgcgctggggctggaagcggatattttcgccgccggactcaaacgtaaagagagtcagggcaaagtcgtgttcggcagcgtacagtcggtggcgcgtaatcttgacgccttccaggaggagttttcgctgttgattgtcgatgaatgccaccgcatcggtgacgatgaagacagtcagtatcagcaaatcctcactcacctgagtaaagttaatcctcacttacgtctgcttggactcaccgccacgccttttcgcctcggaaaaggctggatttatcaatttcattatcacggtatggtgcgcggcaacgacaacgctctgtttcgcgactgtatttatgaactgccgctgcgctatatgattaaacacggctatctgacgccgcctgagcggcttgatatgccagtggtccaatacgatttcagccgcctgcaggcccaaagcaatgggctgttcagcgaagccgacctgaaccgcgagctgaaaaagcagcagcggattacgccgcacatcatcagccagattatggaatttgcgcaaacgcgcaaaggcgtgatgattttcgccgccacggtcgaacatgcgaaagagattgtcggtctgcttccggcggacgacgcggcgctgattaccggcgatacgccagggcccgagcgcgacgcgctgattgataatttcaaggcgcagcgttttcgctatctggttaacgtctcggtactgaccaccggctttgacgccccacacgttgatctcatcgcgattctacgtcccacggagtcagttagtctttaccaacaaattgtcgggcgtggtctgcgccttgcgccgggaaagaccgattgcctgattcttgattacgcaggcaacccgcacgacctgtatgccccggaggtcggtagcccgaagggaaaaagcgataacgtccctgtccaggtattttgcccggcctgcggctttgccaacaccttctgggggaaaaccactgccgacggcacgctgattgaacactttggccgtcgctgccagggctggtttgaggatgacgacggccatcgcgagcagtgcgattttcgctttcgcttcaaaaactgcccgcagtgtaatgccgaaaacgatattgccgcccgacgctgccgggaatgtgacgccattctggtcgacccggacgatatgttaaaagcggcgctcaggctcaaggatgcgttagtcctgcgctgtagcggaatgacgatgcagcatgggcaggatgagaaaggcgaatggctgaaaatcacttactatgacgaggacggcgcggatgtcagtgagcgcttccgcttgcacacgcccgcccagcgtaccgctttcgaacagctatttattcgcccgcatacgcgcacgcccggcgttcctttacgctggatcacggcggcggatattgtcgcgcagcaggcgctgttgcggcatcccgattttgtggtcgcgcggatgaaaggccagtactggcaggtgcgtgaaaaagtgttcgactatgaaggccgcttccgccgggcgcacgaattacgtggttaa

SEQ ID NO: 38677 - DNA, 285 bp, Salmonella typhimurium
atgtttactatcaacgcagaagtacgtaaagagcagggtaagggtgcgagccgccgcctgcgcgccgctaacaagttcccggcaatcatctacggcggttctgaagccccgattgctatcgaactggaccacgaccaggtgatgaacatgcaagctaaagctgaattctacagcgaagttctgaccctcgttgttgacggtaaagaagtaaaagttaaagctcaggctgtacagcgtcacgcttacaaaccgaagctgactcacatcgacttcgttcgcgcgtaa

SEQ ID NO: 38678 - DNA, 1830 bp, Salmonella typhimurium
atgatctacaagaaattcagactcgatataaatgggctaagagcttttgcattgataagtgttgtgctgtatcacttcggtgtaccttatgtgtcaggtggctttataggtgtagatgttttctttgtaatttctggttttcttatgactggaattgtccttgaacgcgtagaccacaaaggagtacttgatttttatattgcaagattcctaagaattgtaccagctctggtatttgcaattctcttgttgatgattttcggtttatttacactaagtacaaatgaatacgaagcacttagcaagaacgcaatatcgtctttacttttttattcaaataattattacgcaattcactctagttatttcgactcatcatcagagttcaactttttgcttcacacctggtcactatcagttgagtggcaattttatattttatatcctttattagtcattatagttaaaaaattacggtttcctgttggactctcattatctgtaattttagccatgtcacttgcaattacacttatgcgagtgactggaaccaaagaagatattttctatcttatccctaccagggcatgggaaatgctggctggcggccttgtatacatagcatctgtacgttacaaaatgccagaatggataaagcattgtgaggtttatgggatagtcctcattgttgttgctgttgttatactgcacagtaatggttactggccaagctattcagcactcgctcccgtgctgggtgcttcgatggttattctggctaacaaacagaactctttattcacatcaaacagaattgcacagtgggtgggtaagatttcttactcagtttatttatggcactggcctgtaattgtagcgatgaaacattatgatattgagttcagcgctataaatattttctttggtgtaattgtgtcttttgcgcttggggatatttcatacagaacaattgaaaacacgctcaggaaacgagttaagctacaatttaatattgtattattttcctctactctggctctatgcttgtttgtcatgttcacaaaaggtgttagttttagattttcagacaccctaaagcaagtcgttgagtatcgtatggacaactctccctggaggcctgatatttgcttcctcaatccagatcaagattattcagcattctcaaaatgtcaggataaaatgactgaaaagtcttttgttgtatggggtgactcgcatgccgcacatcttatgccagggctgaaatcggtatttggaaattcacttaacattacgcagagaactgcaagcttgtgcccaccaatcattgggcttcaaaaagatgacaggccgtattgcaaagacatcaatgatatggtagccaaggaaatttcagacaacaagcctactacggtattaatgtccgcgttgtggcctgtctatcctatgcgtgattatctgcctgagactattaaattcctgaaggataacaaagtaaaaaacatcatcattgttggcccgttcccggtttggaagaaaacgatgattgatactattgaggatatggggattaattccggaaggaccgttccatggagcatgacggatgaaacccgtaatctgagagataatgacaaatatcttagagagctggcgaaagagcattcccttacttatatttcaccacttgagactatgtgtacagaaagttattgcaaagcaataatagggaatagaattgcttaccctatacaatatgacaatgcgcacctaacaccagaaggctcagggtggtttattgaggaagtgaaaaagcagatttcaaaataa

SEQ ID NO: 38679 - DNA, 1530 bp, Salmonella typhimurium
atgcgaattggcataccaaaagagcggttacccaatgaaacccgtgtcgctgcgacgccgaaaacggtagagcagctactgaagctggggtttagcgtcgctatcgaaagcggggcgggtcaactggcaagttttgacgacaaagcgtttgcgcaggctggcgcggatattgtagacggcaatgctatctggcagtcggaaattattctcaaggttaatgcgcctgaagaagaggaaatcgctttactgaaccccggaactacgctggtcagttttatctggcctgcgcaaaatcctgggttaatggagaaacttgccgaacgtaaggttacggtgatggcgatggactccgtgccgcgtatttcccgcgcgcagtcgctcgacgcgttaagctcaatggcgaatatcgcgggttatcgcgccattgtagaggccgcgcatgaatttgggcgcttctttaccgggcaaatcaccgccgccgggaaagtgccgccggcgaaggtgatggtgattggcgcgggcgtagccggtcttgcggctatcggcgcggcaaacagcctgggggcgattgtccgcgcgtttgacactcgtcctgaagtcaaagagcaggtccagagtatgggggctgagttcctcgaactggattttaaagaggaagccggtagcggcgatggttacgccaaagtgatgtccgaggcgtttatcaaagcggaaatggcgctctttgccgcccaggccaaagaggtcgatatcatcgttaccaccgcgttgattccgggcaaaccagcgccgaagctgattacccgcgatatggtcgattctatgaaggccggcagcgtgattgtcgacctggccgcgcagaatggcggtaactgcgaatataccgtcgccaatcaggttgtgacgacggacaatggcgtgaaagtaattggctacaccgatctaccggggcgtttgccgacgcagtcatcccaactttatggcaccaacctggttaatctgctgaagctgctgtgcaaagagaaagacggcaatattgacgtggattttgacgatgtcgtgatccgtggcgtgacggtgattcgcgacggcgacattacctggcctgcgccgccaatccaggtttccgcgcagccacaggccgcgcctaaagcagcacctgcgccaaaagagccggaaaagcccacttcaccctggcggaagtatgcgttaatggcgctggcgatcattctttttggctggctggccgatgtcgcgccaaaagagttcctcggccattttaccgtgtttgcgctcgcctgcgtggttggttattacgtggtgtggaacgtgtctcatgcgcttcatacgccattaatgtcggtgaccaacgcaatttcagggattattgttgtcggggcattattgcaaattggtcagggcggctgggtcagcttcctgagctttatcgcggtgcttatcgccagcattaatattttcggtggcttcaccgtgactcagcgtatgctgaaaatgttccggaaaaactaa

SEQ ID NO: 38680 - DNA, 495 bp, Salmonella typhimurium
atgaagatgtttgtccctgccgtcgtcttcgccgccctcgccagcgcctctgcctgggctaacaatggcgataccgcccagccgctggaaaaaatcgccccctatccgcaggcggaaaaaggaatgaagcggcaagtgataacccttacccctcagcaggatgaatctaccctcaaagtggaactgttgattggccaaacgctgaatgtggattgtaaccagcatcgcctcggcggcacgctggaaacaaaaacgctggaaggctggggctatgactattatgtctttgataacgtcacctctccggtatcaaccatgatggcctgccctgaaggtaagaaagagcaaaaattcgtcaccgcctggctgggtgaagacgggatgctgcgctacaacagcaagctgccgatcgtggtgtataccccggcgaatgtggacgtgaaataccgcatctggaaagcggacgctaacgtacagaacgccgtcgcgcgatga

SEQ ID NO: 38681 - DNA, 2670 bp, Salmonella typhimurium
atgagtcagtctgacacaacggtctctacccgattctcccttctaccgggaagcattacccgtttcttcttattgctgatcattgtgctgctggtaacgatgggcgttatggtacagagcgccgtcaacgcctggttgaaagacaaaagctatcaaattgtcgatatcacccacgctattcataaacgcgtggatacctggcggtatgttacctggcaaatttatgacaacatcgccgcgaccactacgccatcgacaggtgaaggacttcaggaaacgcgtctgaagcaggatgtgtattatcttgaaaagccgcgacgtaaaactgaagcgctgattttcggttcccatgacagcgccacgctggaaatgacgcagcgtatgtcaacttatctggatacgctgtggggcgcggaaaacgtgccgtggtccatgtattacctcaacggacaggataacagcctgattcttatctctaccctaccgttgaaagatctctcttccggctttaaagagtccactattggcaatatcgtcgattcccgccgggcagagatgttgcagcaggcgaatgcgctggatgagcgcgaaagtttctcctcattgcgaaaactggcctggcaaaacggtcactattttacgctgcgcacgaccttcaatcagccaggacatctggcaaccgtggtggcgtttgatctgcccattaatgatttaatcccgccgggaatgccgctggacagttttcggatagagcctgacgcaacccaagcgacggggcgaagcagtgaaaaggaagcgcctgatagcgtcacgattagctttaacggttcaaaaattgagatctcctcagcgcttaactctaccggaatgcgcctgatctggcaggtaccgttcggtacgcttttgcttgatacgttgcaaaatattttgctgcctttactgctgaacatcgggctgctggcgttggcgttatttggctacgccacgttccgtcatcagccgggacggtcgacggaatcgacatccggcaacgcggcgaataatgagcttcgcgtcttacgcgccattaatgaagagatagtttctctgctgccgctgggtctgctggtctacgatcaggaaggcaaccgcaccgtgatcagcaataaaatcgccgatcatctgttgccgcatcttaacctgcaaaatattaccagcatggcggaacagcatcagggcgtgattcaggcgacaattaataacgaactgtatgagatccgtctgtttcgcagccagatcgctccccgcacgcagatctttattattcgcgatcaggaccgggaagtgctggtgaataagaagcttaaacaggcgcagcgtttgtatgagaagaatcagcagggccgcgccgcctttatgcaaaatatcagcaacacgcttaaagagcccgtacgccaactggcggttaacgccgcagcagtcaccacgccggaaagcctgaaactggcggatcaggcggatgtattggtacgtatgatcgatgaaatccaactggcgaatatgctggaaaatgacgcatggaagagcgaagccacgctgttctccctgcaggatcttattgacgaagtcgtgccggaagtgctgcccgccattaagcgtaaagggctgcaactgctgattaataaccatcttagcggcaacgatgaacgctggggcgatcgtgacgccctgcgccggattttgctgctgttgattcagtatgccgtcacaacgaccgctatgggtaaaattacgcttgaagtcgagcaggatgaatctatcgcggagcgtctgactttccgtattctggatacgggcgaaggtgtaacgttaaacgagattgataatctgcatttcccgtatatgaatgaaacgcagggcgatcgttacggcaaagcgaatccgctcaccttctggctgtgcaatcaactggcgcgcaaactgggcggtcatctcaacattaaagcgcgagaaacgctgggcacgcgctataccgttcatgtcaaaatgcttcctcacgatcagcatactcaggtcgaagagcgcctgctggacgacgtgagcgtgatggtcgatgtgacgtccaacgaggttcgcgcgattgtgctgcgtcagttagaaaactggggcgccacctgcatcacgccggatgaaaggcagataagtcaagaatatgatctctttttaacggataatccgtctaatcttactgcctcgggcttgcttttaagcgatgatgagtcaggcgtgcggaaaattggcccgggtcagttgcgcgtcaactttaatatgagcaatgctatgcaggaagctgtactacaacttatcgaagagcagctggcgcaggaagagattcccgcctccccgctcggcggagatgaaaatgccgagcttcatgccagcggctattatgcgctatttgtagacacagtaccggatgatgttaagaggttgtatactgaggcggcaaccagcgatttcgctgcgctggcccaaacggcccaccgcctgaaaggggtgtttgccatgcttaatctggtacccggcaagcagttatgtgaaacgctggaacatctgattcgtgagaaagatgctccaggtatagaaaaatatatcagcgacattgacgcctacgtcaaaagcttgctgtag

SEQ ID NO: 38682 - DNA, 651 bp, Salmonella typhimurium
atgaacaatatgaacgtaattattgccgatgaccacccgattgtactgttcggtattcgcaaatcacttgaacaaatcgagtgggtgaatgttgtcggcgaatttgaagattccacagcattgatcaacaacctgccgaaattagatgcgcatgtgttgatcactgacctctccatgccgggagataaatacggcgatgggatcaccttgatcaagtacatcaagcgtcattttccgagcctgtctattatcgttctgaccatgaacaacaacccggcgatcctgagcgccgtgttggatcttgatattgaagggatcgtactcaaacagggtgcgccaaccgatctgcctaaggcgctggccgcgctgcaaaaaggcaaaaaattcaccccagaaagcgtttctcgtctgctggagaaaatcagcgcaggcggttacggcgataagcgtctgtcgccaaaagagagcgaagtattacgcctgttcgccgagggtttcctggtcaccgaaatcgccaagaagctcaaccgcagcattaagaccatcagcagccagaagaaatcggcgatgatgaaactgggcgtagagaatgatatcgcgctgctcaactatctctcttctgtcaccctgagtccgacagacaaagaataa

SEQ ID NO: 38683 - DNA, 1467 bp, Salmonella typhimurium
atgcaaaacaggcttttatcggcaaaggcgacgcttcctgattacgatcgcgcggcgctggcggcgcggatggtccatctcggttttggcgcgtttcatcgcgcgcatcagggggtttacacagatattctggctgcggagcagcatagcgactggggctattatgaggttaatcttattggcggcgaacagcagattgccgatctaaagcagcaggataacctctataccgtggcggagatgtcggcggaagcctggacggcgcgtgtggtgggcgtcgtcaaagcggcgttgcatgtccaggttgatggtctggaacgtgtgctggcggcgatgtgcgaaccgcaaatagcgattgtgtctctgaccattaccgagaaagggtattgtcattcgccagccacgggccaacttctgctggaacatcccatgattgccgccgacctgcaaaatccgcatcaaccgctaacggcaccgggtattattgtcgaagcgttagcgcgtcgtaaagccgcaggcttaccggcatttaccgtgatgtcctgcgataacatgccggaaaatgggcatgtgacgcgtcaggttgtgacggcttacgcccgggaggtggatgcggaactggcgatatggatcgagcaaaacgtgacatttccgtcaacgatggttgatcggattgtccctgcggtcacgccggagacgctggataaaatcgaacaactgaccggcgtgcgcgatccggcgggcgttgcctgtgaaccgtttcgtcagtgggtgatagaggatacgtttgtggcgggtcgtccgctgtgggaaaacgcgggcgcgacgttggtcgccgacgtggttccgtttgaagagatgaaactgcgaatgcttaacggcagtcattcattcctggcttatctggggtatcttgccggctatcagcatattaatgactgcatggctgacgacaactatcgtctgaccgcgcaggcgttaatgttacgcgagcaggcgcccacgctgaaagtccagggggtagatttacagcgttatgccgatcagttgattgcgcgttaccgtaatccggcgctgcgtcatcgtacctggcagattgcgatggatggcagccagaaacttccgcagcgtatgctggactccgttcgctggcatcttgctaatcatagcgattttgatttgctggcgctgggcgtggcggggtggatgcgttacgttggcggcgtggatgagcagggtaaggcgatcgacgtcagcgatccgctattgccggttattcagcgcgccgtggcaaacagtgaagaaggcgccagtcgtgttaaggcgctgctgggaatggctgaaattttcggcaacgatttgccgcaggcggcgcggtttacgcaaaaagtgcaagaagcctatgacagtttactgacatatggcgcgaaagcgagtgtggcgaaatatgccgagcggttgaaatag

SEQ ID NO: 38684 - DNA, 2286 bp, Salmonella typhimurium
atgaatcagagtctgctggtgacaaagcgtgacggccgtactgagcgcatcaatctcgacaaaattcatcgcgtgcttgattgggcggcagaaggactgaataacgtatcggtttctcaggtcgagctacgctcgcatattcagttttatgatgggattaagacctccgatatccatgaaactattattaaggctgccgcagacctgatctctcgcgatgcgccggattatcaatacctggctgcgcgtctggcgattttccacctgcgtaagaaagccttcggccagtttgagccgcccgcactttaccaccatgtggtaaaaatggttgagcttggcaaatacgacaatcatctgctggaagactacacggaagaagagttcaagcagatggattcgtttatcgttcacgatcgcgatatgaccttctcctacgctgccgttaagcagctggaagggaaatatctggtgcaaaaccgcgtgaccggcgaaatctatgaaagcgcacagttcctctacattctggtagcggcctgcctgttctcgaactacccgcgtgaaacgcgtcttgactatgtaaaacgtttttacgatgcggtctctacgttcaaaatttcgctgccgacgcccatcatgtccggtgtgcgtaccccaacccgtcagttcagctcctgcgtactgatcgagtgtggcgacagtctggattccatcaacgccacctccagcgcgattgtgaaatacgtttctcagcgcgccggtatcggtatcaacgctggccgcattcgtgcgctgggcagcccgattcgtggcggcgaagccttccacaccggctgcatcccgttctacaagcacttccagacggcggtgaaatcctgttcgcagggcggcgtgcgcggcggcgcggcaaccctcttctacccgatgtggcatctggaagtggaaagcctgctggtgctgaaaaacaaccgcggcgtggaaggcaaccgcgtacgtcacatggactacggcgtacagatcaacaaactgatgtatacccgcctgctgaagggcggcgacattacgctgttcagtccgtcggatgtacccgggctatacgatgcgttcttcgccgaccaggacgaattcgaacgcctgtacgtgaaatatgaacacgacgacagcatccgcaaacagcgtgtgaaagcggtcgaactgttctcgctgatgatgcaggaacgcgcctctaccggtcgtatctatatccagaacgttgaccactgcaatactcacagtccgttcgatccggttgtcgccccggtacgccagtctaacctgtgtctggagattgccctgccgaccaaaccgctgaacgatgtcaacgatgaaaacggcgaaattgcgttgtgtacgctgtctgcattcaacttgggtgccattaaaactctggacgagctggaagaactggctattctggcagtacgcgctttggatgctctgctcgattatcaggattacccgattccggctgccaaacgcggcgcaatgggccgtcgtacgctgggcattggcgtgattaacttcgcctactggctggcgaaaaacggtaagcgttattccgacggcagcgccaataatctgacgcataaaaccttcgaagccattcagtactatctgcttaaagcgtccaacgaactggcgaaagagcaaggcgcctgcccatggttcaacgaaaccacctatgcaaaaggcattttgccgatcgacacctacaaaaaagatctggatgcgattgtcaacgaaccgctgcactacgactgggaacagctgcgtgagtcgatcaaaacccacggtctgcgtaactccacgctatcggcgctaatgccgtcggaaacgtcgtcccagatctccaacgccaccaacggcattgagccgccgcgcggctacgtcagcatcaaggcctcgaaagacggtattttgcgtcaggtcgtgccggattatgagcatctgaaagacgcttacgaactgttgtgggagatgccgaacaacgacggttatctgcaactggtgggtatcatgcagaagtttatcgatcagtcgatttccgccaataccaactacgatccgtcacgtttcccgtcaggaaaagtgccgatgcagcaactgctgaaagatttgctcaccgcgtataagtttggcgtgaaaactctgtactatcaaaatacccgcgacggcgcggaagatgcgcaggacgatttggcgccttctattcaggacgatggctgcgaaagcggcgcttgtaagatctga

SEQ ID NO: 38685 - DNA, 1131 bp, Salmonella typhimurium
atggcatacaccactttttcacagacgaaaaacgatcagctcaaggaacccatgttctttggccagccggtcaacgttgcacgctatgaccagcagaaatatgacatcttcgaaaaactgatcgaaaaacagctctctttcttctggcgtccggaagaggtcgacgtctcccgcgatcgtatcgattatcaggcgttgccggagcacgaaaaacatatcttcatcagcaacctcaaataccagacgctgctggattccattcagggacgtagcccgaacgtcgccctgctgccgctcatttccatcccggagctggagacgtgggtagagacctgggcgttttctgagacgattcactcacgatcctacacccacattattcgtaacatcgtcaacgatccggctgtcgtttttgacgatatcgtgaccaatgagcaaattcagaagcgcgccgaaggtatctccgcctactacgacgaacttattgagatgaccagttactggcacctgctcggtgaaggcacccataccgttaatggcaaaacggttgtcgtgaatctgcgtgagctgaagaaaaaactgtatctgtgcctgatgagcgtgaacgcgctggaagccatccgcttctacgtcagcttcgcctgctctttcgcatttgccgagcgtgaactgatggaaggcaacgccaaaattatccgtctgatcgcccgtgacgaagctctgcatctgaccggcacgcaacatatgctgaacctgttgcgtagcggcgtggacgacccggagatggcggaaatcgccgaagagtgtaaacaggaatgttatgacctgttcgtgcaggcggcgcagcaggaaaaagagtgggcagactatctgttccgcgacggttcgatgatcggcctgaataaagatatcctgtgtcaatacgttgaatatattactaatattcgtatgcaggcggtggggctggatctaccgttccagacccgctccaacccaatcccgtggatcaatacctggctggtgtccgataacgttcaggtcgctccacaggaagtagaagttagctcttatctggtcggacaaatcgattcggaagtcgataccgacgatctgagtaatttccagctctga

SEQ ID NO: 38686 - DNA, 1191 bp, Salmonella typhimurium
atgagcgacacacgttttgaaagttgtataaaatgtacggtgtgcaccaccgcgtgcccggtcagccgcgttaatcctggctaccctggccctaaacaggccggaccggatggcgaacgcctgcgtctgaaagacggcgcgctgtatgatgaggcgctgaaatattgcattaactgcaaacggtgtgaggtcgcctgtccgtcggacgtgaagattggcgatatcatccagcgcgcccgcgcgaaatacgatacgacgcgcccgtcattgcgtaactttattctcagccataccgatctgatgggcagcgtttcaacgccgttcgcgccggtggtcaataccgccaccgcattaaagccagtgcgccagttgcttgattacgcgctcaaaatcgatcatcgccgcaccttaccaaaatactctttcggcaccttccgccgctggtatcgtagcgtggcggcgcagcaggctaaatacaaagatcaggtcgcctttttccatggctgttttgtgaattacaaccatccgcagctcggaaaagatctgattaaggtgctgaacgcaatgggtactggcgtacagttactgagtaaagagaagtgttgcggcgtaccgctgatcgctaacggttttacggataaagctcgcaaacaggctatcagcaatgtggagtcgctacgcgaggcgattgccgtcaaaggtattccggtcatcgccacgtcatccacctgtacgtttgcgttgcgcgatgaatatcctgaagtgctggacgtggacaacgccgggctgcgcgaacatatcgagctggccacccgctggctatggcgcaaactggatgcagggaaaacgctgccgcttaatcctttgccgctgaaagtggtctaccatacgccgtgtcatatggaaaaaatgggctggacgctttacacgcttgaactgttgcggcaaattccggggcttgaattgacggtacttgattcacagtgctgcggcattgccggtacgtatggatttaaaaaggaaaactatccgacatcacagtccatcggcgcgccgctgttccgccagattgaagagagcggcgccgacattgtcgtcaccgattgtgaaacctgtaagtggcaaattgagatgtctacaagcaaacgctgcgaacaccccattacgctactggcccaggcgctcggctaa

SEQ ID NO: 38687 - DNA, 954 bp, Salmonella typhimurium
gtgagcgatgaggcgcttacattgttgtttagcgccgtagagaacggtgatcagaattgtattgatctgttatgcaatcttgcgttacgcaacgatgacctggggcatagagttgagaaatttctttttgatctctttagcgggaaaagaacgggatcatcagatatagacaaaaaaatcaatcaggcttgccttgtattacatcaaatcgccaataacgatataacaaaagataatactgagtggaaaaagctacatgccccttccagattactttatatggcaggttccgcgacaaccgacctttctaaaaaaataggaatagcacataaaattatgggcgaccagttcgctcagacagatcaagaacaggtaggagttgaaaatctttggtgtggtgcgcgaatgttgtcgtcagatgagctagcagctgcaacgcaaggtctggttcaagaatcacctcttctctcggtaaactatcctattgggctgattcatcctaccaccaaagaaaatatattaagcactcagctacttgaaaagattgctcaatcaggattatctcacaatgaagtcttcctggtaaatacaggagatcactggcttctctgtttattttataaacttgcagaaaaaataaaatgccttatatttaatacttattatgatttaaatgaaaatactaagcaagagattatagaagcagcaaaaattgcaggcatatcagaaagcgatgaggttaattttattgaaatgaatttacagaacaatgtacccaacggctgtggtctattttgttaccatacaattcaactcttatcgaatgccggacaaaacgatcctgctaccacactacgagaatttgcggaaaatttcttaacgctttcagtagaggaacaagcactatttaacacccaaacccggcggcaaatatatgaatacagtctccagtaa

SEQ ID NO: 38688 - DNA, 666 bp, Salmonella typhimurium
atgatggatttgtttaaagcgattggattggggctggtcgtactgctcccgttagccaatccgctaaccaccgtggcgctgtttcttggccttgcgggcaatatgaatagtgcggaacgcaaccggcagtcctatatggcttcggtttatgtcttcgctattatgatggtggcgtactacgccgggcagttagtcatgaacaccttcggtatttcgattccagggctacggatcgccggggggttaatcgtggcgtttatcggcttcagaatgcttttcccgcagcagaaggcgcatgagtcgccggaagcgaaaagcaaatcggaggagctggcagacgaaccgacggccaatattgcgtttgttccactggctatgccaagcaccgcaggaccggggaccatcgcaatgatcatcagttccgcttccacggtgcgtcatggcggcgagtttcccgactgggtcattatggtcgcgccgccgattatttttcttgccgtggcggtgatcctgtggggatgcttacgcagttctggcgctattatgcggctggtgggtaaaggggggattgaagcgatctcccgcttaatgggattcctgctggtgtgtatgggcgtgcaatttattatcaacggcgtgttggaaattattaaaacgtaccactaa

SEQ ID NO: 38689 - DNA, 1983 bp, Salmonella typhimurium
atgaaagccgttatttttgcctatcacgatatgggatgtcagggggtgcaggccgtactggatgccgggtatgagattgccgcgattttcactcatgccgacaatcctgcggaaaacaccttttttggctccgtctcccggcaggcggcagaattagggattccggtttatgcaccggataacgtaaaccatcctatctgggtcgaccgcatcgctgagcttgcgccggatattattttttcgttctattaccgcaacctgttaagcgaagaaattctgcacctcgccccggctggcgcgttcaatctgcacggttctctattgcctgcctatcgtggccgtgcgccgctaaactgggttctggttaacggcgaaagcgaaacgggcgtaacgctgcatcgtatggtcaaacgtgccgacgccggagagattgtcgccagtcaacgcgtcgctattgcgcaggacgatgttgcgcttaccctgcatcataagctatgtcaggccgcgcgccagttgcttaatagcatcctgcccaccatgaaatgcggcgatataccttctgttccccagcgtgagtctgactctacgtattatggtcgccgcaggccggaagatggccttatcgactggcacaaaccggtttccacggtgcataacctggtgcgggcggtagccgccccctggcccggcgcgttcagctataacggctcgcaaaaattcactatctggtcttcccgaatgtgtccggatgcgcaaggcgcgcttcccggctcggtaatttcggtctctccgctgcgggtcgcctgcgccgatggcgcgctggagattattaccggccaggccggagacgacattactgtacagggctcgcagcttgcacagacgcttggtctggtggcgggcgcgcgtttgaaccgtccaccagcgaccagcggtaaacgtcgcattcgcgttctcatcctcggcgtcaacggttttatcggcaatcatttgaccgaacggttactgaatgaagagaattacgaggtctacggtatggatatcggcagcaacgccattagccgattcctgctccaccctcgatttcatttcgtggagggagatatcagcatccactcagaatggatcgaatatcatgtcaaaaaatgcgatgtcgtactgccgctggtagcaattgcaaccccgattgaatacacccgcaacccgctgcgcgtctttgaacttgattttgaagaaaacctgcggattatccgttattgcgtgaaataccgtaaacgcgtggttttcccgtctacctctgaagtgtacggcatgtgtacggacgcctcttttgacgaagacaaatcgaatctgatcgtcgggccggtgaataagccgcgctggatttactccgtttccaaacagcttctcgaccgggtgatttgggcttatggcgaaaaagagggattgcgcttcacgcttttccgtccctttaactggatggggccgcggctggatagcctgaacgcggcgcgtatcggcagttcacgcgcgataacgcagttgattctgaacctggtagaaggaacgccgatcaagcttatcgacggcggtcagcagaagcgctgttttaccgatattcgcgatgggatcgaagcattattccgcattattgtgaatgatggcgatcggtgcgatggcaaaatcattaatatcggcaatcctgacaacgaagccagtattcaggaactggcgacgctgttgctcgacagttttgataagcatccgctgcgctgccatttcccaccgtttgccggtttccaggtcgtcgaaagccgtagttattacggcaagggttatcaggatgtcgcacaccggaaacccagtatcgacaatgccaggcgctgtctgggctgggagccgtctattgcgatgcgtgatacggttgaagaaacgctggacttctttctgcgtagcgtcgatatcgcggaacgcgcatcatga

SEQ ID NO: 38690 - DNA, 1104 bp, Salmonella typhimurium
atgcaaacacaagatacattttatcaagttatgcgtagacacggcgtgacaaggcgtagcttcctcaagttttgcagccttaccgcaacgtctttaggcctgagcagttcgatgattcctcaaatagcttatgccctggagaataaaccgcgtacgccagtgatatggctgcatggtcttgaatgtacctgctgtaccgaatctttcattcgctctgcgcacccgttggcaaaagatgccattttgtcgctcatttccctggattatgacgacaccattatggccgccgcagggcaacaagctgagcaggcgttggcggatgtgatgcgtgagtacaaaggaaattatatcgttgctgtggaaggtaacgcgccgctgaatgaagatgggatgttttgcatactggctggcgagccgttcctggagaagttaaaacgcgtcagcgcggatgctaaagcgattatcgcctgggggtcctgcgcatcatggggctgcgtgcaggcagcccgtcccaacccaactaaagccacgccggttcacaagttaattaccgataaacccattattaaagtgccaggctgcccgcctatacctgaagtgatgtccgccgttatcacctatatgctggcatttgatcgcatccctccccttgatcgtcttggacgaccaaaaatgttttatggccagcgaattcatgacaaatgttaccgacgcgcgcatttcgatgccggtcagtttgtggaagcgtgggatgacgaaggcgccagaaaagggtattgcctgtacaagatgggctgtaaaggcccgaccacctataacgcctgttcaaccgttcgctggaatgatggcgtgtcttttcctatccagtcgggtcatggatgcctcggatgttcggaagatggattctgggattacggttctttttacagccgggcaacgggcattccgcaaaccggcattgaggctaccgccgataaaatcggactgggcgttgctggcgtcgcgggcgctgccgccatcgctcacgccacggtgagcgccataaaacatgcccgcaataaaaacaacacgtcatcagaaaacgctccggaagagaaaaaataa

SEQ ID NO: 38691 - DNA, 1092 bp, Salmonella typhimurium
atgatgaaaaaaagtaaagcaatgttatttatcgctccggcgctgttttcatacgccctggcggcacaggcctgcacgacccttgctattcaggataaacaaggcgatatttttcatgggcgtacgctggaatatatgcaggatttaccctcatggttaacgtattacccggcgggaacacagtttgataaaaaaacgccggatggcagccaggggataagctatcaggcgaagtatccgatactggccattacttccaccattactgatggcgatagcagagacatacttgaaggcatgaatagcgcgggattgtcatttagtgaaaacatgatcatgaatgcgcagttgccgccattgcccgcgagtgaatataaacaggcaattcctgtcacctcgttgggagaatgggcgctggcccgttttgctactgtcggcgaggtaaaacaggcaataaaagagggcaaattctggtcaccagaactgcatcggtttggcgatctgaaatcgccatttcattacgcgttttacgacaagaaaggaggaagcattgtcgttgaagtggaaaatggtaaattccatgtctatgacaatcccactcgcgtgatgacaaatggtcccgcattcccctggcatctgacaaatctgaataattatacgcaattaaccaatgtggaccgctcttcaggcacactgggcgggataaaagtgatgcagcctgatagcgggattgctattgcagacttgccatcgtccgatacgtcggtttcccgttttatacgcggcgtttattacaccacatatgcgccgcaagcgacatccgcccacgatgcaatgaatacgcttgcgcatattatgagccgtttcgatcgtccgaaaaatattacggttgattatatggggagtgaaggggaaggcaacgccacccgcaaaccggtctcagaatatacggtctggacaacgctgtctgacttaatgcacggtgagatgatggtgcgcggctacaatgatatcaactataaaacctggtctctttctcagtttaagaacgcgacagcgcccgtgttcgagaaaatcaacgtcaaaggataa

SEQ ID NO: 38692 - DNA, 378 bp, Salmonella typhimurium
atgggcgtaatgtggggactgataagcgttgcgattgcctccctcgcccagttgagtttaggattcgccatgatgcgactgccatcgatagcgcatccactggcgtttatttccgggctgggcgcatttaatgccgcgaccctggcgctattcgccggtttggcggggtatctggtttccgtcttctgctggcagaaaacattacacacgctcgcgctcagcaaagcctatgcgctactgagtctcagctatgtgcttgtctgggtagcctcaatgctgttacccggtttgcaaggcgctttcagcctaaaagcgatgctcggcgtattgtgtattatggcgggggtaatgctgatttttctgcccgccagatcatga

SEQ ID NO: 38693 - DNA, 1062 bp, Salmonella typhimurium
atgtcaccaaccatgctgacctatattaacgaagagtctgacgtcctggcgaatattattcgccgccatcgccagtctctggaagaagtatcgcggttcgccagccaaaaaacgttacgacgaatcctgatattagccaccggatcgtcattgaatgccgccttttgcgcccgttatttctttgagcgctgcggtatctctatcgatattaaagagccgtacacctttagccagtatgagaatagcgatccgcaagccgatatggttattgctatttcccagagcgggaaaagcgcttctaccctggaggcgatgcgtaaagttcaggcgcagggacgtccggtattcgctctgaccgccgatccgcaaagccctcttggcaaggccagtgattatccactggatattctgaccgggattgagtccgtcggctttgttacccgtggatttagcgcgacggtattgaatctgttgcttatcgcgttgttaattgcccgtcagcagcagcgactgacggaatcgcaggtcgaggagtatgtggcgcagcttcaacgtatcgcggcaaccctgccgttggttatcgtgcgtacggaagcgtttattcaccagcaccaggccgttttacgaaacgggacgcgttttgtggcgacaggctacggcgcgctggttggggtggcaaaagagttggaaactaaatttaccgagacggtgcgtgttccctcaagcgggtttgagctggaagcctatatgcacggcccgtatctggaagccaatgcggaacacgtgatgttcttctttgaggaccggcccgacgcgcgctccagggcgctacgggagtatatgacgcctgcggtcgccaaaacctttactctcacgctggcgaaggcggcgcaggatgaccagacgcttgcgctggatgtagcggttgatcaccatttctcgccattactgttgattgtgccggtacaactcatggcgtttcatatcgcctcactgaaaggcatcgacctttcggtacgcatttttgacgatttcgatcgcgttttaaaaagtaaaatctga

SEQ ID NO: 38694 - DNA, 216 bp, Salmonella typhimurium
atgtttacttatcactcagcaaatacctcagcagcacaaccggccctggtcaacgcgattgaacaaggattacgcgcggagttaggcgttgtcactgaagatgatattttaatggagctgaccaaatgggttgaggcttccgacaatgacatcctcagtgacatctaccagcagaccatcaactatgtggtaagcgggcagcacccgactctgtaa

SEQ ID NO: 38695 - DNA, 1590 bp, Salmonella typhimurium
atgacgttgtctccttatttgcaagaggtggccaaacgccgcacttttgccattatttctcacccggacgccggtaaaaccaccattaccgaaaaagtgttgctgttcggacaggcgattcagaccgccggtacggtaaaaggccgtggctccagccaacatgcaaaatctgactggatggagatggaaaaacagcgtggtatctctatcactacctcggtgatgcagttcccgtatcacgactgtctggtgaatctgctggacaccccggggcacgaagacttctccgaagatacctaccgtaccctgacggcggtggactgttgcctgatggtgatcgacgccgcaaaaggcgttgaagacaggacccgtaagctgatggaagttacccgtctgcgtgatacgccgatcctgacctttatgaacaaactcgaccgtgacatccgcgacccgatggagctgctggatgaagtcgagaacgagctgaaaatcggctgcgcgccgatcacctggccgattggctgcggcaagctgtttaagggcgtttatcacctttataaagatgaaacttatctgtatcagaccggtaagggccacaccattcaggaagtgcgcatcgttaaagggctgaataacccggatctggacgccgccgtcggtgaagacctggcgcaacagctgcgcgacgagctggaactggtgcagggcgcgtctaacgagtttgatgaagagctattcctggcaggggaaattaccccggtatttttcggtaccgcgctgggtaactttggcgttgaccatatgctggatggtttagtggcgtgggcgcccgcgccgatgccgcgtcaaaccgatacccgcacagtggaagcctcggaagagaaattcaccggttttgtctttaaaattcaggccaatatggacccgaaacaccgcgaccgcgtggcgtttatgcgcgtggtttccggtaagtatgagaagggcatgaagctacgccaggtccgtaccggcaaagatgtggtgatttccgacgcgttaacttttatggcgggcgaccgttcgcacgttgaagaagcgtacccgggcgatattttgggtctgcataaccacggcaccattcagatcggcgataccttcactcagggcgagatgatgaagtttaccggtatcccgaactttgcgccggaactgttccgtcgtattcgcctgaaagatccgctcaagcagaagcagctactgaaagggctggtgcagctttctgaagagggggcggtgcaggtattccgtcccatctccaacaacgatctgattgttggcgccgtgggcgttttgcagtttgacgttgttgtcgcgcgcctgaaaagcgaatacaacgttgaggcgatttatgaatccgtcaacgtggcgacggcgcgctgggtggaaagcgccgatgcgaagaaattcgaagagtttaagcgtaagaatgaaacgcagctggcgctggatggcggcgacaaccttacctatatcgcccccacgatggttaacctgaacctgacccaggaacgttaccctgacgttcagttccgtaaaacgcgcgaacactga

SEQ ID NO: 38696 - DNA, 1011 bp, Salmonella typhimurium
atgaaagctgctgttgtcacacaagatcatcaggttgatgttactgagaaaacgctgcgtccccttcgccacggtgaagctttgctaaaaatggagtgctgcggcgtatgccataccgatctacacgtgaaaaacggcgatttcggtgacaaaaccggcgttattctgggacacgaaggcattggcgtcgtggcggaagtcggtcctggtgtcacctcgctgaaacccggcgatcgcgcgagtgtcgcgtggttttatgaaggatgcggacactgtgagtattgcaatacgggcaatgaaaccttatgccgcaacgtgaaaaatgccggttacacggtagatggcggtatggccgaagagtgtattgtcgtcgcggattatgcggtgaaagtaccggaaggtctggactctgcagcggcaagtagtattacctgcgcgggcgttaccacctataaagcggtgaagatttctcatattaaacctggccagtggattgccatctacggtctgggcggtctgggtaatctggccttgcagtacgcgaaaaacgttttcaatgcgaaagtgatcgccattgatgtcaatgatggacaactgaaactggccgaggaaatgggcgcagatctgaccattaattcacgtacggaagatgcggctaaaattgtgcaggaaaaaaccggtggcgcgcacgcagcggtggttaccgcggtcgctaaggcggcgtttaattccgcagtagatgccgttcgcgccggaggccgcgtggtggcagtcgggttgccgccagaagccatgaaccttgatatccctcgcctggtgctggatggcattcaggttgtcggttcgttggtggggacacgccaggatctgaccgaagccttccagtttgcggcggaaggaaaagtcgtgccaaaagtcgctttacgtccgcttgaagatatcaacgttatttttaaagagatggaacagggacaaattcgtggccgtatggtcatcgatttccgtcgttaa

SEQ ID NO: 38697 - DNA, 825 bp, Salmonella typhimurium
atggttgggttaattcgcggcgtcagcgaaggtctcggaccggtaggcggcgcagccatgatctattcattaagcggtctgctgctgatttttaccgtcggattacctgatatccgccgtttcccggggcgatacctcatcgcaggcagcgtactgtttgtcagttatgaaatatgcctggcgctttctctcggttatgccgccactcgccatcaggctatcgaagtcggcatggttaactatttatggcccagcctgaccattctgtttgccattctttttaatgggcaaaaaactaactggcttattgttcctggattgcttattgcacttactggcgtttgctgggttctggggggcgagaatggtcttaatcccggagaaattatcagcaatgtcgccaccagtccgctaagttatttactggcatttcttggggcgtttatatgggcgacgtactgcacggtcaccaataaatatgcgcgtggttttaacggtatcaccgtctttgtgttactcaccgccgtggcgctgtggttacactattttcttacgccgcaacctgccatgatatttagcctaccggtgattgctaaactttttaccgcggcattaacgctggggtttgcctacgcagcatggaatgtgggcatacttcatggcaatgtgactatcatggccgtagggtcttattttacccccgtcatgtcctctgctctggcagcgctgttactcagctcaccactgtcattctccttctggcaaggcgcagtcatggtttgcgtaggttcgctactttgttggctggcaacgcggcggcgctaa

SEQ ID NO: 38698 - DNA, 798 bp, Salmonella typhimurium
atgccgttggagaatgtcatgactgatttaaaagcaagcagcctgcgtgcgctcaaactgatggatctgaccactctgaacgatgacgacaccaatgaaaaagtgatcgcgttgtgtcatcaggcaaaaactccggtcgggaatacggcggcgatttgtatttacccgcgttttatcccgattgcgcgtaaaactctgaaagaacaaggtacgccggacatccgcattgcaacggtgactaacttcccgcatggcaatgatgacatcgatattgcgctggcggaaacccgtgcggcgatcgcctacggcgctgacgaagtggacgtggtattcccgtaccgcgcgttgatcgccggtaacgagcaggtgggttttgacctggtaaaagcctgtaaagacgcttgtgccgcagcgaacgtattgctgaaagtgattatcgaaaccggcgagctgaaagaagaggcgctgattcgtaaagcctctgaaatctccattaaagccggtgcggatttcatcaaaacctctaccggtaaagtgccggtaaacgctacgccggaaagcgcgcgcatcatgatggaagtgatccgcgacatgggcgtttccaaaaccgttggcttcaaaccggcgggcggcgtacgtacggcggaagacgcgcagaaattcctcgcgattgcagacgaactgtttggcgctgactgggcagattctcgtcactaccgctttggcgcatccagcctgctggcaagcctgctgaaagcgctgggtcacggcgacggtaagagcgccagcagctactaa

SEQ ID NO: 38699 - DNA, 1389 bp, Salmonella typhimurium
atgacacgacaaaacgagaattataaccgttatctcttgagtgactggcgacccgaaaatccagccttctgggagaataaagggaaaggcatcgccagaagaaacttatggatttcagtaagttgtttgctcctggcattttgcgtctggatgttgtttagcgctgttgccgtcaacctcaataaaattggatttaattttaccaccgaccaactctttttattaaccgcattaccttctctttccggcgcaatattacgcgttccctactcctttatggtgccactgtttggtggtcgtaaatggaccgtattaagcaccgtaatattgattattccctgcgcctggctgggattcgccgtacaaaatcccgccacccctttcggggtatttatgctcatcgctctgttgtgcggttttgcgggggcaaacttcgcgtccagtatgggcaacatcagttttttctttccaaaagccagacaaggtagcgcgttgggtattaacggcggactgggaaatcttggcgtcagtgtgatgcagttgattgcgccgctggttatttttctgccgatatttacttttttaggcgtccagggcgtgccgcaacctgatggctccctgctcgccctcactaacgccgcctggatctgggtgccgttactggctgtcgcgacgcttgccgcctggtttggtatgaacgatatcggcagttcaaaagcgtctgtcgcctcgcaattgccggtgctaaaacgtctgcacctgtggctgcttagcctgctgtacctggcgacattcgggtcattcatcggcttttccgcaggtttcgccatgctcgccaaaacgcaatttcccgacgtaaacattctgcaactggcgttctttggcccctttatcggcgcgctggcgcgatcggcaggcggcgtgatctccgataaattcggcggcgttcgcgtaacgctcattaattttatctttatggcgctgtttaccgccttgctattcctcacgctgccaggctccggcgcaggcagctttagcgcgttctatcttgtttttatgggcctgtttttgacagcgggtctcggcagcggttctaccttccagatgattgcggtgatcttccggcagatcacgctctacaacgtcaaactgcgcggcgggagcgatgagcaggcgcagcgcgaagcggtgacggataccgccgccgcgctcggttttatctccgctattggcgctgtgggcggcttctttattccaaaagcgtttggcacctctttggccttgaccggctcgccggtgggcgccatgaaaatctttttgctgttttacctcgcttgcgtcctgctgacctggctggtctacgggcgtcgtaagcctaaacaacaataa

SEQ ID NO: 38700 - DNA, 3741 bp, Salmonella typhimurium
atgagtaaactgttggatcgctttcgttactttaaacaaaaaggcgatacctttgccgacggccatggtcaggtgatgcataccaaccgcgactgggaagacagttatcgccagcgctggcagtttgataagatcgtgcgctcaacccacggcgtcaactgcacgggctcctgtagctggaaaatttatgtcaaaaacggtctggtgacgtgggaaacccagcaaaccgactacccgcgcacgcgtcccgatttaccgaaccatgaaccgcgcggctgcccgcgcggcgccagctactcctggtatctctatagcgccaatcgtctgaaataccctctggtgcgtaagcggctgatagaactgtggcgcgaggctctttcccggcacagcgatccggtgctggcatgggaatctataatgaacgacccgcaaaaatgccaaagttacaaacaggtgcgcggacatggcggctttattcgttcgaactggaaagagctgaatcagctcattgccgccgctaacgtctggacaatcaaaacctatggtccggatcgtgtggcggggttttcacctattccagcaatgtcgatggtttcttacgccgccggaacacgttatctgtcattgcttggcggtacttgtctgagcttctatgactggtattgcgatcttccgcccgcgtcgccaatgacctggggcgagcagactgacgtgccggagtccgccgactggtataactcagcctacattattgcctggggctctaacgtgccgcagacgcgtaccccggacgcccacttctttaccgaagtgcgctacaaaggcaccaagacgatcgccatcaccccggactattccgaagtcgctaaactgtgcgatcagtggctggcgccaaagcaaggtaccgacagcgcgctggcgatggccatgggtcacgttattttaaaagagtttcatctcgataatcccagcgactattttcttaactattgccgccgttataccgacatgccaatgctggtcctgttggatgagcgcgcagacggcagttatgtaccggggcgtatgatgcgcgcgtcggatctggtggatggactgggagaagccaataatccggaatggaaaaccgtcgcgctcaacagtacgggcgaactggtcgcgcccaacggttctatcggttttcgctggggcgaaaagggaaaatggaacctggaaccggtggcggcgggcgtcgaaactgaactgtcgctctctttactcggtcagcatgatgacgtggcgggtgtcgctttcccctattttggcggcaacgaaaacccacattttcgcagcgtgcggcaggaaccggtgctggtacgtcagttaccggtgaaacgcctggctctggcggacggtagcgagcggatggtcgtcagtgtttacgatctggtgctggcgaattatgggctggatcgtggtctggatgacggccatagcgccaataattataacgacgtaaaagcctacacgccggcctggggcgaacagattaccggcgtgccgcgtcgacatatcgaaactattgcgcgtgaatttgccgagaccgcccataaaactcacggtcgttcgatgatcatcctcggcgcgggagtgaatcactggtatcacatggatatgaattaccgtgggatgattaacatgctggtgttctgcggctgtgttggacaaaccggcggcggctgggcgcactatgtcggccaggagaagctgcggccgcaaaccggctggctgccgctggccttcgcgctggactggaatcgcccgccgcgtcagatgaacagtacctcgtttttctacaaccatgccagccagtggcgctatgaaaaactgactgcgcaagagttgctgtcgccgctggccgatccggctaaattttccggacacctgatcgatttcaacgtgcgcgcggaacgtatgggctggctaccctcggcgccgcagcttaatcttaacccgctcagcgtgaaagcgagcgccgataaagccgggctgtctgcggcggattataccgtgcaggcgttgaaatcaggcgctatccgttttgcctgcgaacagcctgacagtggtcataatcacccgcgaaatttatttgtctggcgctctaacctgctcggctcctccgggaaaggtcatgagtacatgctcaaatatctgctgggcacagacagcggtatccagggcgaagcgctgggttccagcgaaggaattaagcctgaagaggtggaatggcagtccaccgcgattgagggcaagctcgatctgttggtcacgcttgatttccgtatgtccagtacctgtctgttttccgatatcgttttgccgaccgccacctggtatgaaaaagacgatatgaatacctcggatatgcatccgtttatccaccccctttccgctgcggtcgatcctgcctgggaatccaaaagcgactgggagatctacaaaggtatcgccagcgtcttttctgaagtgtgtgtcggacacctcggacaggaaaccgatgtggtgctacacccgctccagcatgattccccggcggaactggcgcagccatttgatattctcgactggcgtaaaggcgagtgcgaacttattccgggcaaaaccgcccccaatatcgtcgtggttgaacgcgattatccggccacctatgaacgttttacctcgctgggtcccctgctggataaattaggcaacggcggtaaggggattgcctggaatacgcaagatgaagtcgatttcctcggtaagctcaattacaccaaacacgatggcccggcgaaaggacgtccgcgaatagacaccgcgctggatgcttcggaagtgattcttgccttagcgccggaaactaacggccaggtggcggtgaaagcctggcaggcattgggcgagatgaccgggcgcgagcacacccatctggccatcaataaagaagatgagaaaattcgctttcgtgatatccaggcgcaaccgcgcaaaattatctccagcccgacctggtcaggactggaaagcgagcatgtctcttataacgccggatataccaacgtacatgaactgatcccgtggcgcacgttgtcggggcggcaacaactctatcaggatcatgcgtggatgcgcgcttttggcgaaagcctggtggcatatcgtccgccgattgatacccgcagcgtcagcgaaatgcgagaaattccgcccaacggtttcccggaaaaagcgcttaacttcctgacgccgcaccagaaatggggaattcactccacctacagcgaaaacctgctgatgctgaccttgtcgcgcggcgggccgattgtctggatcagcgaagccgatgcccgtgaattgggtattgaagataacgactggattgaagccttcaacgctaatggcgcccttaccgctcgtgcggtggtcagccagcgcgtcccgccgggtatgaccatgatgtaccacgcccaggagcggattatgaacattccgggttcggaagtgaccgggatgcgcggcgggatccataactccgtgacccgggtctgtccaaaaccgacgcatatgatcggcggctatgcgcaactggcttacggcttcaactattacggaaccgtgggttcgaatcgcgatgaattcatcatgatcaggaagatgaaaaacattaactggctggatgatgagggccgggatcaggtacaggaggcgaaaaaatga

SEQ ID NO: 38701 - DNA, 1545 bp, Salmonella typhimurium
atgaaaatacgctcacaggttgggatggtactgaatctcgataaatgtattggctgtcacacctgctccgtcacctgtaaaaacgtctggaccggacgtgaagggatggaatacgcatggttcaataacgtcgaaactaaaccaggcatcggctatcccaaaaactgggaggaccagcaggagtggcaaggcggttgggttcgtgatgttaatggcaagataaggccccgtctgggcggcaaaatgggggtaattagcaaaattttcgccaacccggtgattccgcaaatcgatgattactatgaaccctttaccttcgattatcagcatttacataatgcgccggagagtaagcatcagcccactgcccgccctcgttcactgatcgacggaaaacggatggacaaggtgatctgggggccaaactgggaagagctgctcggcggcgagtttgaaaaacgcgcccgcgaccgcaacttcgacaacatacaaaaagagatgtacggtcagttcgaaaacaccttcatgatgtacctgccgcgcctgtgcgaacactgcctgaaccccagttgtgtcgccacctgcccaagtggcgctatttataagcgtgaagaagacggcatcgtgctaatcgaccaggataaatgccgaggctggcgtttgtgtatcagcggctgcccgtacaaaaaaatctactttaactggaagagcggcaagtctgagaagtgcatattctgctatccgcgtattgaatccggccagccgaccgtttgctcggaaacctgcgtcgggcgcattcgttatcttggcgttctgctctacgacgccgacaggattgaagaagcggccagtaccgaacacgagacggatttgtatgaacgtcagtgcgatgtgtttctcaatccgcacgatccggcggtcatcgaagaggcgcttaaacaaggcatcccgcaaaacgtcatcgacgccgcccaacggtcgccggtgtacaaaatggcgatggactggaagctggcgcttccgctgcacccggaataccgtaccctgccgatggtctggtacgtaccgccgctatcgcccatccagtcatacgctgacgcgggcgggttgccgcacaatggcaatattctgccggcggtggaaacgctgcgtattccagtccagtacctggccaatatgctcagcgcgggcgataccggcccggtcattcgggcgctaaagcggatgatggcgatgcgccactacatgcgctcgcagacggttgaaggcgtgacggatacccgcgccattgaggaagtcggtctgagcatacaacaggttgaagagatgtatcgctacctggcgattgccaattatgaagatcgttttgtcattcccaccagccaccgggaaatggcgcgcgatgcctttccggagcgcaacggctgcggctttacttttggcgacggttgccacgggtcggataccaaattcaacctgttcaacagtagccgtattgatgccatcaatatcaccgaagtacgtgataaagcggagggggaataa

SEQ ID NO: 38702 - DNA, 681 bp, Salmonella typhimurium
atgatacagtacctgaacgtctttttttacgacatctacccctatatttgcgccacggtattcttcctcggcagttggctgcgctatgactacggacaatatacctggcgcgcgtcgtccagccagatgctggacaagcgtgggatggtgatatggtcgaatctgttccatattggcattctggggatcttctttggccatctgtttgggatgctaacgccacactggatgtatgcctggttcctgccgattgcggtaaagcagcagatggcgatgatcctcggcggcgtgtgcggcgtattaacgttgatcggcggcgcgggattactgtggcgtcgtctgaccaatcagcgtgtgcgggcgacatccactacacctgatattatcatcatgagcattttgctgattcagtgcctgcttggcctgagcaccattccgttttcggcgcaatatccggatggcagcgaaatgatgaagttggtgggctgggcgcaaagtattgtcaccttccgcggcgggtcttcggaaatgctgagcggtgtggcgtttgttttccgcgttcatctggtgctgggaatgactattttcctgctcttcccgttcacccgtctggttcatgtctggagcgcgccgtttgagtatttcacccgtcgctaccagattgttcgtacccgccgctaa

SEQ ID NO: 38703 - DNA, 1383 bp, Salmonella typhimurium
gtggcaaaagctcccaaacgcgcctttgtttgtaatgaatgtggtgccgattacccacgctggcaggggcaatgcagcgcctgccatgcctggaacaccattaccgaggtgcgccttgccgcgtcgccgacggtggcgcgtaacgaacgtctgagcggatacgccggcagtgcgggcgtatcaaaagtgcagaaactgtctgacatcagtcttgaggaactgccgcgcttttctaccggttttaaagagtttgaccgcgtgctgggcggcggggtggtacccggcagcgccattttgattggcggtaaccccggcgcgggcaaatcaacgttgctgctgcaaacgctgtgcaagctcgccgagcagatgaaaacgctgtacgtcaccggcgaagagtcgctacagcaggtggcgatgcgtgcgcaccgtctcggcctgccgaccgctaatctgaatatgctctccgaaaccagcatcgagcagatctgcctgatagcggaagaagaacagccgaaactgatggtgatcgactctatacaggtgatgcatatggcggatatccagtcgtcgccaggcagcgtcgcccaggtccgcgaaacggcagcctacctgacgcgcttcgccaaaacgcgcggcgtggcgatcgtgatggtcggccacgtcaccaaagacgggtcgctggcggggccgaaagtgctggaacactgtatcgattgctcagtattgctcgacggcgacgctgattctcgtttccgcacgctgcgcagccacaaaaaccgctttggcgcagtcaatgagctgggcgtcttcgccatgaccgaacaggggttgcgcgaagtgagcaatccgtccgccatctttttaagccgtggcgatgaggtcacttccggcagttcagtgatggtcgtctgggaaggcacgcgaccgttgctggtggagattcaggcgctggtcgatcactcgatgatggcgaaccccagacgcgtggcggtcggtctggaacaaaaccgtctggcaatcctgctggcggtgctgcaccgacacggcggtctgcaaatgtcggatcaggacgtcttcgttaacgtggtcggcggcgtgaaagtcaccgaaaccagcgcggatctggctttactgctggcgatggtctccagcctgcgtgacaggccgttgccgcaggatctggtggtgtttggcgaagtggggctggcaggcgagattcgtccggtgccgagcgggcaggagcgtatttccgaggcggcgaaacacggctttcgtcgggcgattgtgcctgccgccaacgtaccgaaaaagccgccggaaggaatgctggtgttcggtgttaaaaagctcgcagatgcgttaagcgtgtttgacgacttataa

SEQ ID NO: 38704 - DNA, 648 bp, Salmonella typhimurium
atgttacaggtataccttgttcgccacggtgaaacgcagtggaacgccgagcgacgtattcagggccaatcggacagtcccctgacagcaaaaggcgagcagcaggccatgcaggtaggagaacgcgcccgtagcctcggcatcacccatatcatcagcagcgatttaggccgcacaaaacgcacggcggagattatcgcccaggcgtgcgggtgtgatatcacctttgactcccgcctgcgcgagctggatatgggcgtgctggaaaagcgccagatcgattcgctgacggaagaagaagagggctggcgtcgtcagctggtcaacggcacgcaggatggccgcattcccggcggggaatcgatgcaggagttgagcgatcgcgttcatgccgcgctggcgtcctgtctggagctaccgcagggcagccgacctttattggtcagtcacggtatcgcgttgggctgtctggtcagtactatactgggactacccgcctgggcggaacgccggttacgtttgcgcaactgctctatttcccgcatcgattaccaggaaagtcagtggctggcgtctggctgggtggtagaaaccgcaggggacgtttcgcatctggacgcccctgcattggatgagctacagcgttaa

SEQ ID NO: 38705 - DNA, 1350 bp, Salmonella typhimurium
atgttgaaatcccccctgttgtggaaaatgattacgttaggcggcgccatgatcctgctgttaattcccctgatgatggtacggcacaccatcgtggagcgtgctgattatcgaagccatgtagaagccgctattcgtcagagtaccagcggcccacaaaaggttgtcggcccgctggtggcgattccggtgacagagctctataccgtgctggaagaggagaaagaggtccagtataagcgcagctatctctatttttggctgccggagtcgctattggttgaaggcaatcaaaacgttgaagcgcgaaaaataggtatttatcaggggcaggtgtggcataccgatatggcgataaaggcggagtttgatgtggcccgtctgcatgagctgaacagaccgaacattacccttggaaagccctttatcgtcgtgggcgtcggcgatgcgcgcggtatcagcgcagtaaaagcgccgcaggtgaatggtgaaacgctcactgtagagccggggaccggcttaccggaaagtagagagggcattcatatcccgctgccggacagtcagtgggcgacgcgcaacctgacgttggatatgtcgctaaatttaagcggaaccggcagcttttcactggttcccgtcgggcgtagcagtgaaatgaccctggccagtaactggccgcacccaaattttgtgggggattttcttcccggtaaacgcgaaatcagcggttcaggatttcaggcccagtggcaaaccagccggtttgccacgaatctcggcgaacagtttgctgatgcgcaaaaggtggattgggacaacttaccggcgtttagcgtcgctgtatcgacgccagccgatcagtatcaactgacggacagagcgacgaaatatgccattttgttgattacgctaacgtttatggcgttctttgtcttcgaaaccctgacggggcagcggttacacccgatgcagtatctgctggtggggttatcgctggtgatgttctacctgctgttgctggcactgtcggaacatatcggtttcacgccagcctggatcgccgcaagcctggtgggcgcgttgatgaatagcgtttatttgcaggcggtgctgaaaggatggcgcaatagcgtgctgtttacgttagcgttattggcgctggatggcgtgatgtggggattgctgcgttcggaagatagctcgttgcttctgggtaccggcgttctgctactggcgcttggcggcgtgatgttcctgacgcgccatctggactggtattcgctctcttgtcagcaacgtaagtcattaccgccagtaaaagatgacgaattacgtttgtggaaataa

SEQ ID NO: 38706 - DNA, 1104 bp, Salmonella typhimurium
atgacttcgcgtaactatctgttgctgactcctggcccgctcaccacctctcgcaccgtgaaagaagcgatgttgttcgatagctgtacctgggatgatgattacaatatcggcgtggtagaacagatccgccagcagctgaccgcactggcaacggcctccgaaggctacacctccgtactgctgcaaggcagcggcagctatgctgtggaagccgtactgggcagcgcattggggccgcaggataaggtgctgatcgtcagcaacggtgcatacggcgcacgaatggtcgagatggccggccttatgggaatcgcccatcacgcttacgactgcggcgaagttgcgcgcccggatgtgcaggcgatcgacgcgatcctcaacgccgacccgacgatcagccatatcgccatggtgcatagcgaaacgaccaccgggatgctcaaccccattgatgaggtgggcgctctggcgcatcgctatggcaaaacctacatcgttgacgccatgagcagcttcggcggcatccccatggatattgcagcattacacatcgactatctgatcagctccgccaataaatgcattcagggcgtgccgggttttgcctttgtgattgcccgcgagcaaaaactggccgcgtgcaaagggcattcccgctcgctgtcgttagatctctacgcccagtggcgctgcatggaggataaccacggcaaatggcgttttacttcgcccacacataccgtcctggcgtttgcacaggcgctgaaagagctggcgaaagaaggtggcgtagcggcacgtcatcaacgctatcagcaaaatcagcgcagcctggtggccggaatgcgggcgctgggctttaacacgctgctggatgacgaacttcattcgcccattatcaccgccttttattcaccggaagacccgcagtatcgctttagcgaattttatcgccgcctcaaagagcagggctttgttatctatcctggcaaagtgtcgcaaagcgactgcttccgcatcggcaatattggcgaagtatatgccgccgatatcacggccctgctgaccgccattcgtaccgccatgtactggacgaaataa

SEQ ID NO: 38707 - DNA, 1350 bp, Salmonella typhimurium
atgacgccaggggagctgcgcgccacatggggtttagggaccgtcttttcgttgcgtatgctgggcatgtttatggttctaccagtactgaccacatacggtatggcgctacagggcgccagcgaagcattaatcggcattgcgatcggcatttacgggctggcgcaggctatctttcaaattccctttgggctgctgtccgaccgcattggccgcaaaccgctgattgtcggcggactggcggtatttgtcgcgggcagcgtcattgccgcgctctcccactcaatctggggcattattctggggcgagcgctacaggggtccggcgctattgccgccgccgtcatggcgctcctgtctgacctcacccgcgagcaaaaccgtaccaaagcgatggcgtttatcggcgtcagctttggtatcaccttcgcgattgcgatggtattagggccgatcgttacccatagtctgggattgaacgcgttgttctggatgatcgccgccctcgccactctgggcattcttctgacgatctgggtggttcccaacagtaccaaccatgtgctgaatcgcgaatccgggatggtcaaaggcagcttcagtaaagtgctggcggagccgaggctgctcaaactcaatttcggcattatgtgtctgcatattttattgatgtccacctttgtcgccctgcccggccagcttgccgatgccggtttccctgccgccgaacactggaaggtgtatctggcaaccatggtgatcgcctttgccgccgtcgtgccttttattatctatgctgaagtcaaacggcggatgaagcaggtattcctgttctgcgtggggctcattgtcgtcgcagaaatcgtgttgtggggagcgggccagcatttctgggagctggtgattggcgtacaactctttttcctcgcctttaatctgatggaggcgctgctgccttcgcttattagcaaagagtcgcccgcggggtataaaggaacggcgatgggcgtctattctaccagtcagtttcttggcgtggcgcttggcggctcgctgggcggctggatagacggcacgtttgatgggcaaaccgttttccttgccggggccgtactggcgatggtatggctggcagtggcaagtaccatgaaagagccgccctatgtcagcagcctgcgtgtggaaattccagcggatatcgttgctgacgacaggctaaaacagcgactgttggcaatgaaaggcgtaagcgaagcgctgatcgtggcggaagagcattccgcttacgtcaaaatcgacagcaaagtgaccaatcgctttgaagttgaacagcttatcagcaaaggatga

SEQ ID NO: 38708 - DNA, 1185 bp, Salmonella typhimurium
atgaaaaggcagagaaacgtcaatttgttgttgatgttggtgttactggtggccgtagggcagatggcgcaaaccatttatattcccgccatcgccgatatggcacaagcgctaaacgtccgggaaggcgccgtccagagcgtaatggctgcttacctcctgacctacggcgtctcgcaactgttttacggcccgctttccgaccgggttgggcgccgccccgtaatcctcgtcggcatgtctatttttatggtagcgaccctgttcgccatgaccacgcatagtttgacggtgttgattgccgccagcgccatgcaagggatgggaaccggcgttggcggagtaatggcgagaacgctcccgcgcgatctgtatgaaggaacgcaacttcgtcacgccaatagcctgttaaatatggggattctggtcagcccgctgttagcgccgctgattggcagcctgctggataccctgtggaactggcgcgcgtgttacgctttcctgctggtgctttgcgctggcgtcaccttcagcatggcgcgctggatgccggaaacccgccccgccggcgcgccgcgcacacggctgatcgccagctataaaacgctgtttggtaacggcgcatttaactgttacctgctgatgctaatcggcgggctggctggcattgcggtctttgaagcctgttccggcgtgctgatgggggcagtattaggtctcagcagtatggtggtaagcattctgtttattctgccgattccggcggcgttcttcggcgcctggtttgccggacgcccgaataaacgcttctcaaccctgatgtggcagtcagttatttgctgtctgctggcaggccttatgatgtggattcccggctggtttggcgtgatgaacgtctggacgctactcatccccgctgcgctgtttttcttcggcgccgggatgttatttccactggccaccagcggcgcgatggagccgtttccgttcctcgcaggcaccgctggcgcgctggtcggcgggctgcaaaatattggttccggcgtactggcgtggctttcggcaatgctgccgcaaaccggtcagggcagtctgggattgctgatgacccttatgggattgctgatcctggcgtgctggctgccgctggcgtcacggatatcgcatcaggggcagacggtttaa

SEQ ID NO: 38709 - DNA, 1272 bp, Salmonella typhimurium
atgacagataaacgcaaagatggctcgggcaaattgttgtactgctctttttgcggcaaaagccagcatgaagtgcgcaagctgattgccggtccatccgtgtatatctgcgacgaatgcgtcgatttatgtaacgacattattcgcgaagaaattaaagaagttgctccgcaccgtgaacgtagtgcgctgccgacgccgcatgaaattcgtacccacctggacgattacgttatcggccaggagcaggcgaaaaaagtgctggcggtggcggtctataaccactacaagcgtctgcgtaacggcgataccagcaatggcgtcgagttaggtaaaagcaacattctgctgattggaccgaccggttccggtaaaacgctgctggcggaaacgctggcgcgcttgctggatgtgccgttcactatggcggatgcgaccacgctaaccgaagcgggttacgttggtgaagacgtcgagaatatcattcagaaactgttgcagaaatgcgactacgacgtgcaaaaagcgcagcgtgggattgtctacattgatgaaatcgataagatttcgcgtaaatcagacaatccgtccattacccgcgatgtttccggcgaaggcgtacagcaggcgttgctgaaactgatcgaaggcaccgtcgccgcggttccaccgcagggcggtcgcaaacatccgcagcaggagttcttacaggtagatacctctaagattctgtttatctgcggcggcgcgtttgccggtctggataaagtgatcgctaaccgtgttgaaaccggctccggcattggttttggcgcgacggtgaaagcgaagtccgacaaagccagcgaaggcgagctgttgtcgcaggttgaaccggaagatttgatcaaatttggtctgattcctgagtttatcggtcgtctgccagtggtagcgacgctgaatgaactcagcgaagaagcgctgattcaaatcctgaaagagccgaaaaatgcgctgaccaagcagtatcaggcgctgtttaacctggaaggcgtcgatctggaattccgtgacgaagcgctggacgctatcgccaggaaagcaatggcgcgtaaaaccggcgcccgtggcctgcgttctatcgtcgaagcggcgctgctggataccatgtacgatttgccatctatggaagacgtcgaaaaagtggtgatcgacgagtccgttattgccggtcagagtaagccgttgctgatttacggcaaaccggaagcgcaggcttctggcgaataa

SEQ ID NO: 38710 - DNA, 2355 bp, Salmonella typhimurium
atgaatcctgagcgttctgaacgcattgaaatccccgtattgcccttgcgcgatgtggtggtttatccgcacatggtcatacccttatttgtagggcgggaaaaatctatccgttgtctggaagcggctatggaccatgataaaaaaatcatgctggtcgcccagaaggaagcatcgacggatgagccgggtgtaaacgatcttttcaccgtcgggaccgtggcctctattttgcagatgctgaaactgcctgacggcaccgtaaaagtgctggtcgaggggttacagcgcgcgcgtatttccgcgctgtctgacaacggcgaacatttctccgcgaaggcggagtaccttgattcgccagccattgatgagcgtgaacaagaagtgctggtgcgtaccgctatcagccagttcgaaggctacatcaagctgaacaaaaaaattccgccggaagtgctgacgtcactcaatagcattgacgaccctgcacgtctggctgacaccatcgccgcgcatatgccgctgaaactggcggataaacagtccgtactggagatgtccgacgttaacgaacgtctggaatatctgatggcgatgatggaatctgaaatcgatctgctgcaggttgagaaacgcattcgcaaccgcgtgaaaaagcagatggagaaatcccagcgcgagtactatctgaacgagcaaatgaaagcgattcagaaagagcttggcgagatggacgacgcgccggacgaaaacgaagcgctgaagcgtaagatcgacgcggcgaaaatgccgaaagaggcgaaagagaaagcggaagcggaactgcagaagctgaaaatgatgtctccgatgtcggcggaagcgaccgtggtgcgcggctacatcgactggatggtgcaggtgccgtggaatgcgcgtagcaaggtcaaaaaagacctgcgtcaggcgcaggaaatcctcgatactgaccattatggtctggagcgcgtgaaagaccgcatccttgagtatctcgcggttcaaagccgtgtaaataaaatcaaggggccgatcctgtgtctggtggggccgccgggggtaggtaaaacctcgttgggccagtccatcgctaaagcaacagggcgtaaatacatccgtatggcgctgggcggcgtgcgtgatgaagcggaaatccgcggtcatcgccggacttacattggctctatgccgggtaaactgatccaaaaaatggccaaagtgggggttaaaaacccactgttcctgctcgatgagatcgacaaaatgtcttctgacatgcgcggcgatccggcttccgcactgctggaagtgctggatccggagcagaacgtggcgttcagcgatcattacctggaagtggattacgatctcagcgatgtgatgttcgtcgccacttccaactccatgaacattccggcgccgctgctggatcgtatggaagtgatccgtctgtccggttataccgaagacgagaagctgaatattgctaaacgtcacctgctgccgaagcagatcgagcgtaacgcgctgaagaaaggcgaactgacggtcgacgatagcgcgattatcggtattatccgctattacacgcgtgaagcgggcgtgcgtagtctggagcgtgaaatctccaaactgtgccgcaaagcggttaaacaactgttgctcgataagtcgttaaaacatatcgaaattaacggcgataatctgcacgactacctcggtgtgcagcgctttgattatggccgcgcggatagcgaaaaccgcgtaggtcaggtgacggggctggcgtggacggaagtgggcggcgatctgttgaccatcgaaaccgcctgcgtcccgggcaaaggcaagttgacctacaccggctcgctcggtgaagtgatgcaggaatccattcaggcggcgctgaccgtggtgcgtgcgcgcgcggaaaaactgggtattaatccggacttttacgaaaaacgcgatatccacgttcacgtgccggaaggcgcaacgccgaaagacggtccaagcgccggtatcgcgatgtgtaccgcgctggtttcctgcctgaccggtaatccggtgcgcgcagatgtggcaatgaccggtgagatcacgctgcgtggtcaggtgttgccgatcggcggcctgaaagaaaaactgttggcggcgcatcgcggcgggattaaaacggtcttaattccgttcgaaaataaacgtgacctggaggaaattccggacaacgtgattgccgatctggatattcatcctgtgaagcgcattgaggaagttctgacgcttgctctgcaaaacgaaccgtctggaatgcaggttgtaaccgcaaaatag

SEQ ID NO: 38711 - DNA, 273 bp, Salmonella typhimurium
gtgaataaatctcaactgatcgaaaaaattgctgcaggggctgatatctctaaggctgcggctggacgtgcgttagatgcgattattgcttctgttaccgaatctctgaaagaaggggatgacgttgcactggtaggctttggtacttttgctgttaaagagcgtgctgcccgtactggtcgcaacccgcaaacaggtaaagagatcaccatcgccgctgccaaagtgccgagtttccgtgcaggtaaagcgctgaaagacgcggtaaactaa

SEQ ID NO: 38712 - DNA, 399 bp, Salmonella typhimurium
atgcaaacacaaatcaaagttcgtggatatcatcttgatgtttatcaacatgttaataatgcccgctatctggagtttctggaagaagcccgttgggatggtctggaaaacagcgacagctttcagtggatgacggcccgcaatattgcctttgtggtggtaaacatcaatataaattaccgtcgcccggcggtattgagcgatctattgaccgtgaccagccaggtacaacagcttaacggtaaaagcggcgtattaagccagacgattacgctggagccagaagggcaggtggtggccgatgcgctcatcacgtttgtttgtattgatttaaaaacgcaaaaagcgctgccgctggaaggcgaattgcgtgaaaagctggaacagatggtgcaataa

SEQ ID NO: 38713 - DNA, 981 bp, Salmonella typhimurium
atggcttttatctcctttccaccacgtcatccttcatcgtcagcccgcctgccgctgacgctgatcgcgcttgacgactgggcgctgtcgaccattaccggcgtagacagtgaaaagtatattcagggccaggtcaccgctgacgtaagccagatgactgaacagcaacaccttctcgccgcccactgcgatgctaaaggtaagatgtggagcactctgcgcctgttccgtgagcgcgacggtttcgcctggattgaacgccgtagcgtgcttgaagcgcaattaacggagctgaaaaagtacgccgtattttccaaagtggtcatcgcgccggatgacgaacgcgtattgcttggcgtggccggttttcaggcccgcgcggcgctggctaatgtctttagcgaactgcccaatagcgaaaatcaggtggtcagagacggcgcctccacgctgctatggtttgaacatcctgcggaacgattcctgcttgtcaccgatgtcgcgacggccaacatgttaacggagaagttgcatggcgaagccgaactgaataacagccaacagtggctggcgttggatattgaagcaggcattccggtgattgacgcggcgaacagcggtcagtttatcccccaggcgactaacctacaggcgctgggcggcatcagcttcaagaaaggctgctacaccggacaggagatggtcgcacgggcaaaattccgcggcgccaataaacgcgcgctttggttgctggcgggcaaagccagccgggtaccggaagcaggagaagatctggagctacagatgggcgagaactggcgtcgtaccggcgctattctggcggcgacgcagttggacgatggtcagttactggttcaggccgtcatgaataacgatttagaagccgaaagcgtcttccgcgttcgcgacgatgccaacaccctgcatatcgtcccgctgccctactcgctggaagagtga

SEQ ID NO: 38714 - DNA, 1434 bp, Salmonella typhimurium
atgagaaaactcaccttgccaaaagattttttatggggcggcgcggttgctgcacaccaggttgaaggcggctggaataaagacggtaaaggccccagcatctgcgacgtgctaaccggcggcgcacacggcgtgccacgcgaaatcacccagaatgtcgttgctggcaaatactatccgaaccacgaggcggtggatttttacggacattacaaagaagacatccgtcttttcgccgaaatggggttcaaatgcttccgtacctctattgcctggacgcgtatcttcccgaatggcgacgaatcccagccaaacgaggccggtctgaaattctacgacgacatgtttgatgagttactcaaatacaacatcgaaccggtcattaccctttctcactttgaaatgccattacatctggtacagcactacggcggctggaccaatcgtaaagtggttgatttctttgtccgttttgctgaagtcgtgtttgaacgctacaaacataaggtcaaatactggatgaccttcaacgaaattaacaaccagcgaaactggcgcgcgccgctgtttggctactgctgttccggcgtggtgtataccgagcatgagaatccagaagaaaccatgtatcaggtcttacatcatcagtttgtcgccagcgcgctggcggtaaaagcggcacgtcgcattaacccacagatgaaagttggctgtatgctggcgatggtcgcgctgtatcctttctcctgtaaaccagaagatgtgatgtttgctcaggagtcgatgcgtgaacgctacgtctttaccgatgtgcagctgcgcggctattacccgtcctatgtgttgaacgagtgggagcgccgcggatttaacatcaaaatggaagatggcgatcttgaagtgctgcgcgaaggcacctgcgattatcttggtttcagttattacatgaccaacgcggtcaaagccgaaggcggtagcggcgatgcgatttccggttttgaaggcagcgtaccgaacccctatgttaaagcatctgactggggctggcagattgacccggtgggcctgcgttattcattgtgtgaactgtacgaacgctatcaaaagccgctgtttattgtcgaaaacggttttggtgcttacgacaaagtagaagaagatggcagcatcaacgacgactaccgaattgactacctgcgcgcccatattgaagagatgaaaaaagcggtgacttacgatggtgtcgacctgatgggctacacgccgtggggctgcatcgactgcgtgtcgttcaccaccggtcagtacagcaagcgctacggcttcatctacgtgaacaagcacgatgacggtacgggcgatatgtcgcgttcgcgtaagaagagcttcaactggtacaaagaggtgattgccagcaacggcgagaagctttaa

SEQ ID NO: 38715 - DNA, 570 bp, Salmonella typhimurium
atgaaactcgtgcacatcgtaagtggtttagcggttgcgatatctctggcggcctgcgctgataaaagcgctgatatccagacgcctgcgccaaaccctaacatgtcgattacagctaaccagtctactattcagcaacccaatgtttccggtaccgtctggatccgccagaaggtcgctctgccgccagatgcggtgctgaccgtgacgctttcagatgcttcgctggctgatgcgccgtctaaggtgctgtcgcaaaaagcggtacgtaccgaaggtaaacaggcgcctttcagttttgtgttgccgtttaacccatcagatattcaacctaacgcgcgcatcctcctgagcgcggccatcaccgttgataataagctggtatttattaccgatagcgtgaaaccggtgattaataatggcggcactaaagcggatctgacgctggtaccggtacagcaaacggcggtgcctgtgcaggccagcggtggtgcgacgacgacggttccatcgacttcgccgacccaggtcaattcgtcttctgccgttcctgcgcctacccagtattaa

SEQ ID NO: 38716 - DNA, 549 bp, Salmonella typhimurium
atgattcggcaacgtcgccgtgcgctaacgccagagcagcaacgccgttttggtcaacaggccgccgcccgaatgctcagctttcctcccgtcgtgatggcgcacactgtcgccgtgtttctctcctttgatggcgaactcgacacccagccgctgattgaacagctatggcgagcgggcaagcgcgtctaccttccggttcttcatcccttcagccctggcaacctcctgttcctgcactattatccgcagagtgtgctggtgaccaaccgcttaaagattcaggagccacggcttgatgtccgcgacgtattgccgctggcaaagctggatgtgctggtaacgccgttagtcgcgtttgacgaagacgggcagcgcctggggatgggcggcggattttatgaccgtacgttgcaaaactggcagcagcataagatcctacctgtgggctacgcgcatgattgccagttagtggaaaagttgccggttaaagagtgggatatcccgctgcctgcggtggtgacgccgtccaaaatttgggagtggtag

SEQ ID NO: 38717 - DNA, 894 bp, Salmonella typhimurium
atgaaacgtccggactacagaacactacaggcgctggatgccgttatacgtgaacgaggattcgagcgcgccgcccagaagctgtgcatcacgcaatccgccgtctcacagcgcataaaacagcttgagaatatgttcggacaacctttgttggtgcgtaccgttcctcctcgccccacggagcaagggcaaaaattactggctctgctgcgtcaggttgaactgctggaagaagagtggctgggcgatgaacaaaccggctctacgccgctgctgctgtcgctggcggttaacgccgacagtctggcgacctggctgcttccggcgctggcgccggtactggcggactcccctatccgtctcaatttacaggtggaagatgaaacgcgcacgcaagaacgtctgcggcgcggcgaggtggtgggcgcggtgagtattcagcatcaggcgctacccagttgcctggtggacaaactgggcgcactcgactatctgtttgtcgcgtcaaagccgtttgccgagcgctatttccccaatggcgttacccggtcgtcgctgctaaaagcgcccgccgtcgcgttcgaccatctggatgatatgcatcaggcctttttgcaacagaatttcgatctaccgcccggcagcgtgccgtgccatatcgttaattcatccgaagcatttgtacagcttgcgcgtcagggcacgacctgctgcatgatccctcacctgcagattgagaaagagctggaaagcggcgagttgatcaacttaacgcctggtttgctgcagcgccggatgctttactggcaccgctttgccccggaaagccggatgatgcgcaaagtgaccgacgcgctgctggagtacgggcacaaggtgctgcgtcaggattag

SEQ ID NO: 38718 - DNA, 2736 bp, Salmonella typhimurium
atgtcaacgccttcactgacccgcagattatggctggccttcgccctgatggcggcgctcaccctgctcagcaccgtgatcggctggataagcctgcgcgtcattagtcaggtggagcaaaccaatacgcaagcgctgctccccacgatgaatatggccaggcagttaagcgaagccagcgcttacgagctcttttccgcgcaaaatctgaccaatgccgacagtgagggcgtttggctggcgcaggggaagatgctgaaagcgcaaagccttaaaattaaccatcttttgcaggcattaagcgagcaggggtttaatacctcggccatcgcccggcaagaaaaagagattgcacaaacgcttgggcaacagggaacgctggtcggtgaaattctcacgctgcgcgcacagcaacagcagttaagccgccagattgcggaggcggcggaaagcattgccgcccaggctcacggtcaggccaataatgcagcgacatctgcaggcgccacccaggccggtatttacgatcttatcgaaagcggtaaaggggatcaggctgaacgcgcgcttgaccgactgattgatatcgaccttgagtatgtgaatcagatgaatgagttgcgggtcaatgccctgcggtttaagcagctcattgtgaccttaaaagacgcgcaagggctgagcgatgccgaagacaccgatgaaaaacttaatcagttggttaaaattttatcccgccgccagcagcgtatagaagatcctaccgttcgcgcccaaatcgccgacgcgctggagacaataaaccagtacaccacactggttaccctgtttcgtaaggaaaacgccatccgcgaccagcttcaaacgcttatggccaataacctctttcagtttacccgcttcagtacggaagtgtcgcagttggtgaacgccatcgaaaaacgaaacgaggctgggttagcgcgtcttacacacgccagtcagcgtgggcaaatagggttagtgatcttaggcatcctggcgctgtgctcattaagttttattctttggcgagtggtttaccgctccgtatcccgcccgctggcgcaacaaacgcaggccttacagcggctactggagggcgatattgactcgccatttccggaggcggctggcgtcagcgaactggataccatcagccgtctgatggaagcgtttcgcgccaacgtgcgcaaattgaaccgccatcgtgaggatttggcggaacaggtgcgatcgcaaacggcggaacttcatgcgctggtgctggaacaccggcaggcgcgcgccgaagcggaaaaggccaacgaggcgaaatcgacgttccttgccgccatgagccatgaaattcgcacgccgctttacggcattctcggtacggtacaattgctggccgataaaccgctcatgacaaactaccgcgacgatttacaggccattaatgattcaggcgaatcgctactggcgattcttaacgatattcttgattactcggcgattgaagtaggcggcaccaacgtttccattagcgaggaaccgtttgaaccgcgacaattgttgaatagcgcgctgcatttaatgcacagccgcgttcaggtggcgctcatcaccgactttagcgagcaactcccctcaacgctacaaggcgatccgcgccggatacgtcaaattgtgattaatcttttaagtaatgcggcgaaatttaccgatcgcggcagcatagtgctgcgcacgttttgcgacgatcagagctggtttattgaggttgaagataccggatgcggtattcctgaagcgaagctgacggctattttcaaaccgtttgtgcaggcgacaggacgccggggcgggacgggcctggggctggctatcagcgccagcctggcagaggcgatgggcgggacgctaaccgtcaccagtacgcttcatgttggcagttgttttcgtttacaactgccggtttgccactccaaacccgcaagtaaaagtgcgttcagggaaccgataaatcttaacggactacgcttgttgctgattgaagataatatgctgacgcagcgtattaccgctgaaatgctcacgggcaaaggggtgaaggtctcacttgctgaaagcgcgaatgacgcgctacgctgtttagccgaaggcgagtcctttgatgtcgcgctggtggattttgatttgccggattatgacggcttaaccctggcgcagcagttgatgagcctgtatcccgccatgaaacgcattggttttagcgcacatgtgatagacgataatcttcgtcagcgtaccgccggtcttttctgcgggattattcaaaagcccgttccccgcgaagagctttaccgcatgatagcgcactatttacagggcaaatctcacaacgcgcgggcgatgttgaatgaacatcagcttgccggcgatatggcgtctgtcggcccggaaaaactccggcaatgggtcgcgttattcaaagacagcgcgctgcctttagtcgaggagatcgaggcggcgcgcgccatgaatgacgacgttaacattaagcggctggcgcataaattaaaaagcggctgcgccagcctggggatgacgcaggcaaccgaagcctgtcgggaactggagttgcaaccgcttagcgatatagatattaaaactatcgtgacgcagggagtgacggcgctcgacgcatggatagccggtcatccttcgccataa

SEQ ID NO: 38719 - DNA, 261 bp, Salmonella typhimurium
atgaaacctgatattcatcctgtataccgcaccgtcgtatttcacgacaccagcgcaaatgaatatgtgaaagtgggatcaactatcaaaactgaacgtgaaatcgaactggacggcgtgacatatccgtatgtcactattgatgtgtcatcaaaatcgcatcctttttataccggtagacagaaaacgtttgatagcgaaagtagcgccgcacgcttccagaaacgtttcggtcattttatcggcgctaaacgggggtaa

SEQ ID NO: 38720 - DNA, 3363 bp, Salmonella typhimurium
atgactatgttgcagctttataaacgttcacagcattttgtttttattacaattagcgtccttattatcctgctgtcctgtcagtctctggcatttgcccgggggcaaacgaatggcgacctgccgtcaaaagcggatgtgcaaaaccagctggatacgctgaataagcaaaaagatctctccgcccaggataagctcgtccagcaggaccttattgatacgttagctacgctggagaaaatcgagcgggtgaaagaggagaccgtacagctacggcagaaggtggcgcaggcgcctgaaaaaatgcgtcaggcgacggctgcgttgaatgcgctgagcgacgtcgataatgatgatgaaatgcgaaaaacgctgagtgcgctttcgctacgtcagcttgagctgcgcgtggcgcaggtactggatgatttgcaaaattcgcaaaacgatcttgccgcttataacagccagcttgtttcgctacagacccagcctgagcgcgtgcaaaacgccatgtataccgcctcacagcaaatacagcaaatccgtaaccgtcttgacggcaataacgtcggcgaagctgcgcttcgccccagccaacaggtgttattacaggcacaacaggcgctgcttaatgcgcagatcgaccagcaacgcaagagtcttgaaggaaataccgttttgcaggacaccctgcaaaaacagcgggattacgtgacggccaacagtaatcgccttgaacatcagcttcaacttttacaggaggcggtcaacagtaaacgacttacgctaacggaaaaaacggcccaggaggccatttcgccggacgaaacggcgcgtatccaggcaaacccgctggtaaaacaggaactggatattaaccatcaactcagccagcgtctgattgtcgcgaccgaaaacggcaatatgttgatgcagcaaaacattaaagtaaaaaactggctcgatcgcgcgctgcagtcggaaagaaatatcaaagaacagattgccgtcttaaaaggcagcctgttgctgtcgcgtattctttatcaacagcagcaaactctgccctccgccgacgaactcgaagatatgaccaaccgcattgcggatttgcgtctggagcagtttgaaatcaaccagcagcgtgatgccttattccaaagcgatgcctttgtcgacaagctggaggaggggcataccagcgaggtgaatgatgaagttcatgatgcgttgcttcaggtggtggagatgcgccgtgagctattggatcagctaaataaacagttgggtaaccagctgatgatggcgattaacctgcaagttaaccagcagcagttgatgagcgtctcgaaaaatctgaaagccattttgacgcagcagattttttgggtgaacagtaaccgccctatggactgggactggcttaaagcgttcccccaaacgttaaaagagcaattcagcgccatgaaaatcacggtgaactggcaaaaagcctggcccgcggtatttattgcttttttggccgggttgccgctcttgctcatcgccggtttaatccgctggcgtctgaaatggttaaaagcgtatcaacagaagctggccgccgccgtgggatcgctgcgtaacgatagtcagctcaatacgccaaaagctattctgatcgatctgatccgcgcgctgccggtgtgcctgattatcctcgcgcttggactgatcctgctgaccatgcagctaaatatcagcgatctgctctgggcctttagtaaaaagctcgcgatgttctggctggtctttgggctgtgctggaaggtgctggaaaaagagggcgtggcgatacgccattttggtatgccggcgcagttgaccagccactggcgtcgccagattgtacgcattagcctcgcattgctgccgctgcacttttggtctgtggtggcggagttgtcgccgctgaatctgatggatgacgtgctggggcaggcggttattttcctcaatctgctggtcataacattgctggtgtggccactgtgccgggaaagctggcgcgataaagaatctcacggcattcgactggtgaccgtgacgattctttccattattccagtggcgttaatggtattaacggcgaccggctatttctataccaccctgcgcctggcggggcgctggattgaaaccgtctatctggtcattatctggaacctgctttatcaaacggtgctgcgcgggttaagtgtagcggcgcgccggattgcctggcgacgcgcgctggctcgtcgtcagaacctggtaaaagagggtgcggaaggcgcggagccacaggaagaacccaccatcgcgctggagcagattaaccagcaaacattacgtatcacgatgctgctaatgcttgccctgtttggcgttatgttctgggcgatttggtccgatttgatcaccgtattcagctatcttgatagcattacgctgtggcactacaacggctccgaagctggcgctgcggtggtgaaaagcgtgacgatgggcagcttgctatttgccattattgccgcgatggtggcctgggcgctcatccgcaacttacccggcctgctggaagtgctggtgctttcacgcctgaatatgcgccagggggcttcgtatgcgatcaccacgatccttaactacgtcattatcgctgttggcgcgatgacagtattcggatcgctcggcgtctcgtgggataaactccagtggctggcggcggcgttgtcggtgggtctcggctttgggctacaggagatcttcggtaactttgtctcgggtttaatcatcctcttcgaacgtccggtacgcattggcgatacggtaacgatcggcacctactccggcacggtcagtaagattcgtattcgcgccaccactattaccgattttgatcgtaaagaagtgatcattccgaacaaagcgttcgtaacggagcggctaattaactggtccctctccgataccacgacacgtctggtgatccggcttggcgtggcttatggctcggatctggagaaagtgaaaagagtcttgctacaggcggcgatggagcatccgaaggtgatgcacgatccggaacctgccgtattcttcaccacctttggcgccagcactctggatcatgaactgcgtctgtacgtgcgtgaattgcgcgatcgtagccatacggtggatgaactgaaccgcgcgatcgatcgactgtgccgtgaaaatgatatcaatatcgcctttaaccagcttgaggtgcatctgcataacgcgaagggcgacgaagtcactgaagtgaagcgcgatctcaacggcggcgatctggcacctacggcaagctaa

SEQ ID NO: 38721 - DNA, 708 bp, Salmonella typhimurium
atgcatccgtttacctcgttaaccttatgggcgctggcggcctgcaccacgctgctactccctgcgcagaccgtgctcccggtttatagcgcggcggccttcctctgtctgctggcgctgaaatcaacgcggcggcgggcgaagtatgtcgcctggctgatgctgtctttagggtttgggctatggctggtacatggcggttggctaacggaatggataagcgggcagcctcgcgatccgcagcgctgggtatatgccgttacgctatggctacgtctgctggcgatcgtgtcgacgtcgcagctatggatgcagtatgtgccggttcagcggtttattcgcgccctgttcgcttcacgtctgccgcccggcatcgcttacctgttcgctggccctctgctggtcgtcgaacagctcaaacgacaactgacgatcgttcatgaagcccagcgcgcgcgtggcgtaccgctggatgaaggctggtatcagcggctacgggcaatgcctgcgctgatcgtgccgcttacgcaaaatgcgcttaacgatctgacaatacgcggcgcggcgttggatatgcgggggtttcggctgcatcgagcccgaaccacgctgtgggcgccgaaagatagcgtgttacaacgggttgcgcggtatggcatggtactgctaatactggcggaagcgggagtatggatatggttacgttag

SEQ ID NO: 38722 - DNA, 1929 bp, Salmonella typhimurium
atgagttatcaggtcttagccagaaaatggcgcccacaaacctttgctgacgtcgtcggccaggaacatgtgctgaccgcactggcgaacggcttgtcgttagggcgcattcatcacgcatatcttttttccggcacgcgcggcgtcggtaaaacctctatcgcccggctgctggcgaaggggctgaactgcgaaaccggtattaccgcgacgccgtgcggcgtttgcgataactgtcgggaaattgagcaggggcgttttgtcgatctcattgagattgacgccgcatcgcgtaccaaagtcgaagacacccgcgacctgctggataacgtccagtacgcgcctgcgcgcggtcgctttaaagtctatctgatcgatgaagtccacatgctgtcgcgccacagctttaatgcgctacttaaaacgcttgaagaaccgccagcgcatgtgaaatttttactggcgaccaccgatccgcagaagctgccggtgaccattttgtcgcgctgcctacagtttcatctcaaagcgctggatgttgaacagattcgccatcagcttgagcatattctcaatgaggaacatatcgctcacgaaccccgcgcgttgcagttgttatcgcgtgcggctgacggcagcctgcgcgatgcattaagtctgactgaccaggcgatcgccagcggcgacgggcaggtttcgacgcaggcggtaagcgccatgctcggtacgctggacgacgaccaggctttgtcattagttgaggcggtggttgacgctaacggcgaacgcgtcatgtcgcttatcaacgaggcggcggcgcgcggtattgaatgggaagcgctgctggtcgaaatgcttagcctgctgcaccgtattgcgatggtgcaactttcgcctgccgcgttaggcagcgatatggcggctatcgagcaacggatgcgcgaacttgcccggacggtgcctcccggcgatcttcagctctattatcagacgttgttgattggtcgcaaagaattgccctgggcgccggaccggcggatgggcgttgaaatgacgttactgcgtgcactggcgtttcacccgcgtatgcccttgccggagcctgaaacgccgcggcagtcttttgcgcccgtggccccaacggcggtaatgacgccgccgcagctgcagcagccgtcggcgcccgcgccgcagacatcgccagcgccgctgccggcgtctaccagtcaggtgctggcggcgcgcaatcagctacagcgcgcgcagggagtaaccaaaacaaaaaagagtgaaccggcagccgcatcccgcgcgcggccggtgaataactctgcgctggagcggctggcctcggtttcggagcgcgtacaggcgcgcccggcgccgtccgcgctggaaacggcgccagtaaagaaagaggcttatcgctggaaggccaccacgccggtagtacaaaccaaagaagtggtggctacgccaaaagcgcttaagaaagctctggagcatgaaaaaacgccggagctggcggctaaactggcggcggaagcgattgagcgcgatccgtgggcggcgcaggtaagccagctttctttgcctaagctggtggagcaggtggcgcttaatgcctggaaggagcagaacggcaacgcggtttgtctgcatctgcgttcgacgcagcggcacctcaattccagcggcgcgcagcaaaagctggcgcaagcgctcagcgatctgacgggaacgacggttgaactgaccatcgttgaagatgataatcccgcggtgcgtacgccgctggaatggcgtcaggccatttatgaagagaaactcgcgcaagcgcgtgagtcaattattgcggataataacattcagacgctgcgtcgattcttcgacgccgagctggatgaagagagtatccgccccatttga

SEQ ID NO: 38723 - DNA, 330 bp, Salmonella typhimurium
atgtttggaaaaggcggtctgggcaatctgatgaaacaggcccagcagatgcaggaaaaaatgcagaaaatgcaggaagagattgcgcagctggaagtgaccggcgaatccggcgcgggtctggtgaaggttaccatcaacggcgcgcataactgccgccgcgtggaaattgacccaagcctgctggaagatgacaaagagatgctggaagatctggtcgctgcggccttcaacgatgcggcgcgccgcattgaagagacgcaaaaagagaagatggcttccgtctcttccggtatgcaactgccgccaggctttaagatgccattctga

SEQ ID NO: 38724 - DNA, 606 bp, Salmonella typhimurium
atgcaaaccagtccgctgttaactcagcttatggaagcgttgcgctgccttccgggcgttggccctaagtcggcgcagcggatggcgtttaccctgttgcagcgcgatcgcagcggcggaatgcgcctggcgcaggcgctgactcgggcgatgtcggaaatcggccactgcgccgactgccgcacctttaccgagcaggatgtttgtaatatctgctcgaacccgcggcgtcaggaaaacggccagatttgcgtggtggagagtcctgcggatatctacgccattgagcagaccgggcaattttccgggcggtatttcgtgctgatgggccacctgtcgccgctggacggcatcgggccggatgatatcggtcttgatcgtctggaacagcggctggcgtcagaaaaaatcagtgagctgatcctcgcgaccaacccgacggttgaaggggaggctaccgcgaactatattgccgagctgtgcgcggaggccggcgtcgaagccagtcgtatcgcccacggcgtgccggttggcggcgaactggagatggtcgacggtacgacgctgtcccactcgctggcgggacgccataagattattttctga

SEQ ID NO: 38725 - DNA, 1899 bp, Salmonella typhimurium
atggcattgttgaggtctatccacatgaaaggacaagaaacgcgtggttttcagtcagaagttaaacagcttctgcacctgatgatccattctctttattccaataaagaaatcttcctgcgtgaactcatctctaacgcctcagatgcggcggacaagctgcgtttccgcgctctgtcaaacccggatctgtatgaaggagatggcgagctgcgtgtgcgcgtctctttcgataaagataagcgtacgttgaccattgccgataacggcgtggggatgaatcgtgatgaggtgattgaccacttaggcaccattgccaagtccggcaccaaatctttcctcgaatcaatggggtccgatcaggcgaaagatagccagctcatcggtcagtttggcgtaggcttctactccgcgtttattgtggccgataaagtgaccgtacgtactcgtgcggcaggcgacaagccggaaaatggcgtgttctgggaatcggcaggcgaaggcgaatacaccgttgccgatatcaccaaaaatgaccgtggtacggaaatcaccttacacctgcgtgaaggcgaagatgaattcctcgatgactggcgcgtacgctcgattatcagcaaatattccgatcacatcgcattgccggtagagattgaaaaacgggaagaaaaagacggcgaaaccgtgatttcctgggagaaaatcaacaaggcccaggcgttgtggacccgtaacaagtcggaaattaaagacgacgagtacaacgagttttacaagcacatcgcgcatgatttcaccgatccgctgacctggagccacaaccgcgtggaaggtaagcaggagtacaccagcctgctgtatatcccgtcgcaggcgccgtgggatctgtggaaccgcgatcacaaacatggtctgaagctgtacgtacagcgcgtgttcattatggacgatgccgagcagttcatgccgaactatctgcgtttcgtgcgcggcctgattgattctaatgacctgccgttgaacgtctcccgtgaaatcctgcaggacagcacggtaacgcgtaatctgcgtagcgctctgaccaaacgcgtcctgcaaatgctggaaaaactggcgaaagacgacgcggaaaaataccaaaccttctggaaacagttcggtctggtgctgaaagaaggcccggcggaagatcacgccaaccaggaagcgatcgctaaactgttgcgctttgcctccacccataccgactcttccgcccagaccgtgtcgctggaagattacgtctcccggatgaaagaagggcaggaaaaaatctactacatcaccgcagacagctatgcggcggcgaaaaacagcccgcacctggaactgctgcgtaagaaaggcatcgaagtgctgctgctctccgatcgcatcgacgagtggatgatgaactacctgaccgagtttgacggtaaagcattccagtcggtcgctaaagccgatgaatccatcgaaaaactggcggatgaagtcgacgaaaacgcgaaagaagcggaaaaggcgcttgagccgtttgtggagcgtgtcaaaaccctgctgggcgatcgcgtgaaagacgtgcgtctgacgcaccgtttaaccgacacgccggcgattgtcaccaccgatgcggatgaaatgagcacccagatggcgaaactgttcgccgcggctggtcagtccgtgccggaagtgaaatacatctttgagctcaacccggatcatgtgctggttaaacgcactgccgataccaaggatgaagcgcagtttaaagagtgggttgagctgctgctggatcaggcgctgttcgctgaacgcggtacgctggaagatccgaaccagtttatccgccgtatgaaccagttgctggtgtcctga

SEQ ID NO: 38726 - DNA, 1647 bp, Salmonella typhimurium
atggattcgcaacgcaatcttttagtcatcgctttgctgttcgtgtctttcatgatctggcaagcctgggagcaggataaaaatccgcaacctcagactcaacagaccacgcagacaacgaccaccgcagcgggtagcgccgccgaccagggcgtaccagccagtggccaggggaaaatgattacggtgaaaaccgatgtgcttgatttgactatcaacacccgtggtggtgatgtcgagcaggccttgctcccggcttacccgaaagaactgggttccaacgaaccgttccagctgctggaaaccaccccgcagtttatctatcaggcgcaaagcggcctgacaggccgcgacggcccggataacccggcgaacggcccgcgtccgctgtacaacgtcgagaaagaggcgtttgtactggccgacggtcagaacgaactgcaggttccgatgacttatactgacgccgcaggcaacacgtttaccaaaacgtttgtctttaagcgtggcgattatgcggttaacgtgaactatagcgtgcagaacgccggcgaaaaaccgctggaagtctccacctttggtcagttaaaacaatccgtcaacctgcctcctcatcgcgacaccggcagcagcaactttgcgctgcatacattccgcggcgcagcgtactccacgccggatgagaagtatgagaaatacaaattcgacactattgccgataacgaaaacctcaacgtcagctccaaaggcggttgggtggcaatgttgcagcagtatttcgctaccgcatggattccgcgtaacgacggcaccaacaatttctacaccgccaatctgggcaacggcattgtcgctatcggctataaagcgcagccggtactggtacagccaggccagactggcgcgatgaccagcaccctgtgggtcggcccggaaattcaggataaaatggcggctgttgcaccgcacctggatttgaccgtggactacggctggttgtggttcatctctcagccgctgttcaagttgctgaagtggatccacagctttgtgggcaactggggcttctccattatcatcattacctttatcgttcgcggtatcatgtacccgctgaccaaagcgcagtacacgtcaatggcgaagatgcgtatgctgcagccgaaaattcaggcgatgcgcgaacgtcttggcgatgataaacagcgccaaagccaggagatgatggccctgtacaaagcggagaaggttaacccgctgggcggctgcttcccgctgatcatccagatgcctatcttcctggcgttgtactacatgctgatgggttccattgaactgcgtcatgcgccgttcgctctgtggattcatgacctgtccgcacaggacccgtactacattctgccgatcctgatgggcgtaacgatgttcttcattcagaagatgtcgccgaccaccgtgaccgacccgatgcagcagaagatcatgacctttatgccggtcatctttacggtgttcttcctgtggttcccgtcaggtctggtgctgtactatatcgtcagcaacctggtcaccatcattcagcagcagctgatttaccgtggtctggagaagcgtggcctgcatagccgcgagaagaaaaaatcctga

SEQ ID NO: 38727 - DNA, 1365 bp, Salmonella typhimurium
atgagccataacgacactatcgtcgcccaggcaaccccaccgggacgcggtggcgtgggtatcctgcgtatttccggtctgaaggcgcgcgacgttgcgcaagaggtgctgggcaagctgccgaagccgcgctatgccgactacctgccgtttaaagatgttgacggcagcgcgctggatcagggtattgcgctgtggttccccggcccgaactccttcaccggtgaagatgtgctggagctacaagggcacggcggtccggtgattctggacctgctgttaaaacgtatcctgacgcttccaggcgtgcgcattgcccgaccgggcgagttctccgagcgagcgttcctcaacgataagctcgatttagcccaggcggaagccattgccgacctgatcgatgccagttccgaacaggcggcgcgttcggcgctaaactcgttacagggggcattttccgcccgcgttaaccaccttgtggaagcacttactcacctgcgaatctacgtcgaagcggctattgattttccggatgaggagatcgactttctctctgacggcaaaatcgaagcgcagctcaatggcgtcatcgccgatcttgacgccgtgcgcaccgaagcgcgccagggcagcctgctgcgcgaagggatgaaggtagtgattgccggacgcccgaatgccgggaaatccagcctgctgaatgcgctggcaggccgtgaagcggccattgtcaccgatatcgccggtaccacgcgcgacgtgttgcgcgagcatatccacatcgacgggatgccgctgcatatcatcgataccgccggactgcgcgacgccagcgacgaagttgagcgtatcggcatcgaacgcgcctggcaggagattgaacaggccgatcgcgtgctgtttatggtggatggcaccacgacggacgccgttgaccctgccgacatctggccggactttatcgcccgtctgcccaaaaatctaccgattaccgtggtacgtaacaaggcggatatcaccggcgaaacgttgggtattagtgaagtaaacggtcactcactggttcgcctctcggcgcgtaccggcgaaggcatcgacgtgttgcgtaaccacctcaagcaaagcatggggtttgataccaatatggaaggcggcttcctggcccgtcgccgtcacctacaggcgctggcggaagccgctgaacaccttgagcagggcaaagcgcagctattaggcgcatgggcgggggaactgctggcggaagagttgcgcctggcgcagcaaagcttaagcgagattaccggcgagtttacctccgacgacctgctgggacggattttctccagcttctgtatcggtaagtaa

SEQ ID NO: 38728 - DNA, 870 bp, Salmonella typhimurium
ttgacggcaccttatcgctataaaatatataaaattgcaaaaagaaactcagataagaagagaactattgctcatccttcgaaagaactaaaatttatacaacgtgaaattactgagtatttaaccgataaattacccgttcatgaatgcgcatttgcatataaaaagggcagtagcattaagaccaacgctcaagttcatcttcatacaaaatacttgttgaagatggattttgagaattttttccctagcataacaccacgtctatttttctcaaagttacgacttgcaaatattgatttaactgcagatgataaagtactacttgagaatatattattcttcaaatccaagagaaatagtaatttaagattaagtattggagcaccaagctcacctttaatatcaaattttgtgatgtacttttgggatattgaggttcaagagatatgctctaaaataggcgttaactatactcgttatgctgatgatttaaccttttcaacaaataataaagatgttttgtttgatatacctgacatgcttgaaaacgtactgcctaaatattctttaggtaggattagaatcaatcatgaaaaaacagtgttttcttcaaaaggacataaccgtcacgttactggtataactctaacaaacgataacaaattatccataggtagagaaaggaaaagaaaaatctctgccatgatccatcattttataaatgggaaattatctactgacgaatgcaataaattagtcgggctacttgcatttgctaaaaatattgagccttcgttttataaaagcatggtcattaaatatggatctgataatatttataaattacaaaaacaaaaagacaaataa

SEQ ID NO: 38729 - DNA, 645 bp, Salmonella typhimurium
atgcgtattattctgcttggcgctccgggcgcgggtaaaggaactcaggctcagttcatcatggagaaatatggtattccgcaaatctccactggcgatatgctgcgcgccgcagtgaaatcaggctccgagttgggcaaacaggcgaaagatatcatggacgccggtaaactggtgaccgatgaactggtgattgcgctggttaaagagcgtatcgcccaggaagactgccgtaacggttttctgctggacggtttcccgcgcacgatcccgcaggctgacgcgatgaaagaagcgggtattgtcgtggattacgtgctggaattcgacgtaccggacgaactgatcgttgaccgtattgtgggtcgtcgcgtacacgccgcctctggccgcgtttaccacgttaagtttaatccgccgaaagtggaaggcaaagatgacgtcaccggcgaagatctgaccacccgtaaagacgatcaggaagagaccgttcgcaaacgtctggtggaatatcatcagatgaccgcgccgctgattggctactaccagaaagaagcggaagcgggcaacaccaaatacgctaaagttgacggtacgcaggccgttgccgacgtgcgcgcagcgctggaaaaaatcctcggttaa

SEQ ID NO: 38730 - DNA, 1305 bp, Salmonella typhimurium
atgaaatttcccggtaaacgtaaatccaaacactattttcccgtcaatgcgcgtgacccgttgttgcaacaaattcagccagaacaggaaaccaacgcctcctgggtcgtcggtatcgaccagacgttggtggatattgaggcgaaagtggatgacgattttattacacgctatggattaagcgccgggcattctctggtgatagaagacgaggtggcggagaagctgtatcaggaactgacgcgggaaaatctgatcacccatcagtttgctggcggcaccataggcaatacgatgcacaattactcggtactggcggatgaccgttcggtgttactgggcgtgatgtgcagcaacattgagattggcagctacgcttatcgctacctgtgtaatacttccagccgtaccgacctgaattatctgcaagcggtagatggcccgattggccgctgtttcacgctgattggcgaatccggcgagcgtaccttcgctatcagccccggccatatgaatcagttacgggcggaaagtattccggaagcggtgatcgctggcgcttccgcgctggtgttgacctcatatctggtgcgctgtaagcctggcgaaccgatgcctgacgcgacgatgaaagcgatcgaatacgcgaaaaagcataacgtgccggttgtcatgacgctgggcaccaaatttgtgatcgccgataatccgcagtggtggcaggcgtttctcaaagagaatgtctcgattctggcaatgaatgaagaagaagcggaagcgctgaccggcgaaaacgacccgctgctggcggcggataaggcgctggactgggtcgacctggtgttatgcaccgccgggccgatagggttatatatggcgggcttcaccgaagaggaagcaaaacgtaaaacccagcatccgctgctaccgggagctattgctgaatttaaccagtatgaatttagccgggcaatgcgccataaagattgtattaatccgctgcgcgtttattcgcatattgcgccgtatatgggcgggccggaaaaaatcatgaacaccaacggcgcgggcgatggcgcgctggcggcgctgctgcacgatattacggcgaacagttaccatcgtagcaacgtaccgaactccagtaagcacaaatttacctggctgacctattcgtcgctggcgcaggtgtgtaaatatgctaaccgtgtcagttatcaggtactgaaccagcattctccgcgtctgacacgcgggctgccggaacgtgaggacagcctggaagagtcgtactgggatcgctaa

SEQ ID NO: 38731 - DNA, 1155 bp, Salmonella typhimurium
atggcaaaacacctttttacgtctgagtccgtatcagaagggcatcctgacaaaatcgcagaccaaatctctgatgccgtgttggacgctatcctgcaacaggatccgaaagcacgcgtcgcctgtgaaacctacgttaaaaccggcatggttttagttggcggtgagatcaccaccagcgcctgggtcgatatcgaagagattacccgtaatacggtgcgcgaaattggctatgtgcattccgacatgggctttgacgccaactcttgcgcggtactgagcgcaattggcaaacagtctccggatatcaaccagggcgttgaccgcgcagacccgctggaacaaggcgcgggcgaccagggcctgatgtttggctacgcgacaaatgaaaccgacgtactgatgcctgcgccaatcacctacgcgcaccgtctggtacagcgtcaggctgaagtgcgtaaaaatggcaccctgccatggttgcgtccggatgcaaaaagccaggtcactttccagtatgacgacggcaaaatcgtcggtatcgacgccgtggttctctctacgcagcacgcagaagatatcgaccaaaaatcgctgcaagaagcggtgatggaagagatcatcaaacccattctgccgtctgaatggttaaatacgtccactaagttttttatcaacccaaccgggcgttttgttatcggcggcccgatgggcgattgcggtctgaccggtcgtaagatcatcgttgatacctacggcggtatggcgcgtcacggcggcggcgccttctccggtaaagatccgtctaaagttgaccgttctgcagcttacgctgcgcgttatgtcgcgaaaaacatcgtggcggcaggtctggcggatcgctgtgaaatccaggtctcctacgctatcggcgtagcggagccgacgtccatcatggtggaaacgttcggtactgaaaaagtgcctgctgaacagttgattctgctggtgcgcgaattcttcgacctgcgcccgtacggcttgattcagatgctggatctgctgcacccgatctacaaagaaactgcggcttacggccacttcggtcgcgaaaacttcccatgggaaaaaaccgacaaagcgcaactgctgcgcgatgctgccggtctgaaataa

SEQ ID NO: 38732 - DNA, 1395 bp, Salmonella typhimurium
atgcctgacaataaaaaacaagggcgttccaacaaggccatgacattttttgtctgctttcttgcagccctggcaggattactttttggcctggatatcggcgttatcgccggtgctttacccttcattaccgacgagtttcagattaccgcacacactcaggaatgggtggtcagctccatgatgtttggcgcggccgtcggcgctgtcggcagcggctggctctcctttaagctgggtcgtaaaaaaagcctgatgatcggcgctatcctgttcgtcgccggttcgctgttctccgctgcggcgcctaacgttgaagtcctgattatttctcgcgtgctgctgggtctggccgtcggcgtcgcttcctacactgcaccgttgtacctgtccgagatcgcgccggaaaaaattcgcggcagtatgatctcaatgtaccaactcatgatcaccatcgggattctgggcgcttatctgtccgataccgcgttcagctacagcggcgcatggcgctggatgctcggcgtgatcatcatcccggctattctgctgctgatcggcgtcttcttcctgccggacagcccgcgctggtttgcggcgaaacgccgtttccatgatgctgaacgcgtcctgttgcgcctgcgtgacaccagtgcggaagcaaaacgtgagctcgatgaaattcgcgaaagtttgcaggttaaacagagcggttgggcgctgttcaaagagaacagcaacttccgccgcgccgtgtttcttggcattttgttgcaggtcatgcagcaatttaccgggatgaacgtcatcatgtattacgcgccgaaaatcttcgaactggcggggtacacgaataccacggagcagatgtggggcaccgttattgttggtctgactaacgtgctggcaaccttcatcgctatcggcctggttgaccgctggggccgcaagccgaccctgacgctgggcttcctggtcatggcgattggtatggggattctgggtacgatgatgcacatcggcatccattcgccgtctgcgcaatacttcgctatcgctatgctgctgatgttcatcattggatttgcgatgagcgctggtccgctgatttgggtactgtgctccgaaatccagccgctgaaaggccgcgatttcggcatcacctgctccaccgcgaccaactggatcgccaatatgatcgtcggcgcaacgttcctgaccatgctgaacaatctgggtaacgccaacaccttctgggtctatgcgggcctgaacgtactgtttatcctgctgaccctgtggctggtgccggaaaccaaacacgtttcgctggaacacattgaacgtaacctgatgaaaggtcgtaaactgcgcgaaatcggcgcccacgactaa

SEQ ID NO: 38733 - DNA, 708 bp, Salmonella typhimurium
atgtaccgtaatttttcttttgccgctgcgttgctggccgcagcgttttcaggccaggccctggccgatggcattaacaatttttctcaggccaaagcggcgagcgtcaaagtcaatgctgacgcgcccggcagcttttactgcgggtgccaaatccgctggcagggtaaaaaaggcgtcgtagacctggagtcctgtggctataaggtgcgtaaaaacgagaatcgcgccagacgcattgagtgggagcacgttgtccccgcctggcaattcggtcatcagcgccagtgctggcaggacggcgggcgaaaaaactgcgctaaagacccggtctaccgcaaaatggaaagcgatatgcataacctgcaacccgcgattggcgaagtgaatggcgatcgcggcaactttatgtatagccagtggaacggcggcgaaggtcagtacgggcaatgcgccatgaaagtggattttaaagcgaaaatcgccgagccgcccgcccgcgcccgtggcgcaatcgcccgcatttatttttatatgcgcgaccaataccaactgaaactttcccgccaacaaacgcagctttttaacgtctgggataagcagtaccccgttaccgcctgggagtgcgagcgcgatgcgcgtatcgcgaaggtccagggtaatcataatccctatgtgcaacgcgcttgccaggcgcgaaagagctaa

SEQ ID NO: 38734 - DNA, 780 bp, Salmonella typhimurium
atgccctggatagccaaacgccggggccatgacgcggatttttttattatgcgtattccccgcatttatcaccctgaattgttgacgtccggtacgcagatttcgttatgcgaagatgcggccaaccatattggtcgtgtacttcgcatgggaccgggacaagcgctacagctgtttgacggcagcaatcaggtattcgatgctgaaatcattagcgccagtaagaaaagcgttgaagtgcaagtgatgaaaggcgaaatcgacgatcgtgaatcgccgctgcatatccatctgggccaggtgatgtcgcgcggtgaaaaaatggaatttactatccagaaatcgatcgaactgggtgtaagcctcattacgccactgttctctgagcgctgcggcgttaaactggatagtgaacgtctgaacaaaaagcgccagcagtggcagaagatcgccatcgccgcctgcgaacaatgcgggcgtaaccgggtgccggaaattcgcccgccgatggcgctggaagcctggtgcgccgagcaagattccgggctgaagctcaatcttcatccgcgcgcccatgccagcatcaacactctgccgctgccggttgaacgcgtccgactgctgatcggcccggaaggcgggctgtcggcggacgaaatcgcgatgaccgcgcgctatcagtttactgatattctgttaggacctcgcgttctgcgtactgagacaaccgcgctcaccgccattaccgcgctacaggtgcgttttggcgacttaggatga

SEQ ID NO: 38735 - DNA, 417 bp, Salmonella typhimurium
atgagcggcaccttactggcctttgacttcggcacaaaaagcatcggcgttgcaataggacaacgcattaccggcaccgcccgtccgcttccggcaatcaaagcacaggacggcacgcccgactggacgctcattgaacgtttgctgaaagagtggcagccggacgaaattattgtcgggctaccgctcaatatggatggcactgaacagccgctgacggcgcgcgcacgtaaattcgccaaccgtattcatgggcgtttcggggtaactgtcacgctgcacgatgaacgactcagcaccgttgaagcacgctccggtctgtttgaacgaggtgggtatcgcgcgctgaacaaaggcaaagtggactcggcctccgccgtgattatcctcgaaagctattttgaacaggggtattaa

SEQ ID NO: 38736 - DNA, 1758 bp, Salmonella typhimurium
atgacaacccggcacactgaacaaaaatacttaaagctactccagcactatggcgacaagcctgttagcgtgacattacaggagctggcggatgtgttgttctgcacccgacggcatatgcgtaatctgttgcttcagatgcaggaggcaaagtggctcatctggcaatcacaggccggacgtgggcatcgcgcccggcttcacctgcgctataaaccagaacagctgttaagcgaaaaggcggagcagttactggagtctggtcatattgatcaggccattcagctgctgggtaaaaataagcaccaggtggcgcaactgctgcgttcaaagctgggctatagcgtgcgggcagactatcagcggctgtgcatcccctattatcggacaatgccgtcgctgtgccccggcataccgttgcgtcgctctgagcagcatctggtcaggcagatttttagcggcctgacgcgcataaatgaggaaaaaggtgaagtcgaagccgatcttgcccaccactggcggcagattgatccactgcgctggcgtttttatctgcgccccgccgtcctctggcatgatggtcaggagctgacgatcgacgcggttatcgcttcactgacccgcagcgctaagctgccgttgttctcgcacttgcagaccattcaggccaccgggccgctgagccttgaaattacgctggcgcacccggataaccgactgccgctgctgctcagccatattgatgccatgatcctaccgcctgaccatacacaacgcgctgatttcccggcacatcctgtggggactggcccttatgaggtggtggaaaacaatggctttcatctacaaatgaaggcctttgaccactatttcggtctgcgcgggctgctggatgaagtggaggtctttatctggccgaatttaacggagacagacaacctggcggaatcgctgtcggataacgacacggcagcctggctcagctccagcctgagcgatgaggattacgtttccggacggcttagccaggtatcaggcaaaccttctgacaacctgcgcgagatgtttcttgagcgtggaggatattttttattatgcgacagccgctccccgcactggcataccgccgaacatcgccgctggctacgggaaacactcagcccttacgccatactccagcatctgagtgaggcaattcgccccttctgggtaccgggcggcagcctgctgtcctcctggtttcatactattgaggcgggcccggcctgttcaccttttatctcgtcgtcgccctacgcaaaactgcgtctggcctatcacgatcagcaccctgaatttccaatgctcctggatatcatgcaagagatcatgcgccagcagggcattttacttgagggcgttgagctgaattatgatgactgggcgaatggcaaagccaatgtggatctctggctggggacggtcaatttccccattcccgaagagtggaacgtcggtacatggctactgggctcccctttactgcgccacgccatcagtggtggggatgatgcgctgctggcccaatgggaaacccagtggcatgccgaaaccatcagcgcggaacaactggtcagggaaaccacccgttcaggctggctacagccgctttttcaccactggatgcgactcaaaagccccgaccgggccagggggatccacctgaataacctggggtggtttgatttccgatccacctggattgagccagggccttaa

SEQ ID NO: 38737 - DNA, 705 bp, Salmonella typhimurium
atgaacgatatcgcgcataacctggcatacatccgggacaaaatctccgccgcggcgacgcgttgcggccgctcttcagaagaagttacgttgcttgcagtgagtaaaaccaaacctgcgagcgacatcgcagaagccattgccgccggacaacgggcatttggtgaaaattatgtacaagagggggtggaaaaaatccgccactttcaggaagcgaaagtggaaggcctgcactggcactttattggccctttacagtccaacaaaagtcggctggtggccgagcattttgactggtgtcataccatcgatcgcttgcgtatcgcctcgcggctgagcgaacagcgtccggataatctgccggcgctaaatgttctgatccaaattaatatcagcgatgaaaacagcaaatcaggcattccgctggcggaactggatgagctggccgctgcggtggctacactgccgcgtctgcggcttcgcggactgatggcgatcccggctccagagtcagattatgtaaggcagtttgaagtcgcacgtcaaatggctgtagcatttgccgggctgaaagcgcgctaccctgacgttgataccttatctctgggtatgagcgacgatatggaagccgcgattgcggcaggtagcacaatggtgcgcatcggcaccgctatctttggtgctcgtgattacacaaaaaattaa

SEQ ID NO: 38738 - DNA, 594 bp, Salmonella typhimurium
atgcaaaaagttgttctcgcaaccggcaacgccggtaaagtgcgcgagctcgcgtcgctgttaagcgattttgggcttgatgtggtagcgcaaacggaactgggcgtcgattccgcggaagaaaccggcctgacgtttattgaaaacgcgattctcaaagcgcgccatgccgccaaaatgaccggcctgcccgccattgccgatgactccggtctggccgttgacgttttaggcggcgcgccgggtatctattccgcgcgctattctggcgaaaacgcgacagatcagcaaaatctggaaaaactgctgcatactctacgggatgttccggacgacaaacgccaggcgcgattccattgtgtactggtttatttgcgtcatgcggaagatcccacaccgatagtctgtcacggtagctggcctggcgtcattactcgccaggcggccggaaatggcggatttggctatgatcccattttcttcgtaccgtctgaaggcaaaaccgccgcagaactgacccgtgaagaaaaaagcgcgatttcccaccgtggacaagcgctcaagctgctgctggatgcgttacgcaatggctaa

SEQ ID NO: 38739 - DNA, 831 bp, Salmonella typhimurium
atgggattgcgtcagagtttacgcattgcggccagcacgctattactggcctgcggattacagtttgcccatgccgatagttccccgcaaacgatcgtatttggcgtcgcgccagggccgtatggcgacatggtgaagcaggcgattgcgccgacattaaaagaaaaagggtataaggtcgtggtgcgcgagtttagcgactatgtccagcccaatatggcgttagctaatggcagcatcgacgccaacctctttcaacataccctctattttgacaaattcaccgctgacaaagggctgaagctcagcaaacttattgtggtaccgaccgccgggatgggcttctattcacgtaaaatcaacagcctggatgcgcttaaaaaaggggacattattaccctctccaacgatccgaccaacctggcgcgcggccttcgcttcctgcaatcgttggggcttatcacgattaaggacaatatcgatccgaccaaagcctctgaacgagatatcgccagcaatccaaaaggactggttttcaaaccgctggaagccgcacagctaccgcgcacgctggatggcgtgaccggcgcgctggttaacgggaactttgcggtggcggcaggactcgatctctccagcgcgattaagcaggaacacctggatgagaatctgaaaaatatcattgcggtacgcagtgaagatgccgataagccgtttgccaaagatattgtcgaggcggtgaaatcgccggcttatcgcgcggttatcgacgatccaaagaatatttatagcgccttccagaaaccggaatggatgaccgcgacaccctga

SEQ ID NO: 38740 - DNA, 660 bp, Salmonella typhimurium
gtggatgatttattgccggatttaacgctggcgttcaatgaaactttccagatgttgagtatttcaacggtgctggcgattcttggcggtctaccgctcggttttctgatttttgtcaccgatcgtcatctgttctggcagaaccgttttatttatctcgtcgcctcggttctggtgaatattatccgctcggtgccatttgttattttactggtgctgttactgccgctaacgcagcttttgctgggcaatacgataggcccgattgcagcctccgtcccgctgtcggtggccgcaatcgcgttttatgcacgcctggtagatagcgcgctccgtgaagtcgataaagggattattgaggcggcgctggcattcggcgctagtccgatgcgtattatctgtaccgtactgttgccggaagccagcgcagggctgctgcgcggcctgacgattacgctggtaagcttaatcggctactcggcgatggccgggattgtcggcggcggcggggtaggcgacctggcgattcgctatggctactaccgttacgaaaccgaagtgatggttgttaccgtagtggcgctgattgtgctggttcaggtcgttcagatgctgggcgactggctggcaaaacgtgccgacaagcgcgacagacactaa

SEQ ID NO: 38741 - DNA, 777 bp, Salmonella typhimurium
atgttacgtttctctgccaatctttctatgctgtttacggaatatgatttcctggaacgctttgataaagcggcgttgtcgggatttcgcggcgtggaattcatgtttccctacgataacgacatcgaagtgttaaaacgtaagctcagggataataatctggaacatacgttacataatttacctgctggcgactgggcggctggcgaacgtggaattgcctgtattcctgggcgcgaagaagagtttcgcgatggcgtagcggccgcaatccgctatgcacgtgcgttaggcaataagaaaataaattgtctggtgggtaaaacgccgtcaggattctccgcaacggagatccacgacacgttggtcgaaaacctgcgctatgcggcaaatatgctggcgaaagaagacattttattacttatcgaacctattaatcactttgatatgccgggattccatctcaccggcactcaacaggcgttagcattaattaaggatatcggcagcgataatatcaaaattcagtatgatatttatcacatgcaacgcatggaaggggagttaacgcaaaccatgacggcatgggccgataaaataggccatttacagattgctgataacccgcgtcgcggcgagccggggaccggggaaattaattatgactttatttttaatgtcattaaacagtctggttatgatggctgggttggctgtgaatataaaccactgactaccacggaagcgggattatcgtggattaatcagtaccgttaa

SEQ ID NO: 38742 - DNA, 1869 bp, Salmonella typhimurium
atgagcactgataataagcaatcgttgcctgcgattaccctcgcagctattggggttgtctacggtgatattggtaccagcccgctttatacgcttcgtgaatgtttgtccggtcagtttggttttggcgttgaacgagatgccgtatttggttttctgtcgctgatcttctggctactcatctttgtggtttccatcaaatatctcaccttcgtgatgcgcgccgataacgcgggtgaaggtggaattttgacgctgatgtcgcttgccgggcgtaatacctcggcgcgcaccacatccatgttagttatcatgggactgataggcggcagctttttctatggcgaagtggtgattacgccggcgatttcggtgatgtcggcgattgaaggcctggagattgtcgcgccgcagctggatacctggattgtcccgctctccattattgtgctgactctgttgtttatgattcagaagcacggtacgggaatggtagggaaactctttgcgccgatcatgctgacctggtttttaatcctggcggtacttggcctgcgcagtattatcgccaatcccgaagtgttacatgcgctgaatcctgtctgggcggtacgttttttccttgaatataaaaccgtatcatttattgcgttgggcgcggtggtgctgtcgattaccggcgtagaggcgttgtacgccgatatgggacacttcggtaagttcccgattcgcctggcgtggtttaccgtggtattgccgtcgttagtactgaactactttggtcagggcgcattgctacttaagcatccggaagcgattaaaaaccccttcttcctgttggcgccggactgggcgttaattccgctgctgattctggccgcgctggcgacggtgatcgcctcccaggcggtcatttccggcgtcttttcgctgacgcgtcaggccgtgcgtcttggctatttgtcgccaatgcgcattatccatacctccgagatggagtccggtcagatctatatccctttcgttaactggctgctttatttcgcggtcgtggttgttattgttagctttgagcactccagcaacctggcggcggcctatggtatcgccgtgaccggcacgatggtgctgacgtctattctttctacgaccgtggcgcgtaagaactggcactggaacaaatattttgtcgcgctgatcctcatcgcattcctgtgcgtggatatcccgctgttctcggctaacctcgataaattgttgtccggcggttggctgccgctgagcctgggtctgatcatgttcacgatcatgaccacctggaagagcgagcgtttccgtctgttgcgtcgtatgcatgaacacggtaattcgctggaagcgatgattgcttcactggagaagtcaccgccggttcgggtgccgggtactgccgtatacatgtcgcgcgcgctcagtgtgatcccttttgctttattgcataacctgaagcacaacaaagtgttgcatgagcgcgtaatcttactgacgttgcgtacggaagatgcgccttatgtgcataacgttcgccgggtgcagattgagcagttgtctccgacattctggcgcgtggtggccagctacggctggcgcgaaacgccaaacgttgaagaggtgttccaccgctgcggtctggaaggccttagctgtcggatgatggaaacgtcgttctttatgtcgcacgagtcgttgattgtcggcaaacgcccgtggtatttgcgtctgcgtggcaagctgtatttgttgttgcaacgcaacgccctgcgcgcgccggatcagttcgagatcccgcctaaccgcgtgattgagttaggtacgcaggtcgagatttaa

SEQ ID NO: 38743 - DNA, 879 bp, Salmonella typhimurium
atgaaactgggatttattggcctgggaattatgggctctccaatggctatcaatttggcacgcgccggtcatcaattacacgttacgactattggtccggtcgcggacgaactgctctcgctgggggcggtaaatgttgagactgcacgtcaggtaactgaatttgcagacattatcttcataatggtgccggatacaccgcaggttgaagacgtgttatttggcgaacacggttgcgctaaaacatcgcttcagggaaaaaccatcgtcgatatgagttctatttctcctatcgaaaccaaacgttttgcccagcgcgttaatgaaatgggcgctgattacctggatgccccggtttccgggggagaaatcggggcgcgtgaaggcactctgtcgattatggtcggcggcgagcagaaagtctttgaccgcgttaaaccgctctttgacatcctgggaaaaaatatcaccctggtgggcggcaatggggatgggcaaacctgtaaggtggctaaccaaattattgttgcgctgaatattgaagcggtttctgaagccttagtgtttgcttcaaaagcaggcgccgatccggtacgcgtgcgccaggcgttaatgggcgggttcgcctcttcacgcattctggaagttcacggcgagcgcatgatcaaccggacgttcgagcctggtttcaaaatcgcgcttcatcagaaagaccttaatcttgcattgcaaagcgcaaaagcgctggcgctgaatttaccgaatacggcgacctgccaggaattattcaatacctgtgcggcaaatggcgggagccagcttgaccattcggcaatggtacaggcgctggaattaatggccaatcataaattgtcctaa

SEQ ID NO: 38744 - DNA, 1314 bp, Salmonella typhimurium
atggtcggcggtttttttatactggggctatcaacatttaatatcatgttggccattattatcagcgcattatttattgcggcggcgatggtaatgaatggcgcggcaggcagcaaatatggcgttccttttgctatgatattgcgaggttcttacggtgtccgcggcgcgctattccctggattattgcgagggggaatcgcggcaattatgtggttcggcttacagtgttacgcgggatcgctggcatttcttattttgattgggaagatctggccaggatttctgacattaggcggagatttcaagctgctgggtctttcactgccaggactaattacttttctaattttttggattattaacgttggcatcggttttggcggtggtaaagtattaaataaatttaccgctatcctcaatccatgtatttacattgtctttggcggcatggctatttgggcaatatcgctggtcggcattggcccgattctggactatctgccttcaggcgtgcaaaaagcagagcacagcggctttctgttcctggtggtgattaacgccgtagtcgccgtctgggctgcgccagcggtaagcgcgtccgatttcacgcaaaacgcgcattcatttcgcgctcaggcattgggacaaacattggggcttatcgtagcgtatatattattcgccgtagccagcgtgtgcattattgccggagccagtattcattatggtatggatacctggaacgtgctggatattgtgcagcgctgggacagcttgtttgcttcattctttgcggtgctggtgattctgatgacgacaatttcaaccaacgccaccggtaatattatacctgcggggtatcaaattgcggcgcttgccccgacaaagcttaactataaaaatggcgtaatgattgccagtattatcagtctactgatttgcccatggaaattaatggagaatcaggacagtatttatctgttcctcgatattatcggcggtatgcttggcccggtaatcggcgtaatgttagctcattattttgtggtaatgcgtggaaaaattaatcttgatgagctgtacaccgccagcggtgattacaaatattatgataatggatttaacctgactgcattttcagtcaccctagtcgcagtcattctgtcattaggcggcaagtttataccatttatggagcctttatcccgcgtgtcctggtttgtaggcgtaatagttgcgttcgttgcttatgcgctattgaagaaacgcacgggttttgaaaatacaggagagaaaaaactcgcaggttaa

SEQ ID NO: 38745 - DNA, 1362 bp, Salmonella typhimurium
atgtcttttgatttaattattaagaacggtactgtcatcttagaaaacgaagcgagagttatcgatatcgccgtccagggcggaaaaatcgccgcgattggcgagaacctgggggaagcgaaaaatgtgctggatgcgacgggattgatcgtttcgccgggcatggttgacgcgcatacccacatttctgaaccgggccgtacccactgggaaggctatgaaaccggtacgcgcgcggcggcgaaaggcggtattaccacgatgattgagatgccgctcaatcagctgccggcgacggtcgatcgtgagacgattgaactcaagtttgacgcggcaaaaggtaaattgaccatcgacgccgcgcagttgggcggtttggtctcttataacctggatcggctgcatgagctggacgaagtgggcgttgtcggcttcaagtgctttgtcgccacctgcggcgatcgtggcatcgataatgattttcgcgacgttaatgactggcagttttacaaaggcgcgcaaaaactgggagagatggaccagacggtactggtacattgcgaaaatgctctgatttgcgatgagctgggcgaagaagctaaacgcgaaggtcgcgtaacggcgcatgattatgtcgcctcacgtccggtatttactgaagtggaagccattcgtcgcgtgctgtatctggcgaaagcggcaggttgccgtctgcacgtttgtcatatcagcagcccggagggggtagaggaagtaacgcgtgcgcgtcaggaaggccaggatgtcacctgtgaatcgtgcccgcactattttgtcctcgataccgatcagttcgaagagattggcaccctggcaaaatgttctccgccaattcgcgaccaggaaaaccagaaagggatgtgggaaaaactgtttaacggcgaaatcgactgcctggtatccgaccactctccatgccctccggaaatgaaagcaggcaatatcatgcaagcatggggcggaattgccggactgcaaaactgcatggacgtcatgtttgatgaagcggtgcaaaaacgcggtatgtcgttgccgatgtttggcaaattaatggcgaccaacgccgccgatatttttggtctgaaacataaaggacgtattgcccccggcaaagatgctgacctggtctttattcagcctgacagcagctatgttctgaaaaatgaagatctggaatatcgccataaagtcagtccgtatgttggccgtactattggcgcgcgtattaccaaaacgattttgcgcggcgatgttatttatgacatcgagcatggcttccctgtgccgccaaaaggtcagtttatccttaaacatcagcagtaa

SEQ ID NO: 38746 - DNA, 894 bp, Salmonella typhimurium
atgaaaacgttggtagttgctcttggcggcaacgcattattgcagcgcggagaagcgctaacggcagagaatcaatatcgcaatattgccgacgcagtgcctgcgctggcgcgacttgcccgctcgtatcggctggcgatagtacatggcaacggcccccaggtcggcctgttggctttacagaaccttgcctggaaagccgttgagccttatccgctggatgtgctggtggcggagagtcagggcatgatcggctatatgctggcgcaacgtctggcgcttgaacccgatatgccgccggtgactgcggtattaacgcgaataaaggtatcggcggacgatcctgcttttcttgaaccggaaaagtttatcggtcccgtttattcgccagaagagcaaatggcgctggaagcgacttatggctggcatatgaaacgtgatggaaaatatctgcgccgtgtcgtcgcttccccggcgccgcgtcagattatcgaaagcgccgctattgagttattgctaaaagagggccatgtggtgatttgcagcggcggtggcggggtacctgttgccggcgaaggcgaaggggtcgaggcggtgatagataaagacctggcggcggcattgctggcggagcagatagcggccgatggtctgatcattttgacggatgcggatgcggtgtatgaacattgggggacgccgcagcagcgcgctattcgtcaggcttcgcccgatgagctggcgccgtttgccaaagccgatggcgcgatgggaccgaaggtgaccgcggtaagcgggtatgtgaagcggtgcggaaagccggcatggattggcgcgctgtcgcgtattgatgataccctggcgggcagggcgggaacctgcatctgtctgtga
